(19) United States
(12) Patent Application Publication
(10) Pub. No.: US 2004/0034888 A1
(43) Pub. Date: Feb. 19, 2004

(54) Nucleic acid molecules and other molecules associated with plants and uses thereof for plant improvement

(76) Inventors: Jingdong Liu, Chesterfield, MO (US); Yihua Zhou, Ballwin, MO (US); David K. Kovalic, University City, MO (US); Steven E. Screen, St. Louis, MO (US); Jack E. Tabaska, St. Louis, MO (US); Yongwei Cao, Chesterfield, MO (US)

Correspondence Address: Lawrence M. Lavin, Jr., Patent Department, E2NA, Monsanto Company, 800 N. Lindbergh Boulevard, St. Louis, MO, 63167, US

(21) Appl. No.: 10/425,114

(22) Filed: Apr. 28, 2003

Related U.S. Application Data
(63) Continuation-in-part of application No. 09/985,678, filed on Nov. 5, 2001, now abandoned.
Application No. 09/985,678 is a continuation of application No. 09/304,517, filed on May 6, 1999, now abandoned.

(51) Int. Cl. A01H 1/00; C12N 15/82; C07H 21/04; C07K 14/415; C12N 9/24

(52) U.S. Cl. 800/289; 530/370; 536/23.6; 435/200

(57) ABSTRACT

Polynucleotides useful for improvement of plants are provided. In particular, polynucleotide sequences are provided from plant sources. Polypeptides encoded by the polynucleotide sequences are also provided. The disclosed polynucleotides and polypeptides find use in production of transgenic plants to produce plants having improved properties.

[0001] This application claims the benefit of applications U.S. Ser. No. 09/637,086 filed Aug. 11, 2000, U.S. Ser. No. 09/663,423 filed Sep. 15, 2000, U.S. Ser. No. 09/666,355 filed Sep. 20, 2000, U.S. Ser. No. 09/692,257 filed Oct. 19, 2000, U.S. Ser. No. 09/696,664 filed Oct. 25, 2000, U.S. Ser. No. 09/733,370 filed Feb. 1, 2001, U.S. Ser. No. 09/804,730 filed Mar. 13, 2001, U.S. Ser. No. 09/826,019 filed Apr. 5, 2001, U.S. Ser. No. 09/850,147 filed May 7, 2001, U.S. Ser. No. 09/849,526 filed May 7, 2001, U.S. Ser. No. 09/849,529 filed May 7, 2001, U.S. Ser. No. 09/865,419 filed May 29, 2001, U.S. Ser. No. 09/865,439 filed May 29, 2001, U.S. Ser. No. 09/874,708 filed Jun. 5, 2001, U.S. Ser. No. 09/873,402 filed Jun. 5, 2001, U.S. Ser. No. 60/179,730 filed Feb. 2, 2000, U.S. Ser. No. 60/312,544 filed Aug. 15, 2001, U.S. Ser. No. 60/324,109 filed Sep. 21, 2001, U.S. Ser. No. 10/155,881 filed May 22, 2002 and U.S. Ser. No. 10/219,999 filed Aug. 15, 2002 hereby incorporated by reference herein in their entirety.

### INCORPORATION OF SEQUENCE LISTING

[0002] Two copies of the sequence listing (Seq. Listing Copy 1 and Seq. Listing Copy 2) and a computer-readable form of the sequence listing, all on CD-ROMs, each containing the file named pa_{—}00560.rpt, which is 149,819,349 bytes (measured in MS-DOS) and was created on Apr. 28, 2003, are herein incorporated by reference.

### INCORPORATION OF TABLE

[0003] Two copies of Table 1 (Table 1 Copy 1 and Table 1 Copy 2) all on CD-ROMs, each containing the file named pa_{—}00560. txt, which is 192,453,044 bytes (measured in MS-DOS) and was created on Apr. 24, 2003, are herein incorporated by reference.

### FIELD OF THE INVENTION

[0004] Disclosed herein are inventions in the field of plant biochemistry and genetics. More specifically polynucleotides for use in plant improvement are provided, in particular, sequences from multiple species and the polypeptides encoded by such cDNAs are disclosed. Methods of using the polynucleotides for production of transgenic plants with improved biological characteristics are disclosed.

### BACKGROUND OF THE INVENTION

[0005] The ability to develop transgenic plants with improved traits depends in part on the identification of genes that are useful for production of transformed plants for expression of novel polypeptides. In this regard, the discovery of the polynucleotide sequences of such genes, and the polypeptide encoding regions of genes, is needed. Molecules comprising such polynucleotides may be used, for example, in DNA constructs useful for imparting unique genetic properties into transgenic plants.

### SUMMARY OF THE INVENTION

[0006] This invention provides isolated and purified polynucleotides comprising DNA sequences and the polypeptides encoded by such molecules from multiple species. Polynucleotide sequences of the present invention are provided in the attached Sequence listing as SEQ ID NO: 1 through SEQ ID NO: 36,564. Polypeptides of the present invention are provided as SEQ ID NO: 36,565 through SEQ ID NO: 73,128. Preferred subsets of the polynucleotides and polypeptides of this invention are useful for improvement of one or more important properties in plants.

[0007] The present invention also provides fragments of the polynucleotides of the present invention for use, for example as probes or molecular markers. Such fragments comprise at least 15 consecutive nucleotides in a sequence selected from the group consisting of SEQ ID NO: 1 through SEQ ID NO: 36,564 and complements thereof. Polnucleotide fragments of the present invention are useful as primers for PCR amplification and in hybridization assays such as transcription profiling assays or marker assays, e.g. high throughput assays where the oligonucleotides are provided in high-density arrays on a substrate. The present invention also provides homologs of the polynucleotide and polypeptides of the present invention.

[0008] This invention also provides DNA constructs comprising polynucleotides provided herein. Of particular interest are recombinant DNA constructs, wherein said constructs comprise a polynucleotide selected from the group consisting of:

[0009] (a) a polynucleotide comprising a nucleic acid sequence selected from the group consisting of SEQ ID NO: 1 through SEQ ID NO: 36,564;

[0010] (b) a polynucleotide encoding a polypeptide having an amino acid sequence selected from the group consisting of SEQ ID NO: 36,565 through SEQ ID NO: 73,128;

[0011] (c) a polynucleotide comprising a nucleic acid sequence complementary to a nucleic acid sequence selected from the group consisting of SEQ ID NO: 1 through SEQ ID NO: 36,564;

[0012] (d) a polynucleotide having at least 70% sequence identity to a polynucleotide of (a), (b) or (c);

[0013] (e) a polynucleotide encoding a polypeptide having at least 80% sequence identity to a polypeptide having an amino acid sequence selected from the group consisting of SEQ ID NO: 36,565 through SEQ ID NO: 73,128;

[0014] (f) a polynucleotide comprising a promoter functional in a plant cell, operably joined to a coding sequence for a polypeptide having at least 80% sequence identity to a polypeptide having an amino acid sequence selected from the group consisting of SEQ ID NO: 36,565 through SEQ ID NO: 73,128, wherein said encoded polypeptide is a functional homolog of said polypeptide having an amino acid sequence selected from the group consisting of SEQ ID NO: 36,565 through SEQ ID NO: 73,128; and

[0015] (g) a polynucleotide comprising a promoter functional in a plant cell, operably joined to a coding sequence for a polypeptide having an amino acid sequence selected from the group consisting of SEQ ID NO: 36,565 through SEQ ID NO: 73,128, wherein transcription of said coding sequence produces an RNA molecule having sufficient complementarity to a polynucleotide encoding said polypeptide to result in decreased expression of said polypeptide when said construct is expressed in a plant cell.

[0016] Such constructs are useful for production of transgenic plants having at least one improved property as the result of expression of a polypeptide of this invention. Improved properties of interest include yield, disease resistance, growth rate, stress tolerance and others as set forth in more detail herein.

[0017] The present invention also provides a method of modifying plant protein activity by inserting into cells of said plant an antisense construct comprising a promoter which functions in plant cells, a polynucleotide comprising a polypeptide coding sequence operably linked to said promoter, wherein said protein coding sequence is oriented such that transcription from said promoter produces an RNA molecule having sufficient complementarity to a polynucleotide encoding said polypeptide to result in decreased expression of said polypeptide when said construct is expressed in a plant cell.

[0018] This invention also provides a transformed organism, particularly a transformed plant, preferably a transformed crop plant, comprising a recombinant DNA construct of the present invention.

### DETAILED DESCRIPTION OF THE INVENTION

[0019] The present invention provides polynucleotides, or nucleic acid molecules, representing full length insert (FLI) sequenced DNA sequences and the polypeptides encoded by such polynucleotides. The polynucleotides and polypeptides of the present invention find a number of uses, for example in recombinant DNA constructs, in physical arrays of molecules, and for use as plant breeding markers. In addition, the nucleotide and amino acid sequences of the polynucleotides and polypeptides find use in computer based storage and analysis systems.

[0020] Depending on the intended use, the polynucleotides of the present invention may be present in the form of DNA, such as cDNA or genomic DNA, or as RNA, for example mRNA. The polynucleotides of the present invention may be single or double stranded and may represent the coding, or sense strand of a gene, or the non-coding, antisense, strand.

[0021] The polynucleotides of the present invention find particular use in generation of transgenic plants to provide for increased or decreased expression of the polypeptides encoded by the cDNA polynucleotides provided herein. As a result of such biotechnological applications, plants, particularly crop plants, having improved properties are obtained. Crop plants of interest in the present invention include, but are not limited to soy, cotton, canola, maize, wheat, sunflower, sorghum, alfalfa, barley, millet, rice, tobacco, fruit and vegetable crops, and turf grass. Of particular interest are uses of the disclosed polynucleotides to provide plants having improved yield resulting from improved utilization of key biochemical compounds, such as nitrogen, phosphorous and carbohydrate, or resulting from improved responses to environmental stresses, such as cold, heat, drought, salt, and attack by pests or pathogens. Polynucleotides of the present invention may also be used to provide plants having improved growth and development, and ultimately increased yield, as the result of modified expression of plant growth regulators or modification of cell cycle or photosynthesis pathways. Other traits of interest that may be modified in plants using polynucleotides of the present invention include flavonoid content, seed oil and protein quantity and quality, herbicide tolerance, and rate of homologous recombination.

[0022] The term “isolated” is used herein in reference to purified polynucleotide or polypeptide molecules. As used herein, “purified” refers to a polynucleotide or polypeptide molecule separated from substantially all other molecules normally associated with it in its native state. More preferably, a substantially purified molecule is the predominant species present in a preparation. A substantially purified molecule may be greater than 60% free, preferably 75% free, more preferably 90% free, and most preferably 95% free from the other molecules (exclusive of solvent) present in the natural mixture. The term “isolated” is also used herein in reference to polynucleotide molecules that are separated from nucleic acids which normally flank the polynucleotide in nature. Thus, polynucleotides fused to regulatory or coding sequences with which they are not normally associated, for example as the result of recombinant techniques, are considered isolated herein. Such molecules are considered isolated even when present, for example in the chromosome of a host cell, or in a nucleic acid solution. The terms “isolated” and “purified” as used herein are not intended to encompass molecules present in their native state.

[0023] As used herein a “transgenic” organism is one whose genome has been altered by the incorporation of foreign genetic material or additional copies of native genetic material, e.g. by transformation or recombination.

[0024] It is understood that the molecules of the invention may be labeled with reagents that facilitate detection of the molecule. As used herein, a label can be any reagent that facilitates detection, including fluorescent labels, chemical labels, or modified bases, including nucleotides with radioactive elements, e.g. ³²P, ³³P, ³⁵S or ¹²⁵I such as ³²P deoxycytidine-5′-triphosphate (³²PdCTP).

[0025] Polynucleotides of the present invention are capable of specifically hybridizing to other polynucleotides under certain circumstances. As used herein, two polynucleotides are said to be capable of specifically hybridizing to one another if the two molecules are capable of forming an anti-parallel, double-stranded nucleic acid structure. A nucleic acid molecule is said to be the “complement” of another nucleic acid molecule if the molecules exhibit complete complementarity. As used herein, molecules are said to exhibit “complete complementarity” when every nucleotide in each of the molecules is complementary to the corresponding nucleotide of the other. Two molecules are said to be “minimally complementary” if they can hybridize to one another with sufficient stability to permit them to remain annealed to one another under at least conventional “low-stringency” conditions. Similarly, the molecules are said to be “complementary” if they can hybridize to one another with sufficient stability to permit them to remain annealed to one another under conventional “high-stringency” conditions. Conventional stringency conditions are known to those skilled in the art and can be found, for example in Molecular Cloning: A Laboratory Manual, 3^{rd} edition Volumes 1, 2, and 3. J. F. Sambrook, D. W. Russell, and N. Irwin, Cold Spring Harbor Laboratory Press, 2000.

[0026] Departures from complete complementarity are therefore permissible, as long as such departures do not completely preclude the capacity of the molecules to form a double-stranded structure. Thus, in order for a nucleic acid molecule to serve as a primer or probe it need only be sufficiently complementary in sequence to be able to form a stable double-stranded structure under the particular solvent and salt concentrations employed. Appropriate stringency conditions which promote DNA hybridization are, for example, 6.0×sodium chloride/sodium citrate (SSC) at about 45° C., followed by a wash of 2.0×SSC at 50° C. Such conditions are known to those skilled in the art and can be found, for example in Current Protocols in Molecular Biology, John Wiley & Sons, N.Y. (1989). Salt concentration and temperature in the wash step can be adjusted to alter hybridization stringency. For example, conditions may vary from low stringency of about 2.0×SSC at 40° C. to moderately stringent conditions of about 2.0×SSC at 50° C. to high stringency conditions of about 0.2×SSC at 50° C.

[0027] As used herein “sequence identity” refers to the extent to which two optimally aligned polynucleotide or peptide sequences are invariant throughout a window of alignment of components, e.g. nucleotides or amino acids. An “identity fraction” for aligned segments of a test sequence and a reference sequence is the number of identical components which are shared by the two aligned sequences divided by the total number of components in the reference sequence segment, i.e. the entire reference sequence or a smaller defined part of the reference sequence. “Percent identity” is the identity fraction times 100. Comparison of sequences to determine percent identity can be accomplished by a number of well-known methods, including for example by using mathematical algorithms, such as those in the BLAST suite of sequence analysis programs.

[0028] Polynucleotides—This invention provides polynucleotides comprising regions that encode polypeptides. The encoded polypeptides may be the complete protein encoded by the gene represented by the polynucleotide, or may be fragments of the encoded protein. Preferably, polynucleotides provided herein encode polypeptides constituting a substantial portion of the complete protein, and more preferentially, constituting a sufficient portion of the complete protein to provide the relevant biological activity.

[0029] Of particular interest are polynucleotides of the present invention that encode polypeptides involved in one or more important biological functions in plants. Such polynucleotides may be expressed in transgenic plants to produce plants having improved phenotypic properties and/or improved response to stressful environmental conditions. See, for example, Table 1 for a list of improved plant properties and responses and the SEQ ID NO: 1 through SEQ ID NO: 36,564 representing the polynucleotides that may be expressed in transgenic plants to impart such improvements.

[0030] Polynucleotides of the present invention are generally used to impart such biological properties by providing for enhanced protein activity in a transgenic organism, preferably a transgenic plant, although in some cases, improved properties are obtained by providing for reduced protein activity in a transgenic plant. Reduced protein activity and enhanced protein activity are measured by reference to a wild type cell or organism and can be determined by direct or indirect measurement. Direct measurement of protein activity might include an analytical assay for the protein, per se, or enzymatic product of protein activity. Indirect assay might include measurement of a property affected by the protein. Enhanced protein activity can be achieved in a number of ways, for example by overproduction of mRNA encoding the protein or by gene shuffling. One skilled in the are will know methods to achieve overproduction of mRNA, for example by providing increased copies of the native gene or by introducing a construct having a heterologous promoter linked to the gene into a target cell or organism. Reduced protein activity can be achieved by a variety of mechanisms including antisense, mutation or knockout. Antisense RNA will reduce the level of expressed protein resulting in reduced protein activity as compared to wild type activity levels. A mutation in the gene encoding a protein may reduce the level of expressed protein and/or interfere with the function of expressed protein to cause reduced protein activity.

[0031] The polynucleotides of this invention represent FLI cDNA sequences from multiple species. Nucleic acid sequences of the polynucleotides of the present invention are provided herein as SEQ ID NO: 1 through SEQ ID NO: 36,564.

[0032] A subset of the nucleic molecules of this invention includes fragments of the disclosed polynucleotides consisting of oligonucleotides of at least 15, preferably at least 16 or 17, more preferably at least 18 or 19, and even more preferably at least 20 or more, consecutive nucleotides. Such oligonucleotides are fragments of the larger molecules having a sequence selected from the group of polynucleotide sequences consisting of SEQ ID NO: 1 through SEQ ID NO: 36,564, and find use, for example as probes and primers for detection of the polynucleotides of the present invention.

[0033] Also of interest in the present invention are variants of the polynucleotides provided herein. Such variants may be naturally occurring, including homologous polynucleotides from the same or a different species, or may be non-natural variants, for example polynucleotides synthesized using chemical synthesis methods, or generated using recombinant DNA techniques. With respect to nucleotide sequences, degeneracy of the genetic code provides the possibility to substitute at least one base of the protein encoding sequence of a gene with a different base without causing the amino acid sequence of the polypeptide produced from the gene to be changed. Hence, the DNA of the present invention may also have any base sequence that has been changed from SEQ ID NO: 1 through SEQ ID NO: 36,564 by substitution in accordance with degeneracy of the genetic code. References describing codon usage include: Carels et al., J. Mol. Evol. 46: 45 (1998) and Fennoy et al., Nucl. Acids Res. 21(23): 5294 (1993).

[0034] Polynucleotides of the present invention that are variants of the polynucleotides provided herein will generally demonstrate significant identity with the polynucleotides provided herein. Of particular interest are polynucleotide homologs having at least about 60% sequence identity, at least about 70% sequence identity, at least about 80%,sequence identity, at least about 85% sequence identity, and more preferably at least about 90%, 95% or even greater, such as 98% or 99% sequence identity with polynucleotide sequences described herein.

[0035] Protein and Polypeptide Molecules—This invention also provides polypeptides encoded by polynucleotides of the present invention. Amino acid sequences of the polypeptides of the present invention are provided herein as SEQ ID NO: 36,565 through SEQ ID NO: 73,128.

[0036] As used herein, the term “polypeptide” means an unbranched chain of amino acid residues that are covalently linked by an amide linkage between the carboxyl group of one amino acid and the amino group of another. The term polypeptide can encompass whole proteins (i.e. a functional protein encoded by a particular gene), as well as fragments of proteins. Of particular interest are polypeptides of the present invention which represent whole proteins or a sufficient portion of the entire protein to impart the relevant biological activity of the protein. The term “protein” also includes molecules consisting of one or more polypeptide chains. Thus, a polypeptide of the present invention may also constitute an entire gene product, but only a portion of a functional oligomeric protein having multiple polypeptide chains.

[0037] Of particular interest in the present invention are polypeptides involved in one or more important biological properties in plants. Such polypeptides may be produced in transgenic plants to provide plants having improved phenotypic properties and/or improved response to stressful environmental conditions. In some cases, decreased expression of such polypeptides may be desired, such decreased expression being obtained by use of the polynucleotide sequences provided herein, for example in antisense or cosuppression methods. See, Table 1 for a list of improved plant properties and responses and SEQ ID NO: 36,565 through SEQ ID NO: 73,128 for the polypeptides whose expression may be altered in transgenic plants to impart such improvements. A summary of such improved properties and polypeptides of interest for increased or decreased expression is provided below.

[0038] Yield/Nitrogen: Yield improvement by improved nitrogen flow, sensing, uptake, storage and/or transport. Polypeptides useful for imparting such properties include those involved in aspartate and glutamate biosynthesis, polypeptides involved in aspartate and glutamate transport, polypeptides associated with the TOR (Target of Rapamycin) pathway, nitrate transporters, ammonium transporters, chlorate transporters and polypeptides involved in tetrapyrrole biosynthesis.

[0039] Yield/Carbohydrate: Yield improvement by effects on carbohydrate metabolism, for example by increased sucrose production and/or transport. Polypeptides useful for improved yield by effects on carbohydrate metabolism include polypeptides involved in sucrose or starch metabolism, carbon assimilation or carbohydrate transport, including, for example sucrose transporters or glucose/hexose transporters, enzymes involved in glycolysis/gluconeogenesis, the pentose phosphate cycle, or raffinose biosynthesis, and polypeptides involved in glucose signaling, such as SNF1 complex proteins.

[0040] Yield/Photosynthesis: Yield improvement resulting from increased photosynthesis. Polypeptides useful for increasing the rate of photosynthesis include phytochrome, photosystem I and II proteins, electron carriers, ATP synthase, NADH dehydrogenase and cytochrome oxidase.

[0041] Yield/Phosphorus: Yield improvement resulting from increased phosphorus uptake, transport or utilization. Polypeptides useful for improving yield in this manner include phosphatases and phosphate transporters.

[0042] Yield/Stress tolerance: Yield improvement resulting from improved plant growth and development by helping plants to tolerate stressful growth conditions. Polypeptides useful for improved stress tolerance under a variety of stress conditions include polypeptides involved in gene regulation, such as serine/threonine-protein kinases, MAP kinases, MAP kinase kinases, and MAP kinase kinase kinases; polypeptides that act as receptors for signal transduction and regulation, such as receptor protein kinases; intracellular signaling proteins, such as protein phosphatases, GTP binding proteins, and phospholipid signaling proteins; polypeptides involved in arginine biosynthesis; polypeptides involved in ATP metabolism, including for example ATPase, adenylate transporters, and polypeptides involved in ATP synthesis and transport; polypeptides involved in glycine betaine, jasmonic acid, flavonoid or steroid biosynthesis; and hemoglobin. Enhanced or reduced activity of such polypeptides in transgenic plants will provide changes in the ability of a plant to respond to a variety of environmental stresses, such as chemical stress, drought stress and pest stress.

[0043] Cold tolerance: Polypeptides of interest for improving plant tolerance to cold or freezing temperatures include polypeptides involved in biosynthesis of trehalose or raffinose, polypeptides encoded by cold induced genes, fatty acyl desaturases and other polypeptides involved in glycerolipid or membrane lipid biosynthesis, which find use in modification of membrane fatty acid composition, alternative oxidase, calcium-dependent protein kinases, LEA proteins and uncoupling protein.

[0044] Heat tolerance: Polypeptides of interest for improving plant tolerance to heat include polypeptides involved in biosynthesis of trehalose, polypeptides involved in glycerolipid biosynthesis or membrane lipid metabolism (for altering membrane fatty acid composition), heat shock proteins and mitochondrial NDK.

[0045] Osmotic tolerance: Polypeptides of interest for improving plant tolerance to extreme osmotic conditions include polypeptides involved in proline biosynthesis.

[0046] Drought tolerance: Polypeptides of interest for improving plant tolerance to drought conditions include aquaporins, polypeptides involved in biosynthesis of trehalose or wax, LEA proteins and invertase.

[0047] Pathogen or pest tolerance: Polypeptides of interest for improving plant tolerance to effects of plant pests or pathogens include proteases, polypeptides involved in anthocyanin biosynthesis, polypeptides involved in cell wall metabolism, including cellulases, glucosidases, pectin methylesterase, pectinase, polygalacturonase, chitinase, chitosanase, and cellulose synthase, and polypeptides involved in biosynthesis of terpenoids or indole for production of bioactive metabolites to provide defense against herbivorous insects.

[0048] Cell cycle modification: Polypeptides encoding cell cycle enzymes and regulators of the cell cycle pathway are useful for manipulating growth rate in plants to provide early vigor and accelerated maturation leading to improved yield. Improvements in quality traits, such as seed oil content, may also be obtained by expression of cell cycle enzymes and cell cycle regulators. Polypeptides of interest for modification of cell cycle pathway include cyclins and EIF5alpha pathway proteins, polypeptides involved in polyamine metabolism, polypeptides which act as regulators of the cell cycle pathway, including cyclin-dependent kinases (CDKs), CDK-activating kinases, CDK-inhibitors, Rb and Rb-binding proteins, and transcription factors that activate genes involved in cell proliferation and division, such as the E2F family of transcription factors, proteins involved in degradation of cyclins, such as cullins, and plant homologs of tumor suppressor polypeptides.

[0049] Seed protein yield/content: Polypeptides useful for providing increased seed protein quantity and/or quality include polypeptides involved in the metabolism of amino acids in plants, particularly polypeptides involved in biosynthesis of methionine/cysteine and lysine, amino acid transporters, amino acid efflux carriers, seed storage proteins, proteases, and polypeptides involved in phytic acid metabolism.

[0050] Seed oil yield/content: Polypeptides useful for providing increased seed oil quantity and/or quality include polypeptides involved in fatty acid and glycerolipid biosynthesis, beta-oxidation enzymes, enzymes involved in biosynthesis of nutritional compounds, such as carotenoids and tocopherols, and polypeptides that increase embryo size or number or thickness of aleurone.

[0051] Disease response in plants: Polypeptides useful for imparting improved disease responses to plants include polypeptides encoded by cercosporin induced genes, antifungal proteins and proteins encoded by R-genes or SAR genes. Expression of such polypeptides in transgenic plants will provide an increase in disease resistance ability of plants.

[0052] Galactomannanan biosynthesis: Polypeptides involved in production of galactomannans are of interest for providing plants having increased and/or modified reserve polysaccharides for use in food, pharmaceutical, cosmetic, paper and paint industries.

[0053] Flavonoid/isoflavonoid metabolism in plants: Polypeptides of interest for modification of flavonoid/isoflavonoid metabolism in plants include cinnamate-4-hydroxylase, chalcone synthase and flavonol synthase. Enhanced or reduced activity of such polypeptides in transgenic plants will provide changes in the quantity and/or speed of flavonoid metabolism in plants and may improve disease resistance by enhancing synthesis of protective secondary metabolites or improving signaling pathways governing disease resistance.

[0054] Plant growth regulators: Polypeptides involved in production of substances that regulate the growth of various plant tissues are of interest in the present invention and may be used to provide transgenic plants having altered morphologies and improved plant growth and development profiles leading to improvements in yield and stress response. Of particular interest are polypeptides involved in the biosynthesis of plant growth hormones, such as gibberellins, cytokinins, auxins, ethylene and abscisic acid, and other proteins involved in the activity and/or transport of such polypeptides, including for example, cytokinin oxidase, cytokinin/purine permeases, F-box proteins, G-proteins and phytosulfokines.

[0055] Herbicide tolerance: Polypeptides of interest for producing plants having tolerance to plant herbicides include polypeptides involved in the shikimate pathway, which are of interest for providing glyphosate tolerant plants. Such polypeptides include polypeptides involved in biosynthesis of chorismate, phenylalanine, tyrosine and tryptophan.

[0056] Transcription factors in plants: Transcription factors play a key role in plant growth and development by controlling the expression of one or more genes in temporal, spatial and physiological specific patterns. Enhanced or reduced activity of such polypeptides in transgenic plants will provide significant changes in gene transcription patterns and provide a variety of beneficial effects in plant growth, development and response to environmental conditions. Transcription factors of interest include, but are not limited to myb transcription factors, including helix-turn-helix proteins, homeodomain transcription factors, leucine zipper transcription factors, MADS transcription factors, transcription factors having AP2 domains, zinc finger transcription factors, CCAAT binding transcription factors, ethylene responsive transcription factors, transcription initiation factors and UV damaged DNA binding proteins.

[0057] Homologous recombination: Increasing the rate of homologous recombination in plants is useful for accelerating the introgression of transgenes into breeding varieties by backcrossing, and to enhance the conventional breeding process by allowing rare recombinants between closely linked genes in phase repulsion to be identified more easily. Polypeptides useful for expression in plants to provide increased homologous recombination include polypeptides involved in mitosis and/or meiosis, including for example, resolvases and polypeptide members of the RAD52 epistasis group.

[0058] Lignin biosynthesis: Polypeptides involved in lignin biosynthesis are of interest for increasing plants' resistance to lodging and for increasing the usefulness of plant materials as biofuels.

[0059] The function of polypeptides of the present invention is determined by comparison of the amino acid sequence of the novel polypeptides to amino acid sequences of known polypeptides. A variety of homology based search algorithms are available to compare a query sequence to a protein database, including for example, BLAST, FASTA, and Smith-Waterman. In the present application, BLASTX and BLASTP algorithms are used to provide protein function information. A number of values are examined in order to assess the confidence of the function assignment. Useful measurements include “E-value” (also shown as “hit_p”), “percent identity”, “percent query coverage”, and “percent hit coverage”.

[0060] In BLAST, E-value, or expectation value, represents the number of different alignments with scores equivalent to or better than the raw alignment score, S, that are expected to occur in a database search by chance. The lower the E value, the more significant the match. Because database size is an element in E-value calculations, E-values obtained by BLASTing against public databases, such as GenBank, have generally increased over time for any given query/entry match. In setting criteria for confidence of polypeptide function prediction, a “high” BLAST match is considered herein as having an E-value for the top BLAST hit provided in Table 1 of less than 1E-30; a medium BLASTX E-value is 1E-30 to 1E-8; and a low BLASTX E-value is greater than 1E-8. The top BLAST hit and corresponding E values are provided in columns six and seven of Table 1.

[0061] Percent identity refers to the percentage of identically matched amino acid residues that exist along the length of that portion of the sequences which is aligned by the BLAST algorithm. In setting criteria for confidence of polypeptide function prediction, a “high” BLAST match is considered herein as having percent identity for the top BLAST hit provided in Table 1 of at least 70%; a medium percent identity value is 35% to 70%; and a low percent identity is less than 35%.

[0062] Of particular interest in protein function assignment in the present invention is the use of combinations of E-values, percent identity, query coverage and hit coverage. Query coverage refers to the percent of the query sequence that is represented in the BLAST alignment. Hit coverage refers to the percent of the database entry that is represented in the BLAST alignment. In the present invention, function of a query polypeptide is inferred from function of a protein homolog where either (1) hit_p<1e-30 or % identity>35% AND query_coverage>50% AND hit_coverage>50%, or (2) hit_p<1e-8 AND query_coverage>70% AND hit_coverage>70%.

[0063] A further aspect of the invention comprises functional homologs which differ in one or more amino acids from those of a polypeptide provided herein as the result of one or more conservative amino acid substitutions. It is well known in the art that one or more amino acids in a native sequence can be substituted with at least one other amino acid, the charge and polarity of which are similar to that of the native amino acid, resulting in a silent change. For instance, valine is a conservative substitute for alanine and threonine is a conservative substitute for serine. Conservative substitutions for an amino acid within the native polypeptide sequence can be selected from other members of the class to which the naturally occurring amino acid belongs. Amino acids can be divided into the following four groups: (1) acidic amino acids, (2) basic amino acids, (3) neutral polar amino acids, and (4) neutral nonpolar amino acids. Representative amino acids within these various groups include, but are not limited to: (1) acidic (negatively charged) amino acids such as aspartic acid and glutamic acid; (2) basic (positively charged) amino acids such as arginine, histidine, and lysine; (3) neutral polar amino acids such as glycine, serine, threonine, cysteine, tyrosine, asparagine, and glutamine; and (4) neutral nonpolar (hydrophobic) amino acids such as alanine, leucine, isoleucine, valine, proline, phenylalanine, tryptophan, and methionine. Conserved substitutes for an amino acid within a native amino acid sequence can be selected from other members of the group to which the naturally occurring amino acid belongs. For example, a group of amino acids having aliphatic side chains is glycine, alanine, valine, leucine, and isoleucine; a group of amino acids having aliphatic-hydroxyl side chains is serine and threonine; a group of amino acids having amide-containing side chains is asparagine and glutamine; a group of amino acids having aromatic side chains is phenylalanine, tyrosine, and tryptophan; a group of amino acids having basic side chains is lysine, arginine, and histidine; and a group of amino acids having sulfur-containing side chains is cysteine and methionine. Naturally conservative amino acids substitution groups are: valine-leucine, valine-isoleucine, phenylalanine-tyrosine, lysine-arginine, alanine-valine, aspartic acid-glutamic acid, and asparagine-glutamine. A further aspect of the invention comprises polypeptides which differ in one or more amino acids from those of another protein sequence as the result of deletion or insertion of one or more amino acids in a native sequence.

[0064] Also of interest in the present invention are functional homologs of the polypeptides provided herein which have the same function as a polypeptide provided herein, but with increased or decreased activity or altered specificity. Such variations in protein activity may exist naturally in polypeptides encoded by related genes, for example in a related polypeptide encodes by a different allele or in a different species, or can be achieved by mutagenesis. Naturally occurring variant polypeptides may be obtained by well known nucleic acid or protein screening methods using DNA or antibody probes, for example by screening libraries for genes encoding related polypeptides, or in the case of expression libraries, by screening directly for variant polypeptides. Screening methods for obtaining a modified protein or enzymatic activity of interest by mutagenesis are disclosed in U.S. Pat. No. 5,939,250. An alternative approach to the generation of variants uses random recombination techniques such as “DNA shuffling” as disclosed in U.S. Pat. Nos. 5,605,793; 5,811,238; 5,830,721 and 5,837,458; and International Applications WO 98/31837 and WO 99/65927, all of which are incorporated herein by reference. An alternative method of molecular evolution involves a staggered extension process (StEP) for in vitro mutagenesis and recombination of nucleic acid molecule sequences, as disclosed in U.S. Pat. No. 5,965,408 and International Application WO 98/42832, both of which are incorporated herein by reference.

[0065] Polypeptides of the present invention that are variants of the polypeptides provided herein will generally demonstrate significant identity with the polypeptides provided herein. Of particular interest are polypeptides having at least about 35% sequence identity, at least about 50% sequence identity, at least about 60% sequence identity, at least about 70% sequence identity, at least about 80% sequence identity, and more preferably at least about 85%, 90%, 95% or even greater, sequence identity with polypeptide sequences described herein. Of particular interest in the present invention are polypeptides having amino acid sequences provided herein (reference polypeptides) and functional homologs of such reference polypeptides, wherein such functional homologs comprises at least 50 consecutive amino acids having at least 90% identity to a 50 amino acid polypeptide fragment of said reference polypeptide.

[0066] Recombinant DNA Constructs—The present invention also encompasses the use of polynucleotides of the present invention in recombinant constructs, i.e. constructs comprising polynucleotides that are constructed or modified outside of cells and that join nucleic acids that are not found joined in nature. Using methods known to those of ordinary skill in the art, polypeptide encoding sequences of this invention can be inserted into recombinant DNA constructs that can be introduced into a host cell of choice for expression of the encoded protein, or to provide for reduction of expression of the encoded protein, for example by antisense or cosuppression methods. Potential host cells include both prokaryotic and eukaryotic cells. Of particular interest in the present invention is the use of the polynucleotides of the present invention for preparation of constructs for use in plant transformation.

[0067] In plant transformation, exogenous genetic material is transferred into a plant cell. By “exogenous” it is meant that a nucleic acid molecule, for example a recombinant DNA construct comprising a polynucleotide of the present invention, is produced outside the organism, e.g. plant, into which it is introduced. An exogenous nucleic acid molecule can have a naturally occurring or non-naturally occurring nucleotide sequence. One skilled in the art recognizes that an exogenous nucleic acid molecule can be derived from the same species into which it is introduced or from a different species. Such exogenous genetic material may be transferred into either monocot or dicot plants including, but not limited to, soy, cotton, canola, maize, teosinte, wheat, rice and Arabidopsis plants. Transformed plant cells comprising such exogenous genetic material may be regenerated to produce whole transformed plants.

[0068] Exogenous genetic material may be transferred into a plant cell by the use of a DNA vector or construct designed for such a purpose. A construct can comprise a number of sequence elements, including promoters, encoding regions, and selectable markers. Vectors are available which have been designed to replicate in both E. coli and A. tumefaciens and have all of the features required for transferring large inserts of DNA into plant chromosomes. Design of such vectors is generally within the skill of the art.

[0069] A construct will generally include a plant promoter to direct transcription of the protein-encoding region or the antisense sequence of choice. Numerous promoters, which are active in plant cells, have been described in the literature. These include the nopaline synthase (NOS) promoter and octopine synthase (OCS) promoters carried on tumor-inducing plasmids of Agrobacterium tumefaciens or caulimovirus promoters such as the Cauliflower Mosaic Virus (CaMV) 19S or 35S promoter (U.S. Pat. No. 5,352,605), and the Figwort Mosaic Virus (FMV) 35S-promoter (U.S. Pat. No. 5,378,619). These promoters and numerous others have been used to create recombinant vectors for expression in plants. Any promoter known or found to cause transcription of DNA in plant cells can be used in the present invention. Other useful promoters are described, for example, in U.S. Pat. Nos. 5,378,619; 5,391,725; 5,428,147; 5,447,858; 5,608,144; 5,614,399; 5,633,441; and 5,633,435, all of which are incorporated herein by reference.

[0070] In addition, promoter enhancers, such as the CaMV 35S enhancer or a tissue specific enhancer, may be used to enhance gene transcription levels. Enhancers often are found 5′ to the start of transcription in a promoter that functions in eukaryotic cells, but can often be inserted in the forward or reverse orientation 5′ or 3′ to the coding sequence. In some instances, these 5′ enhancing elements are introns. Deemed to be particularly useful as enhancers are the 5′ introns of the rice actin 1 and rice actin 2 genes. Examples of other enhancers which could be used in accordance with the invention include elements from octopine synthase genes, the maize alcohol dehydrogenase gene intron 1, elements from the maize shrunken 1 gene, the sucrose synthase intron, the TMV omega element, and promoters from non-plant eukaryotes.

[0071] DNA constructs can also contain one or more 5′ non-translated leader sequences which serve to enhance polypeptide production from the resulting mRNA transcripts. Such sequences may be derived from the promoter selected to express the gene or can be specifically modified to increase translation of the mRNA. Such regions may also be obtained from viral RNAs, from suitable eukaryotic genes, or from a synthetic gene sequence. For a review of optimizing expression of transgenes, see Koziel et al. (996) Plant Mol. Biol. 32:393-405).

[0072] Constructs and vectors may also include, with the coding region of interest, a nucleic acid sequence that acts, in whole or in part, to terminate transcription of that region. One type of 3′ untranslated sequence which may be used is a 3′ UTR from the nopaline synthase gene (nos 3′) of Agrobacterium tumefaciens. Other 3′ termination regions of interest include those from a gene encoding the small subunit of a ribulose-1,5-bisphosphate carboxylase-oxygenase (rbcS), and more specifically, from a rice rbcS gene (U.S. Pat. No. 6,426,446), the 3′ UTR for the T7 transcript of Agrobacterium tumefaciens, the 3′ end of the protease inhibitor I or II genes from potato or tomato, and the 3′ region isolated from Cauliflower Mosaic Virus. Alternatively, one also could use a gamma coixin, oleosin 3 or other 3′ UTRs from the genus Coix (PCT Publication WO 99/58659).

[0073] Constructs and vectors may also include a selectable marker. Selectable markers may be used to select for plants or plant cells that contain the exogenous genetic material. Useful selectable marker genes include those conferring resistance to antibiotics such as kanamycin (nptII), hygromycin B (aph IV) and gentamycin (aac3 and aacC4) or resistance to herbicides such as glufosinate (bar or pat) and glyphosate (EPSPS). Examples of such selectable markers are illustrated in U.S. Pat. Nos. 5,550,318; 5,633,435; 5,780,708 and 6,118,047, all of which are incorporated herein by reference.

[0074] Constructs and vectors may also include a screenable marker. Screenable markers may be used to monitor transformation. Exemplary screenable markers include genes expressing a colored or fluorescent protein such as a luciferase or green fluorescent protein (GFP), a β-glucuronidase or uidA gene (GUS) which encodes an enzyme for which various chromogenic substrates are known or an R-locus gene, which encodes a product that regulates the production of anthocyanin pigments (red color) in plant tissues. Other possible selectable and/or screenable marker genes will be apparent to those of skill in the art.

[0075] Constructs and vectors may also include a transit peptide for targeting of a gene target to a plant organelle, particularly to a chloroplast, leucoplast or other plastid organelle (U.S. Pat. No. 5,188,642).

[0076] For use in Agrobacterium mediated transformation methods, constructs of the present invention will also include T-DNA border regions flanking the DNA to be inserted into the plant genome to provide for transfer of the DNA into the plant host chromosome as discussed in more detail below. An exemplary plasmid that finds use in such transformation methods is pMON18365, a T-DNA vector that can be used to clone exogenous genes and transfer them into plants using Agrobacterium-mediated transformation. See U.S. patent application No. 20030024014, herein incorporated by reference. This vector contains the left border and right border sequences necessary for Agrobacterium transformation. The plasmid also has origins of replication for maintaining the plasmid in both E. coli and Agrobacterium tumefaciens strains.

[0077] A candidate gene is prepared for insertion into the T-DNA vector, for example using well-known gene cloning techniques such as PCR. Restriction sites may be introduced onto each end of the gene to facilitate cloning. For example, candidate genes may be amplified by PCR techniques using a set of primers. Both the amplified DNA and the cloning vector are cut with the same restriction enzymes, for example, NotI and PstI. The resulting fragments are gel-purified, ligated together, and transformed into E. coli. Plasmid DNA containing the vector with inserted gene may be isolated from E. coli cells selected for spectinomycin resistance, and the presence of the desired insert verified by digestion with the appropriate restriction enzymes. Undigested plasmid may then be transformed into Agrobacterium tumefaciens using techniques well known to those in the art, and transformed Agrobacterium cells containing the vector of interest selected based on spectinomycin resistance. These and other similar constructs useful for plant transformation may be readily prepared by one skilled in the art.

[0078] Transformation Methods and Transgenic Plants—Methods and compositions for transforming bacteria and other microorganisms are known in the art. See for example Molecular Cloning: A Laboratory Manual, 3^{rd} edition Volumes 1, 2, and 3. J. F. Sambrook, D. W. Russell, and N. Irwin, Cold Spring Harbor Laboratory Press, 2000.

[0079] Technology for introduction of DNA into cells is well known to those of skill in the art. Methods and materials for transforming plants by introducing a transgenic DNA construct into a plant genome in the practice of this invention can include any of the well-known and demonstrated methods including electroporation as illustrated in U.S. Pat. No. 5,384,253, microprojectile bombardment as illustrated in U.S. Pat. Nos. 5,015,580; 5,550,318; 5,538,880; 6,160,208; 6,399,861 and 6,403,865, Agrobacterium-mediated transformation as illustrated in U.S. Pat. Nos. 5,635,055; 5,824,877; 5,591,616; 5,981,840 and 6,384,301, and protoplast transformation as illustrated in U.S. Pat. No. 5,508,184, all of which are incorporated herein by reference.

[0080] Any of the polynucleotides of the present invention may be introduced into a plant cell in a permanent or transient manner in combination with other genetic elements such as vectors, promoters enhancers etc. Further any of the polynucleotides of the present invention may be introduced into a plant cell in a manner that allows for production of the polypeptide or fragment thereof encoded by the polynucleotide in the plant cell, or in a manner that provides for decreased expression of an endogenous gene and concomitant decreased production of protein.

[0081] It is also to be understood that two different transgenic plants can also be mated to produce offspring that contain two independently segregating added, exogenous genes. Selfing of appropriate progeny can produce plants that are homozygous for both added, exogenous genes that encode a polypeptide of interest. Back-crossing to a parental plant and out-crossing with a non-transgenic plant are also contemplated, as is vegetative propagation.

[0082] Expression of the polynucleotides of the present invention and the concomitant production of polypeptides encoded by the polynucleotides is of interest for production of transgenic plants having improved properties, particularly, improved properties which result in crop plant yield improvement. Expression of polypeptides of the present invention in plant cells may be evaluated by specifically identifying the protein products of the introduced genes or evaluating the phenotypic changes brought about by their expression. It is noted that when the polypeptide being produced in a transgenic plant is native to the target plant species, quantitative analyses comparing the transformed plant to wild type plants may be required to demonstrate increased expression of the polypeptide of this invention.

[0083] Assays for the production and identification of specific proteins make use of various physical-chemical, structural, functional, or other properties of the proteins. Unique physical-chemical or structural properties allow the proteins to be separated and identified by electrophoretic procedures, such as native or denaturing gel electrophoresis or isoelectric focusing, or by chromatographic techniques such as ion exchange or gel exclusion chromatography. The unique structures of individual proteins offer opportunities for use of specific antibodies to detect their presence in formats such as an ELISA assay. Combinations of approaches may be employed with even greater specificity such as western blotting in which antibodies are used to locate individual gene products that have been separated by electrophoretic techniques. Additional techniques may be employed to absolutely confirm the identity of the product of interest such as evaluation by amino acid sequencing following purification. Although these are among the most commonly employed, other procedures may be additionally used.

[0084] Assay procedures may also be used to identify the expression of proteins by their functionality, particularly where the expressed protein is an enzyme capable of catalyzing chemical reactions involving specific substrates and products. These reactions may be measured, for example in plant extracts, by providing and quantifying the loss of substrates or the generation of products of the reactions by physical and/or chemical procedures.

[0085] In many cases, the expression of a gene product is determined by evaluating the phenotypic results of its expression. Such evaluations may be simply as visual observations, or may involve assays. Such assays may take many forms including but not limited to analyzing changes in the chemical composition, morphology, or physiological properties of the plant. Chemical composition may be altered by expression of genes encoding enzymes or storage proteins which change amino acid composition and may be detected by amino acid analysis, or by enzymes which change starch quantity which may be analyzed by near infrared reflectance spectrometry. Morphological changes may include greater stature or thicker stalks.

[0086] Plants with decreased expression of a gene of interest can also be achieved through the use of polynucleotides of the present invention, for example by expression of antisense nucleic acids, or by identification of plants transformed with sense expression constructs that exhibit cosuppression effects.

[0087] Antisense approaches are a way of preventing or reducing gene function by targeting the genetic material as disclosed in U.S. Pat. Nos. 4,801,540; 5,107,065; 5,759,829; 5,910,444; 6,184,439; and 6,198,026, all of which are incorporated herein by reference. The objective of the antisense approach is to use a sequence complementary to the target gene to block its expression and create a mutant cell line or organism in which the level of a single chosen protein is selectively reduced or abolished. Antisense techniques have several advantages over other ‘reverse genetic’ approaches. The site of inactivation and its developmental effect can be manipulated by the choice of promoter for antisense genes or by the timing of external application or microinjection. Antisense can manipulate its specificity by selecting either unique regions of the target gene or regions where it shares homology to other related genes.

[0088] The principle of regulation by antisense RNA is that RNA that is complementary to the target mRNA is introduced into cells, resulting in specific RNA:RNA duplexes being formed by base pairing between the antisense substrate and the target. Under one embodiment, the process involves the introduction and expression of an antisense gene sequence. Such a sequence is one in which part or all of the normal gene sequences are placed under a promoter in inverted orientation so that the ‘wrong’ or complementary strand is transcribed into a noncoding antisense RNA that hybridizes with the target mRNA and interferes with its expression. An antisense vector is constructed by standard procedures and introduced into cells by transformation, transfection, electroporation, microinjection, infection, etc. The type of transformation and choice of vector will determine whether expression is transient or stable. The promoter used for the antisense gene may influence the level, timing, tissue, specificity, or inducibility of the antisense inhibition.

[0089] As used herein “gene suppression” means any of the well-known methods for suppressing expression of protein from a gene including sense suppression, anti-sense suppression and RNAi suppression. In suppressing genes to provide plants with a desirable phenotype, anti-sense and RNAi gene suppression methods are preferred. More particularly, for a description of anti-sense regulation of gene expression in plant cells see U.S. Pat. No. 5,107,065 and for a description of RNAi gene suppression in plants by transcription of a dsRNA see U.S. Pat. No. 6,506,559, U.S. patent application Publication No. 2002/0168707 A1, and U.S. patent application Ser. No. 09/423,143 (see WO 98/53083), Ser. No. 09/127,735 (see WO 99/53050) and Ser. No. 09/084,942 (see WO 99/61631), all of which are incorporated herein by reference. Suppression of an gene by RNAi can be achieved using a recombinant DNA construct having a promoter operably linked to a DNA element comprising a sense and anti-sense element of a segment of genomic DNA of the gene, e.g., a segment of at least about 23 nucleotides, more preferably about 50 to 200 nucleotides where the sense and anti-sense DNA components can be directly linked or joined by an intron or artificial DNA segment that can form a loop when the transcribed RNA hybridizes to form a hairpin structure. For example, genomic DNA from a polymorphic locus of SEQ ID NO: 1 through SEQ ID NO: 36,564 can be used in a recombinant construct for suppression of a cognate gene by RNAi suppression.

[0090] Insertion mutations created by transposable elements may also prevent gene function. For example, in many dicot plants, transformation with the T-DNA of Agrobacterium may be readily achieved and large numbers of transformants can be rapidly obtained. Also, some species have lines with active transposable elements that can efficiently be used for the generation of large numbers of insertion mutations, while some other species lack such options. Mutant plants produced by Agrobacterium or transposon mutagenesis and having altered expression of a polypeptide of interest can be identified using the polynucleotides of the present invention. For example, a large population of mutated plants may be screened with polynucleotides encoding the polypeptide of interest to detect mutated plants having an insertion in the gene encoding the polypeptide of interest.

[0091] Polynucleotides of the present invention may be used in site-directed mutagenesis. Site-directed mutagenesis may be utilized to modify nucleic acid sequences, particularly as it is a technique that allows one or more of the amino acids encoded by a nucleic acid molecule to be altered (e.g., a threonine to be replaced by a methionine). Three basic methods for site-directed mutagenesis are often employed. These are cassette mutagenesis, primer extension, and methods based upon PCR.

[0092] In addition to the above discussed procedures, practitioners are familiar with the standard resource materials which describe specific conditions and procedures for the construction, manipulation and isolation of macromolecules (e.g., DNA molecules, plasmids, etc.), generation of recombinant organisms and the screening and isolating of clones.

[0093] Arrays—The polynucleotide or polypeptide molecules of this invention may also be used to prepare arrays of target molecules arranged on a surface of a substrate. The target molecules are preferably known molecules, e.g. polynucleotides (including oligonucleotides) or polypeptides, which are capable of binding to specific probes, such as complementary nucleic acids or specific antibodies. The target molecules are preferably immobilized, e.g. by covalent or non-covalent bonding, to the surface in small amounts of substantially purified and isolated molecules in a grid pattern. By immobilized is meant that the target molecules maintain their position relative to the solid support under hybridization and washing conditions. Target molecules are deposited in small footprint, isolated quantities of “spotted elements” of preferably single-stranded polynucleotide preferably arranged in rectangular grids in a density of about 30 to 100 or more, e.g. up to about 1000, spotted elements per square centimeter. In addition in preferred embodiments arrays comprise at least about 100 or more, e.g. at least about 1000 to 5000, distinct target polynucleotides per unit substrate. Where detection of transcription for a large number of genes is desired, the economics of arrays favors a high density design criteria provided that the target molecules are sufficiently separated so that the intensity of the indicia of a binding event associated with highly expressed probe molecules does not overwhelm and mask the indicia of neighboring binding events. For high-density microarrays each spotted element may contain up to about 10⁷ or more copies of the target molecule, e.g. single stranded cDNA, on glass substrates or nylon substrates.

[0094] Arrays of this invention can be prepared with molecules from a single species, preferably a plant species, or with molecules from other species, particularly other plant species. Arrays with target molecules from a single species can be used with probe molecules from the same species or a different species due to the ability of cross species homologous genes to hybridize. It is generally preferred for high stringency hybridization that the target and probe molecules are from the same species.

[0095] In preferred aspects of this invention the organism of interest is a plant and the target molecules are polynucleotides or oligonucleotides with nucleic acid sequences having at least 80 percent sequence identity to a corresponding sequence of the same length in a polynucleotide having a sequence selected from the group consisting of SEQ ID NO: 1 through SEQ ID NO: 36,564 or complements thereof. In other preferred aspects of the invention at least 10% of the target molecules on an array have at least 15, more preferably at least 20, consecutive nucleotides of sequence having at least 80%, more preferably up to 100%, identity with a corresponding sequence of the same length in a polynucleotide having a sequence selected from the group consisting of SEQ ID NO: 1 through SEQ ID NO: 36,564 or complements or fragments thereof.

[0096] Such arrays are useful in a variety of applications, including gene discovery, genomic research, molecular breeding and bioactive compound screening. One important use of arrays is in the analysis of differential gene transcription, e.g. transcription profiling where the production of mRNA in different cells, normally a cell of interest and a control, is compared and discrepancies in gene expression are identified. In such assays, the presence of discrepancies indicates a difference in gene expression levels in the cells being compared. Such information is useful for the identification of the types of genes expressed in a particular cell or tissue type in a known environment. Such applications generally involve the following steps: (a) preparation of probe, e.g. attaching a label to a plurality of expressed molecules; (b) contact of probe with the array under conditions sufficient for probe to bind with corresponding target, e.g. by hybridization or specific binding; (c) removal of unbound probe from the array; and (d) detection of bound probe.

[0097] A probe may be prepared with RNA extracted from a given cell line or tissue. The probe may be produced by reverse transcription of mRNA or total RNA and labeled with radioactive or fluorescent labeling. A probe is typically a mixture containing many different sequences in various amounts, corresponding to the numbers of copies of the original mRNA species extracted from the sample.

[0098] The initial RNA sample for probe preparation will typically be derived from a physiological source. The physiological source may be selected from a variety of organisms, with physiological sources of interest including single celled organisms such as yeast and multicellular organisms, including plants and animals, particularly plants, where the physiological sources from multicellular organisms may be derived from particular organs or tissues of the multicellular organism, or from isolated cells derived from an organ, or tissue of the organism. The physiological sources may also be multicellular organisms at different developmental stages (e.g., 10-day-old seedlings), or organisms grown under different environmental conditions (e.g., drought-stressed plants) or treated with chemicals.

[0099] In preparing the RNA probe, the physiological source may be subjected to a number of different processing steps, where such processing steps might include tissue homogenation, cell isolation and cytoplasmic extraction, nucleic acid extraction and the like, where such processing steps are known to the those of skill in the art. Methods of isolating RNA from cells, tissues, organs or whole organisms are known to those of skill in the art.

[0100] Computer Based Systems and Methods—The sequence of the molecules of this invention can be provided in a variety of media to facilitate use thereof. Such media can also provide a subset thereof in a form that allows a skilled artisan to examine the sequences. In a preferred embodiment, 20, preferably 50, more preferably 100, even more preferably 200 or more of the polynucleotide and/or the polypeptide sequences of the present invention can be recorded on computer readable media. As used herein, “computer readable media” refers to any medium that can be read and accessed directly by a computer. Such media include, but are not limited to: magnetic storage media, such as floppy discs, hard disc, storage medium, and magnetic tape: optical storage media such as CD-ROM; electrical storage media such as RAM and ROM; and hybrids of these categories such as magnetic/optical storage media. A skilled artisan can readily appreciate how any of the presently known computer readable media can be used to create a manufacture comprising a computer readable medium having recorded thereon a nucleotide sequence of the present invention.

[0101] As used herein, “recorded” refers to a process for storing information on computer readable media. A skilled artisan can readily adopt any of the presently known methods for recording information on computer readable media to generate media comprising the nucleotide sequence information of the present invention. A variety of data storage structures are available to a skilled artisan for creating a computer readable medium having recorded thereon a nucleotide sequence of the present invention. The choice of the data storage structure will generally be based on the means chosen to access the stored information. In addition, a variety of data processor programs and formats can be used to store the nucleotide sequence information of the present invention on computer readable media. The sequence information can be represented in a word processing text file, formatted in commercially-available software such as WordPerfect and Microsoft Word, or represented in the form of an ASCII file, stored in a database application, such as DB2, Sybase, Oracle, or the like. A skilled artisan can readily adapt any number of data processor structuring formats (e.g., text file or database) in order to obtain a computer readable medium having recorded thereon the nucleotide sequence information of the present invention.

[0102] By providing one or more of polynucleotide or polypeptide sequences of the present invention in a computer readable medium, a skilled artisan can routinely access the sequence information for a variety of purposes. The examples which follow demonstrate how software which implements the BLAST and BLAZE search algorithms on a Sybase system can be used to identify open reading frames (ORFs) within the genome that contain homology to ORFs or polypeptides from other organisms. Such ORFs are polypeptide encoding fragments within the sequences of the present invention and are useful in producing commercially important polypeptides such as enzymes used in amino acid biosynthesis, metabolism, transcription, translation, RNA processing, nucleic acid and a protein degradation, protein modification, and DNA replication, restriction, modification, recombination, and repair.

[0103] The present invention further provides systems, particularly computer-based systems, which contain the sequence information described herein. Such systems are designed to identify commercially important fragments of the nucleic acid molecule of the present invention. As used herein, “a computer-based system” refers to the hardware, software, and memory used to analyze the sequence information of the present invention. A skilled artisan can readily appreciate that any one of the currently available computer-based systems are suitable for use in the present invention.

[0104] As indicated above, the computer-based systems of the present invention comprise a database having stored therein a nucleotide sequence of the present invention and the necessary hardware and software for supporting and implementing a homology search. As used herein, “database” refers to memory system that can store searchable nucleotide sequence information. As used herein “query sequence” is a nucleic acid sequence, or an amino acid sequence, or a nucleic acid sequence corresponding to an amino acid sequence, or an amino acid sequence corresponding to a nucleic acid sequence, that is used to query a collection of nucleic acid or amino acid sequences. As used herein, “homology search” refers to one or more programs which are implemented on the computer-based system to compare a query sequence, i.e., gene or peptide or a conserved region (motif), with the sequence information stored within the database. Homology searches are used to identify segments and/or regions of the sequence of the present invention that match a particular query sequence. A variety of known searching algorithms are incorporated into commercially available software for conducting homology searches of databases and computer readable media comprising sequences of molecules of the present invention.

[0105] Commonly preferred sequence length of a query sequence is from about 10 to 100 or more amino acids or from about 20 to 300 or more nucleotide residues. There are a variety of motifs known in the art. Protein motifs include, but are not limited to, enzymatic active sites and signal sequences. An amino acid query is converted to all of the nucleic acid sequences that encode that amino acid sequence by a software program, such as TBLASTN, which is then used to search the database. Nucleic acid query sequences that are motifs include, but are not limited to, promoter sequences, cis elements, hairpin structures and inducible expression elements (protein binding sequences).

[0106] Thus, the present invention further provides an input device for receiving a query sequence, a memory for storing sequences (the query sequences of the present invention and sequences identified using a homology search as described above) and an output device for outputting the identified homologous sequences. A variety of structural formats for the input and output presentations can be used to input and output information in the computer-based systems of the present invention. A preferred format for an output presentation ranks fragments of the sequence of the present invention by varying degrees of homology to the query sequence. Such presentation provides a skilled artisan with a ranking of sequences that contain various amounts of the query sequence and identifies the degree of homology contained in the identified fragment.

[0107] Having now generally described the invention, the same will be more readily understood through reference to the following examples which are provided by way of illustration, and are not intended to be limiting of the present invention, unless specified.

### EXAMPLE 1

[0108] A cDNA library is generated from the desired tissue. Tissue is harvested and immediately frozen in liquid nitrogen. The harvested tissue is stored at −80° C. until preparation of total RNA. The total RNA is purified using Trizol reagent from Invitrogen Corporation (Invitrogen Corporation, Carlsbad, Calif., U.S.A.), essentially as recommended by the manufacturer. Poly A+RNA (mRNA) is purified using magnetic oligo dT beads essentially as recommended by the manufacturer (Dynabeads, Dynal Biotech, Oslow, Norway).

[0109] Construction of plant cDNA libraries is well known in the art and a number of cloning strategies exist. A number of cDNA library construction kits are commercially available. cDNA libraries are prepared using the Superscript™ Plasmid System for cDNA synthesis and Plasmid Cloning (Invitrogen Corporation, Carlsbad, Calif., U.S.A.), as described in the Superscript II cDNA library synthesis protocol. The cDNA libraries are quality controlled for a good insert:vector ratio.

[0110] The cDNA libraries are plated on LB agar containing the appropriate antibiotics for selection and incubated at 37° for a sufficient time to allow the growth of individual colonies. Single colonies are individually placed in each well of a 96-well microtiter plates containing LB liquid including the selective antibiotics. The plates are incubated overnight at approximately 37° C. with gentle shaking to promote growth of the cultures. The plasmid DNA is isolated from each clone using Qiaprep plasmid isolation kits, using the conditions recommended by the manufacturer (Qiagen Inc., Valencia, Calif. U.S.A.).

[0111] The template plasmid DNA clones are used for subsequent sequencing. Sequences of polynucleotides may be obtained by a number of sequencing techniques known in the art, including fluorescence-based sequencing methodologies. These methods have the detection, automation, and instrumentation capability necessary for the analysis of large volumes of sequence data. With these types of automated systems, fluorescent dye-labeled sequence reaction products are detected and data entered directly into the computer, producing a chromatogram that is subsequently viewed, stored, and analyzed using the corresponding software programs. These methods are known to those of skill in the art and have been described and reviewed.

### EXAMPLE 2

[0112] The open reading frame in each polynucleotide sequence is identified by a combination of predictive and homology based methods. The longest open reading frame (ORF) is determined, and the top BLAST match is identified by BASTX against NCBI. The top BLAST hit is then compared to the predicted ORF, with the BLAST hit given precedence in the case of discrepancies.

[0113] Functions of polypeptides encoded by the polynucleotide sequences of the present invention are determined using a hierarchical classification tool, termed FunCAT, for Functional Categories Annotation Tool. Most categories collected in FunCAT are classified by function, although other criteria are used, for example, cellular localization or temporal process. The assignment of a functional category to a query sequence is based on BLASTX sequence search results, which compare two protein sequences. FunCAT assigns categories by iteratively scanning through all blast hits, starting with the most significant match, and reporting the first category assignment for each FunCAT source classification scheme. In the present invention, function of a query polypeptide is inferred from the function of a protein homolog where either (1) hit_p<1e-30 or % identity>35% AND query_coverage>50% AND hit_coverage>50%, or (2) hit_p<1e-8 AND query_coverage>70% AND hit_coverage>70%.

[0114] Functional assignments from five public classification schemes, GO_BP, GO_CC, GO_MF, KEGG, and EC, and one internal Monsanto classification scheme, POI, are provided in Table 1. The column under the heading “CAT_TYPE” indicates the source of the classification. GO_BP=Gene Ontology Consortium—biological process; GO_CC=Gene Ontology Consortium—cellular component; GO_MF=Gene Ontology Consortium—molecular function; KEGG=KEGG functional hierarchy; EC=Enzyme Classification from ENZYME data bank release 25.0; POI=Pathways of Interest. The column under the heading “CAT_DESC” provides the name of the subcategory into which the query sequence was classified. The column under the heading “PRODUCT_HIT_DESC” provides a description of the BLAST hit to the query sequences that led to the specific classification. The column under the heading “HIT_E” provides the e-value for the BLAST hit. It is noted that the e-value in the HIT_E column may differ from the e-value based on the top BLAST hit provided in the E_VALUE column since these calculations were done on different days, and database size is an element in E-value calculations. E-values obtained by BLASTing against public databases, such as GenBank, will generally increase over time for any given query/entry match.

[0115] Sequences useful for producing transgenic plants having improved biological properties are identified from their FunCAT annotations and are also provided in Table 1. A biological property of particular interest is plant yield. Plant yield may be improved by alteration of a variety of plant pathways, including those involving nitrogen, carbohydrate, or phosphorus utilization and/or uptake. Plant yield may also be improved by alteration of a plant's photosynthetic capacity or by improving a plant's ability to tolerate a variety of environmental stresses, including cold, heat, drought and osmotic stresses. Other biological properties of interest that may be improved using sequences of the present invention include pathogen or pest tolerance, herbicide tolerance, disease resistance, growth rate (for example by modification of cell cycle, by expression of transcription factors, or expression of growth regulators), seed oil and/or protein yield and quality, rate and control of recombination, and lignin content.

[0116] Polynucleotide sequences are provided herein as SEQ ID NO: 1 through SEQ ID NO: 36,564, and the translated polypeptide sequences for these polynucleotide sequences are provided as SEQ ID NO: 36,565 through SEQ ID NO: 73,128. Descriptions of each of these polynucleotide and polypeptide sequences are provided in Table 1.

[0117] Table 1 Column Descriptions

[0118] SEQ_NUM provides the SEQ ID NO for the listed polynucleotide sequences.

[0119] CONTIG_ID provides an arbitrary sequence name taken from the name of the clone from which the cDNA sequence was obtained.

[0120] PROTEIN_NUM provides the SEQ ID NO for the translated polypeptide sequence

[0121] NCBI_GI provides the GenBank ID number for the top BLAST hit for the sequence. The top BLAST hit is indicated by the National Center for Biotechnology Information GenBank Identifier number.

[0122] NCBI_GI_DESCRIPTION refers to the description of the GenBank top BLAST hit for the sequence.

[0123] E_VALUE provides the expectation value for the top BLAST match.

[0124] MATCH_LENGTH provides the length of the sequence which is aligned in the top BLAST match

[0125] TOP_HIT_PCT_IDENT refers to the percentage of identically matched nucleotides (or residues) that exist along the length of that portion of the sequences which is aligned in the top BLAST match.

[0126] CAT_TYPE indicates the classification scheme used to classify the sequence. GO_BP=Gene Ontology Consortium—biological process; GO_CC=Gene Ontology Consortium—cellular cellular component; GO_MF=Gene Ontology Consortium—molecular function; KEGG=KEGG functional hierarchy (KEGG=Kyoto Encyclopedia of Genes and Genomes); EC=Enzyme Classification from ENZYME data bank release 25.0; POI=Pathways of Interest.

[0127] CAT_DESC provides the classification scheme subcategory to which the query sequence was assigned.

[0128] PRODUCT_CAT_DESC provides the FunCAT annotation category to which the query sequence was assigned.

[0129] PRODUCT_HIT_DESC provides the description of the BLAST hit which resulted in assignment of the sequence to the function category provided in the cat_desc column.

[0130] HIT_E provides the E value for the BLAST hit in the hit_desc column.

[0131] PCT_IDENT refers to the percentage of identically matched nucleotides (or residues) that exist along the length of that portion of the sequences which is aligned in the BLAST match provided in hit_desc.

[0132] QRY_RANGE lists the range of the query sequence aligned with the hit.

[0133] HIT_RANGE lists the range of the hit sequence aligned with the query.

[0134] QRY_CVRG provides the percent of query sequence length that matches to the hit (NCBI) sequence in the BLAST match (% qry cvrg=(match length/query total length)×100).

[0135] HIT_CVRG provides the percent of hit sequence length that matches to the query sequence in the match generated using BLAST (% hit cvrg=(match length/hit total length)×100).

[0136] All publications and patent applications cited herein are incorporated by reference in their entirely to the same extent as if each individual publication or patent application was specifically and individually indicated to be incorporated by reference.

[0137] Although the foregoing invention has been described in some detail by way of illustration and example for purposes of clarity of understanding, it will be obvious that certain changes and modifications may be practiced within the scope of the appended claims.

What is claimed is:

1. A recombinant DNA construct comprising a polynucleotide selected from the group consisting of a polynucleotide comprising a nucleic acid sequence selected from the group consisting of SEQ ID NO: 1through SEQ ID NO: 36,564.

2. A recombinant DNA construct comprising a polynucleotide selected from the group consisting of a polynucleotide encoding a polypeptide having an amino acid sequence selected from the group consisting of SEQ ID NO: 36,565 through SEQ ID NO: 73,128.

3. A method of producing a plant having an improved property, wherein said method comprises transforming a plant with a recombinant construct comprising a promoter region functional in a plant cell operably joined to a polynucleotide comprising coding sequence for a polypeptide associated with said property, and growing said transformed plant, wherein said polypeptide is selected from the group consisting of:
a) a polypeptide useful for improving plant cold tolerance, wherein said polypeptide comprises a sequence identified as such in Table 1;
b) a polypeptide useful for manipulating growth rate in plant cells by modification of the cell cycle pathway, wherein said polypeptide comprises a sequence identified as such in Table 1;
c) a polypeptide useful for improving plant drought tolerance, wherein said polypeptide comprises a sequence identified as such in Table 1;
d) a polypeptide useful for providing increased resistance to plant disease, wherein said polypeptide comprises a sequence identified as such in Table 1;
e) a polypeptide useful for galactomannan production, wherein said polynucleotide comprises a sequence identified as such in Table 1;
f) a polypeptide useful for production of plant growth regulators, wherein said polypeptide comprises a sequence identified as such in Table 1;
g) a polypeptide useful for improving plant heat tolerance, wherein said polypeptide comprises a sequence identified as such in Table 1;
h) a polypeptide useful for improving plant tolerance to herbicides, wherein said polypeptide comprises a sequence identified as such in Table 1;
i) a polypeptide useful for increasing the rate of homologous recombination in plants,wherein said polypeptide comprises a sequence identified as such in Table 1;
j) a polypeptide useful for lignin production, wherein said polypeptide comprises a sequence identified as such in Table 1;
k) a polypeptide useful for improving plant tolerance to extreme osmotic conditions, wherein said polypeptide comprises a sequence identified as such in Table 1;
l) a polypeptide useful for improving plant tolerance to pathogens or pests, wherein said polypeptide comprises a sequence identified as such in Table 1;
m) a polypeptide useful for yield improvement by modification of photosynthesis, wherein said polynucleotide comprises a sequence identified as such in Table 1;
n) a polypeptide useful for modifying seed oil yield and/or content, wherein said polypeptide comprises a sequence identified as such in Table 1;
o) a polypeptide useful for modifying seed protein yield and/or content, wherein said polypeptide comprises a sequence identified as such in Table 1;
p) a polypeptide encoding a plant transcription factor, wherein said polypeptide comprises a sequence identified as such in Table 1;
q) a polypeptide useful for yield improvement by modification of carbohydrate use and/or uptake, wherein said polypeptide comprises a sequence identified as such in Table 1;
r) a polypeptide useful for yield improvement by modification of nitrogen use and/or uptake, wherein said polypeptide comprises a sequence identified as such in Table 1;
s) a polypeptide useful for yield improvement by modification of phosphorus use and/or uptake, wherein said polypeptide comprises a sequence identified as such in Table 1; and
t) a polypeptide useful for yield improvement by providing improved plant growth and development under at least one stress condition, wherein said polypeptide comprises a sequence identified as such in Table 1.

The application's sequence listing, which the Patent Office published only in electronic form, follows.

SEQUENCE LISTING (73128 sequences)

SEQ ID NO: 1 - DNA, 949 bp, Zea mays
  Clone ID: 700016636_FLI
tctgatagggtgctcgggactgtgaagtggttcaacggaaccaagggcttcggtttcatcacccccgacgacggtagcgaggacctattcgtccaccagtcctccatcaagtccgacggctaccgcagtcttaacgacggcgatgccgtcgaatacaccgtcggcagcggcaacgacggccgcgccaaggccctcgatgtcaccgcgcccggcggcggcccgcttgccggcggggaacgtcccgacggcggcaacggcggtgggcgaggcggatacggcggcggcgaccgcggttacggcggcggcggtgaccgcggctacgggggaggaggcgaccgtggctacggcggcggcgaccgtggttacggtggaggtggcgaccgcggctacggcggcgaccgtggctacgggggaggcggcggctatggcggtgggtacggtggaggcggcggtggaggcggccgcggctgcttcaagtgcggcgaggagggccacatggcaagggactgctcccagggcggcggctacggagggggaggcggcggcggccgcggcagcgagtgctacaactgcggccaggagggccacatctcccgcgactgccccaacaaaaggcgttaggcgcggcgccaccgtcgcgtcggatccggcggagtcccatgtcgcctctcgccgcttccctacccctccaaaggtatcgctcggctgactcttgcgtgaagtcgtcggagcaaactatctatcagtagtactagcagtgtcgtttcgttttggtctgtcgtggcgtggtagtaagaaatgcaagtgagcagcaccagtatctttccgtttgaatcagttgtaaggcagtcatggtcatggttggctctgccggatctatctgtcatgaactatctatattatatcattatcaatgttatgcaatgagtctttggcattgagttaaggt

SEQ ID NO: 2 - DNA, 463 bp, Zea mays
  Clone ID: 700027674_FLI
caaaggaaacgtggcacgactgatcaatcattcttgcacaccaaactgctatgcaaggattatgagtgttggacatgatgaaagtcgtattgttctaatagcgaagaaaaaagtttgcgctggtgatgagctaacgtatgactacctgttcgatccagacgaggccgatgaacgcaaagtgccatgcctttgtcagactgctaactgccggaaattcatgaattagttcgcttagatgtcagaggatcactgatataatttcccccccttcttatttacccccgggttttctccctctcgatgattcatttcctggtatatgttagagctcaatttttgcttacattcgtttttagaataagtatagttagagctctcaaaatgtggagcttccattcctgtaaataccacagctgtaatcactagggacagttcatttttcaaataaaacattttttgtgct

SEQ ID NO: 3 - DNA, 1085 bp, Zea mays
  Clone ID: 700027772_FLI
tgcgcggcgtggcggcgcgcttcccgacagcgatcgtcagcgggcggtgccgggacaaggtgttcagcttcgtgcggctagcggagctctactacgccgggagccacgggatggacatccgggggcccaccgccgacgccaaccaccaccacggcaacggcaaggcggaggcggaggcgtcgtcggtgctctgccagccggcgagcgagttcctgccggtgatgcaggaggtgtacgcggcgctggtggccaaggtggagcgcgccatcccgggcgccaaggtggaggacaacaagttctgcctgtcggtccacttccggtgcgtggaggaggcgtgctgggccgcgctcttcgagcaggtccgcgccgtgctgagggaccacccgggcctgcgcctcacccagggccgcaaggtgctggaggtccgccccatgatccgctgggacaagggcaaggcgctggagttcctgctccacgccctcggcttcgccgccgacgccgaccgcgacgacgtcttccccatctacgtcggcgacgaccgcaccgacgaggacgccttcagggtgctgcgcgcgcgcgggcagggcgccgggatcctcgtgtccaggttccccaaggagacaagcgcgtccttcacgctacgcgaccccgccgaggtcaaggagttcctgcgcaagctcgtcggcgccaacgacgacagctgatgatccggcccgcgattcgtttccctttcccaccgtgaccagctccgatccgcctgtgtcaagccgctaactcaacctcggctacctgctgcaccggcagagggcttccttgttgttgcaactgcatctccatcgagcagcttgctttgggacaagaacagacctagctagtagtaccgtagagcccttttgtatcttcgttttttttttggtttccatctctcttgttcatcatgcctgctgttgtttaccatttgcctcggctgaaaaggcttgtattttcggcgcccttcccgcgaggcactgtaactagttgctttgtctgctgtacgtacgcgtaccatgttgaaataatatgtcatgttgaggagcttttctcag

SEQ ID NO: 4 - DNA, 697 bp, Zea mays
  Clone ID: 700027972_FLI
ttaacaggcaaaaggagtcctgttccaaccggcgacggcgagcgagttcctacccatgatagaggccgtgcacgagcgcctggtggagacgacgcgcagcatacccggtgccaaggtggagaacaacaggttctgcgtctccgtccacttcagatgcgtcgacgaaaagatgtggggcgagctgtgggagtcggtgaagggcgttctgcgggagtaccccaggctgcggctgacgcaggggcggatggtgctggaggtgcggcccaccatcaagtgggacaagggcaaggcgctcgagttcctgctcgagtcgctcggcttcgcgggctgcaccaacgtcctgcccgtgtacatcggcgacgaccgcaccgacgaggacgccttcagggcgctgcggcgccggggccagggccagggccagggcgtcggcatcctggtgtccaagcaccccaaggagaccagcgcctcctactcgctccaggagcccgccgaggtgatggagttcttgctgcggctcgtcgagtggaagcgcctctccaggctgagtcggacgcaatcagacgacgcaacggaccaagctaactgatgcggccaagtgccagttagtagggtgtgtgtaacaactaacaagcaagcatgcgtgtacattattgcccactagctagtgcgtgttcaattattaatataccgacctgcc

SEQ ID NO: 5 - DNA, 1130 bp, Zea mays
  Clone ID: 700041516_FLI
ctgcgaaatgctgaatacaggctttcttttgaaagaaatctagaactgcctgaagaaggtgtagaatgcctaaaaagtgatgtcactgaagataatcatcataacatcaatttgggaagacctgtcactatttttagattatccgaagaagacatgcctcaggaccctggaaaaaccgatgaagcatcatcttatgaaaatatgggagaagagcttggtgacttaacaccacaggcagaggagtatattattcagatgcaatctcatttgaatgccatgaaaaaggagttacatgatctcaggagaaagaattctgccttacagatgcagcagtttgttggggaggaaaaaaacgacttgctggactatttgaggtcattaacaccagagaaggttgctgaactatcagaatcgacgtctcccggtgtgcaagaaactattcattctgtggttcatggtttgcttgctactctttcccccaaggtacattcaaaggcccctccaccgctagataacatttctggtggtgttctaaaccttgggggcgaggatgatgatcgtgcagaacttgtggagaatgcttccctcccatttcagcccctaatatctgttccccgtgattatcttgcacgtttgctgttctggtgcatgctgctgggtcactacattcggggtctggagtaccggttagagcttgctcggcttctgcgaatatccagcgtgggttctttctctggtggagatgatcatgttgtttgagggtaccacgtctactgatattcctcaccgggaagaatggaaaggaaagccctggtcaagaaatgggccatatggcagagctgcagaggtgtccgttacactgctgagctatatagttgtagttcctgtatattcagaaaacagtcactcggttgtaaagctagtgttacatatgcacgtgaaccattttctttttcttcctttgatgttgtgccgtataaaaagaatttggtggttcgttggtgtttatctcgtggtagcataataggcatccttgtattctagttgtatgtttctggtggttgtgactgctgtccagtgtccatttagcttttttgtctattcttgattcgagtaaagcttaacttctc

SEQ ID NO: 6 - DNA, 319 bp, Zea mays
  Clone ID: 700041743_FLI
ggcgtcaggagctgcggcccctgtcgttcagaccctggtgctgaaggtggccatccactgccatggctgcaagaagaaggtccggaaggtgctcaggagcgtcgaaggcgtgcagaacgtgacggtggacgcctcgcagaacaaggtgactgtggtcggcaccgtggacgccgacacgctcatccagaggttgtacaagtccggcaagaagggagagccctggcagtgccacccgcccatcaagaagagcgagcccgcgccggaggccccgccgactccgcagcctgccggtggcggcggcaaggacgccgctactgct

SEQ ID NO: 7 - DNA, 576 bp, Zea mays
  Clone ID: 700041759_FLI
ctggttgcgaaggtatacctccagctcttgccggaccttttcggcctaagcagtttctgcaagctgtggctgggggtcctgagccggatggagaagtacgtcaaggtcaaggtccgaggcaagcggagcgaccggctgcaggaggtggtcccggacctgctcaagaacatcctgctcgtgatgaagagcaagggcatccttgcgaagaggagcacgatcgggggcgacagcctgtgggagctgacgtggcttcacgcgaacaacatctcgaccagtctgctgcctgatgtttttccaagccaggagtacgagcaacagagcagcaccggtagcccaagagggcccagtcctgttgaggcgtagcggtcaatgttttaacttgtgtgcgaccgtgtgtgtatgttttatttgttttactaggtttactactgctcgtgccctaatccattgaaagtgtaaggtttcgatattgtgattgcgtttcgcctccacggcaagtactatagcatgtgccctaatccattgaaaaacatgcttatgtttctgtgaattatttagttactagtccataatcct

SEQ ID NO: 8 - DNA, 972 bp, Zea mays
  Clone ID: 700041786_FLI
ttttcttaagagagtcatggaccgacttccaggagcaaggattgcatttattggagacggaccattcagagctgagctcgagcagatgttctcaggtatgccggtggtgttcacgggcacgttgcaaggggaggagctatcacaggcctatgccagtggggatgtgtttgtgatgccttccgagtcagagacactggggtttgtggtgctggaggccatgtcatcaggagttccggtagtcggggctcgcgccggaggaatacctgatatcatacctgaggatcaggaggggaggaccagctttttgtacacaccaggggatgtggatgactgtgttggcaagatcaagcggctcctgtcgagcgaggaactgagggaggccatggggagagctgccaggaaggagatggagaagtttgactggcgagcggcgacgaggaagatccgcaacgagcagtacagtgctgcaatctggttctggcgcaagaagagggcacaggtgctgcggcccctccaatgggtgctgcggctgctgaggcggacaatgccaggagctgccgatgccgcagcgaagcaatcctaggagaggggggctactatggttgatggtcctcttttttcccattccttgtattatctccgttttcgaatatttgtcgtccgctagttcatttttaactaaacagcgacaaataaaaaagaacgacgagagtataaaatgggctaaggaggccatggcagatgattggatatgtttcaggattagaggggaggaaggtcaagcttcaacattccaattcactgaagaatatataatgtacgtttaggactgttaggttgtaaatcgtcaaagtgtctatgtaatgcttcttcttggcatgctacactatatagtactaatattgatcctttaacaggaattggtgtgcagtcagacaatgataataatatatcttgctctgtctttctagt

SEQ ID NO: 9 - DNA, 793 bp, Zea mays
  Clone ID: 700041801_FLI
cgagaaaccccaaagcgaaggaacagcagcgcgagtgctagcagcagcagcgattccttcgccataccgttcgctgcgctcgctcactcggatcgaaaccccctagggttcgcatcgtcctcccgccaactcctatccctcccctctccctccgccgcgcgcgcgcgtggagctaccaaaccctaggacggcaaatccggtgcgatcgcccacggtggaggcctctcggccgccgagaggagccgctcggggctcggatcagggttccggtacttcgccggtgccgcctctgggtggtgggaccggtggatggtcatgggagccagcggctccaagcttgagaaggccctcggagaccagttcccggaaggccagcgctacttcggcctcgagaacttcggcaacacctgctactgcaacagtgtccttcagaaatctggccaaacagcaatatcgtgcatagggagcagcactgctagaccacaacactatcgggatgagaagttgcactgtcaggctgagaagtggcaccgtcgtgctgctccgagagatttcagatttggcttccttcagatatttgggtatctttttggtctgattgcttcctctagagactcttttagagaattcaatcaagagttgattgaggtgttcttaattttggatcattttttaggttttgatgtcttagaggtttacgtgaagttttggaagataagccaagattgtccaaagcaatatttttattggctctcattcatcccctttggtaacctaatctaatgattccaat

SEQ ID NO: 10 - DNA, 878 bp, Zea mays
  Clone ID: 700041813_FLI
agcagcctcgatctggctcgttcaaacttgaccgaacggcagccattacctggtggcgcctcctccttgccggtcggagccggctcgccggcgggtggcgacgctcccgccgctgtcacagggctgctcgcaccacgtgcactcctctccaggttagcaagcttgatcccgtgcgcctgcttgggtgtctgaccgcaccggcgccgagatggtagccgctgcggcggcggtgcggccggtgtccttccgccgcctcggtgttctcctccgcgctcctttgccctgcggcctgacaacctcccgcgtcgccgcacctttcccccgccgcacagattccatgaagatttgtcaactccaattaacagctacacgattttcaaaacagaataattctggcgaggatgacgagctcctttctgaactaaaagataagtgggatgcaatggagaacaagtcctctcttgccttgtatggtgctggagcaatcctcgctgtctggatatccttggtcgtagtgagatctctcgactctgtcccattgctcccaggcatattggagctagtcgggctcagctactctggatggtttgtgtaccgatacctgctttttcaggaaaaccggaaagaattggcgggtgttatcgatgatataaagagaaggattgttggcgatgatgaatagctgtttcctggtttgtaattctatttatctcgccctgtttggttctgaggaattgaaaaataatccaatggtgaagtgagaaagcactttctagctattggttttaattcatggggtccaaacaggctcttgatagaatcttgtaggtttctgttcttaattaatgccagtcagagctacgaggtattggcctttc

SEQ ID NO: 11 - DNA, 1120 bp, Zea mays
  Clone ID: 700042043_FLI
gcagaggcagcgacacgatcgcgagcgcacgcacgtaagcacgttgtcggaagctcaagttagaagaagcaccagtgcctgatcgatggcggcccaggctctcctctccggccggcagctgctgggccgccccgtgcagtcggccgtctctaggtcgtcggcgaggaaggcgcccttcgtcgtcagggccagctccagccctccagccaagcaaggtgccgacaggcagctgtggttcgcgtccaagcagtccctctcctacctcgatggcacgctgcccggcgactatggcttcgacccgctgggcctctcggacccggagggcaccgggggcttcatcgagcccaagtggctggcctacggcgaggtgatcaacggccgctacgccatgctgggcgcggtgggcgccatcgccccggagatcttcggcaagatgggcatcatccccccggagaccgcgctgccgtggttcaagacgggcgtcatcccgcccgcgggcacctacaactactgggccgactcctacacgctcttcgtcttcaacatggcgctcatgggcttcgccgagcaccgccgcctccaggactggtacaacccgggctccatgggcaagcagtacttcctcggcctcgagaagttcctcgccggctccggcgacccgtcctaccccggcgggcccctcttcaacccgctcggcttcggcaagaccgagaaggagatgaatgagctcaagctcaaggagatcaagaacggcaggctcgccatgctcgccatcctcggttacttcatccaggggctcgtcaccggcgttggcccgttccagaacctgctcgaccacctcgccgaccccgtcaacaacaacgtgctcaccagcctcaagttccactagaacgttggtgcatcagcatacctgctgccgccgccgccagttgtttgctgtggaaagctagatgcatgcgtgttgtaaaggaacctgaagcgttgcatcggtcatgattcatgcatggccagcctgctgcctgtaacaacaaactagtattgatcttattgagaccggaaactgtattgcacatggtaaatcaatgtacaattcctccctagatgcggacaaatttctcct

SEQ ID NO: 12 - DNA, 1863 bp, Zea mays
  Clone ID: 700042149_FLI
ctcctccctcctccccgggctgccccgcgctgtcgggagcagccggagcgctgccgcgaggctgctgctgctcccgcctctccggctgcggcgcggccggcgcgccgcctccgcgtgcgcggtgagggcgggcctgcacgggctcgactccgtcggcgggccccacctccaggccgcgctggagcgcgccgaggcggcgctctacacgctcgccgacgcagcggtagccgcggcggacgccgccgcgggcgcgggggacgacgccggccaagctgcggcggcggtccagaagaacggcggctggttcggcttcatctccgaggccctcgaggtcgttctcaaggtgctcaaggatggtctctcagcagttcatgtgccgtactcctacggatttgccatcattcttcttactatcattgttaaggctgcgacattgcctttaaccaaaaagcaggtggaatcaactatggcaatgcagaatttacagccgcagcttaaagcaatccagcagagatatgcgggcaaccaggaaaggatacagctagagactgctcggttatacaggcaagctggtgtcaaccctttagcaggatgttttccaacattggcaacaatacctgtatggattggtctttaccaggcactttcaaatgtagcaaatgaggggctattgacagaaggatttttctggattccatcactgggtggtcctacaacaattgcagctcggcaaagtggtgctgggatttcgtggctcttcccatttgtggatggccatcctccgctaggctggtatgacacgatatgctaccttgtattgcctgtgctacttgttgcttctcaatatgtctctatggagatcatgaagccacctcagagtgatgacccgtcacagaagaacacactcctcgttttgaaatttcttccatttatgattggctatttctctttgtcagtgccatcaggattgtctatttattggttcacaaacaatgtcctcagcacagcacagcaggtttggttgcggaaaatgggaggagccaagcctgtagtgagtgagggggataggaggataattacagcaggacgagcaaaacgctctaatgctcaaccagctggagaaaggtttaggcagctaaaagaagaggagagcatgagaaaagtcaacaaagcactcgctgcaggagactcaaatgcatcgtcatcaacgtatgacatggaggatgaagagtcggatgacgagaccacagaagagggagggcccgtggaggaagcatccagtactggcagtgacaagaagcctccaagttactcagggaagaagggcaaaagatccaagaggaagcgcatggtgcagtgatcgtcacagctcaatcggatgcgattttcgccacaactggttgattcagttgaccagttaggtgccgcagtggatcacggagacagttttggcggtctgctggagccctatatttggggtgcagacaaaatgaacagcttccggggtcacaggtatttgctgctaagcttatgcaaatggaggtagctgagtatatatgctaggcctgagggtgagtgatggaccggagaacaggagtcgggtacgcgtgcaagcagagagacagggtctgtagaagtagataaggtgtaatctctcgtcaagctgggttccagaatctggattgtcctcaccattcgtatgcattgcattgtatttgctttcctcttgtaacctaatgaaccactgttttggagggtatgatcgcgcaagctgacaaccatccagtcgtatacaaatgagttcgaattcgtcttgtcagaactcgttaagagaatgaacttgcgcgagattttttgcatcgc

SEQ ID NO: 13 - DNA, 615 bp, Zea mays
  Clone ID: 700042152_FLI
cagcgactcagcgagcgagagcagcacacacgcagctagctaggagcagcagcagcggcggcggcgatggcggcctccatgatctcctcgtcagctctggcggtggcgcctcagggcctgccgcccctcggccgccgcgcctcctccttcgccgtcgtctgctccaagaagaagatcaagaccgacaagccctacgggattgggggtggcctgaccgtcgacgtcgacgccaacgggagaaagggcaagggcaagggcgtgtaccagttcgtcgacaagtacggcgcgaacgtcgacggatacagcccaatctacaacgaggatgactggtctcccaccggcgacgtctacgtcggtggaaccactgggcttctgatctgggccgtcaccctcgctgggatcctcggcggcggcgccctcctcgtctacaacaccagcgccctctccggctaaggatatccaatgcatgcgcttcttgcgattcgtcgtgtaaaatcagggtgtctgtctataatctagcctccatggatgctcaaccttcgtcatgtaacaataatcagtgctactcttcattacataattttgatgctatatatatataccccatccctccct

SEQ ID NO: 14 - DNA, 443 bp, Zea mays
  Clone ID: 700042216_FLI
gtggaaacctgccagcgccttcgtctgatgaaaggttcagaggccgtgaacttgggtacgtacatgttttcccctaaagcctacctccatgtgtttaaaaacgtctgcgttttgttttcacagccatcgctgttgttcattttcacagcaccgagagccgcccgatgaggcacactagctccgttgggcgttggcacgcacgcacgcactggcgtcttgaaggaaagcgggaactctgctggtcttgatgaggatcttcacgtgagataggaacgtgtgtacagttgtcgccttatggtattgagttgaggaaacttggaagttccattacttgtctgtagtctctactttatatagatgcgaagaagcttgagatacacattgcctacaatgtcttttgatgaataagaccagacagcaccgaaccgaactcgtccttccac

SEQ ID NO: 15 - DNA, 905 bp, Zea mays
  Clone ID: 700042425_FLI
tcttcagagcctgcaagaccgtgaagtacgcttattcaatccggaactggctgtggacagcattcacctacactgccatggtggactacccgaccccagccaacttcctggagaacctgcctgcctacccagtcaaggagatgtgcaagaccatcgacgcgttccccgcgggcgcagacgtcctggagaaggcgttcgcggcggcgagcctgtactacaactacacgggagaccagacctgcaacaagatagaggacggagacgacccgcacggcctcgatggctggcaatggcaggcctgcacagagatgatcatgcccatgacgatctccaacgagagcatgttcccgccgtccgccttcagctacgacgacaggtccgacgagtgtttccagagctggggggttcggccgaggccgcactggatcaccactgagtacggtggatataaaatcgataaggtgctcaagaggttcggcagcaacatcatcttctccaacggaatgcgagacccatggagccgtggcggggtgctcaagaacatctcgtccagcatcatcgcccttgttacagagaaaggtgcccatcatttagacttgaggtcttcaacgaagggtgatccagactggctcatagaacagaggaggcaagaggttgagatcattcagggatggattgatcagtatcatcaggacatggcggaaacatcttcctgaagacagggcaagtcagtattcttcttcttacacatggtggaaacagggcgtgtatcatcaggacatggcggaaacatcttcatgaaaacaggacaccttcctgttacggtcatgtttggatccatggaaaaaaataaaggacaaaaaatcaataatttacacactaaacatcagaaattgctgaatctt

SEQ ID NO: 16 - DNA, 1414 bp, Zea mays
  Clone ID: 700042436_FLI
tcgtccccgttccattcccttatccccccggagctggtgcgcctgctccctcgctcggagtcggagctagtgcagggccacccttcccctcggcctcgagagcactgcggttgccgcggccaagggcgtccgtggagaagcgggagcaggtggcggcgatggaagagcaaggcggccaggcggcgctcggatgggcggccagggacgactccggcgtcctctccccctacagcttctccagaagggttcctaaagacgacgatgtcacgatcaaggtgctctactgcgggatctgccacaccgacctgcacgtcatcaagaacgactggcgaaacgccatgtacccagtcgtcccggggcacgagatcgtgggcgtggtgaccggcgtcggcggcggcgtcacgcggttcaaggccggcgacacggtcggcgtgggctacttcgtggggtcctgccgctcctgcgacagctgcggcaagggggacgacaactactgcgcggggatcgtgctcacctccaacggcgtcgaccacgcgcacggcggcgcgcccaccagggggggattctccgacgtcctggtcgcgagcgagcactacgtggtccgcgtccccgacggcctggcgctggaccgcaccgcgccgctgctctgcgccggcgtcaccgtgtacagccccatgatgcgccacggcctcaacgagcccggcaagcacctcggcgtcgtcggcctcggcggcctcggccacgtcgccgtcaagttcggcaaggccttcgggatgaaggtcaccgtcatcagcacgtccgccagcaagcgccaggaggccatcgagaacctcggcgcggacgagttcctcatcagccgggacgagaaccagatgaaggcggcgacggggaccatggacggcatcatcgacacggtgtcggcgtggcacccgatcacgccgctgctggcgctgctgaagccgctggggcagatggtgatcgtgggcgcgccgagcaagccgctcgagctgccggcctacgccatcgtgccgggcgggaagggcgtggctgggaacaatgtcggcagcgtcagggactgccaggccatgctcgagttcgcggggaagcacggcatcggggccgaggtcgaggtcatcaagatggactacgtcaacacggccatggagcggctcgagaagaacgacgtccgctaccgcttcgtcatcgacgtcgccggcagcctcggctctgccgcctaggcgtggctgcaaaggtttcaatcagagcccagccgcaataatttgttagctaccgaatgaatgatggtctacgcttgttgatgagttggtgctttgtcgtggttttgtggatgtaataattcgatgtacaaataaaaaaaagggagacaaggtgcttgttcccttggtttggtgcc

SEQ ID NO: 17 - DNA, 1110 bp, Zea mays
  Clone ID: 700042481_FLI
aagaagctaaggcaccttttagctgacaggtttgctgatgagaagcagacggagttcagatatttcatcggagtggaagcacctaaaggtctgttgaacctggaagaactacagactcttgaaacagtgcaagcgagcaaagacttgcctgaacagctgaagaaactgatgcaactcagaagcttatggatcgacaatgtaagcggtgcagattgtgataaccttttcgcgactctttcaaccatgccacttctttccagcctcctaatctccgcaagagatgtgaatgagacactttgcctccaagcccttgctccggaatttccaaagctccacaggctaattgtaaggggccgctgggctgccgagacactggaatatccaatattttgcaaccatgggaaacatctaaaatatttagcgcttagctggtgtcagcttggtgaagatccattgggggtccttgctccgcacgtgccgaacctcacctatttgagcatgaacagggtcagtagtgcaagcactttggttctttctgcagggtgctttcctcacctgaaaacactcgtcctgaagaaaatgcctaacgtcgagcagctggagattggacatggtgctcttccatgcatccaaggtctgtacatcatgtccctagcgcagctggataaggtccctcaaggcatcgaatcgcttctctccctcaagaagctttggcttctgtacctgcacgcggagtttagaacgcagtggctaacgaacgggatgcaccagaagatgcagcatgttcctgagattcgtgtctaggacacaggaaagccagatggttatttctgcagtactatgctggtatatatggtgtgtctgtgaaaaaactattttttgtaccttttcttcccttaagtcctgagttgttgtatgtggacttcacttgcagacacaaacgctcgctttgggtagctcgttagacccatatatatacgtgttgtgttggttcagttgctttaagttacttgtttgttcgaggcatttgccttctgtattgaacttcatgcaaatgatgttatgatcaaacttgtatgtccatgtattttaaatttttttacatgcctc

SEQ ID NO: 18 - DNA, 1243 bp, Zea mays
  Clone ID: 700042486_FLI
ggcaacaccgcccgcgacgaccacgatggcagcctcgctccaagtccaagccgcggccaccttgatgcaaccggccaagatcggcggccgggcgccgtccgcctcgctgccgtcgtcccgcccgtcgtcgcaactcgccagggcgttcggcgtcgacgccggcgccgccaggatcacgtgctccctccagtccgacgtcagggacgtcgccagcaagtgcgtcgacgccgccaagctcgccggcttcgcgctcgccacctcggcgctcctcgtctcgggcgcgagcgcggagggcacgcccaagaggctgacctacgacgagatccagagcaagacgtacctggaggtgaagggcacgggcacggcgaaccagtgcccgaccatcgacggcggcgtggactcgttcccgttcaagcccggcaagtaccagatgaagaagctgtgcctggagccgacgtccttcaccgtcaaggcggagggcatcgccaagaacgcgccgcccgagttccagaagaccaagctcatgacccgcctcacctacacgctggacgagatcgagggcccgctcgaggtcgcctccgacggcaccctcaagttcgaggagaaggacggcatcgactacgccgccgtcaccgtgcagctcccgggcggcgagcgcgtgcccttcctcttcaccgtcaagcagctcgtcgccaccggcaagccggacagcttcggcgggcccttcctcgtgcccagctaccgcggctcctccttcctcgaccccaagggccgcggcggctccaccggatacgacaacgccgtcgcgctccccgccggaggcagaggcgacgaggaggagctccagaaggagaacatcaagaacgccgcctcgtccacgggcaacatcacgctgagcgtcaccaagagcaacccggacaccggcgaggtcattggcgtattcgagagcgtgcagccgtcggacaccgacctcggggctaaggcgcccaaggatgtcaagatccagggggtctggtacgcgcagctcgagtgattcgttttaactgttagaggcgtcggaccgtcatggagaacttttgagagaggaggaggaatcgtgtatgtaactattaatgcaaattcgggctgttggtttttaatttcagtttgggtttcttctttctttcttgtgtactccagtggactcccgtgtgcaaacacgaagagtggctgtttgacaccagagattaattgttacttcctc

SEQ ID NO: 19 - DNA, 1423 bp, Zea mays
  Clone ID: 700042586_FLI
tgcgctgctgctgcctggcttgctcgctcgctcgctcgtgcatcacatcaacaaccaggtcggcacgagcggcgggtcgcggcgggcgccgacggaggcgaagctgaaggtggccatcaacgggttcggccgcatcgggcgcaacttcctgcggtgctggcacgggcgcggcgacgcctcgcccctcgacgtcatcgccatcaacgacaccggcggtgtcaagcaggcgtcccacctgctcaagtacgactccacgctcggcatcttcgacgccgacgtcaagcccgtcggcgacaacgccatctccgtcgacggcaaggtcatcaaggtcgtgtccgaccgcaaccccagcaacctgccgtggggcgagctcggcatcgacctcgtcatcgagggcaccggcgtcttcgtcgaccgcgagggcgcggggaagcacatccaggcgggggccaagaaggtgctcatcacggcgcccggcaagggcgacatccccacctacgtcgtcggcgtcaatgccgaccagtacaaccccgacgagcccatcatcagcaacgcctcctgcaccaccaactgcctcgcgccattcgtcaaggtgctcgaccaaaagttcggtgcgtatcgatcttcttcactcaactcgagtcgagcgccgcaaacttgatgctccctccttgtgattattgcaaatcggacaaacctataataacggtgtatatatatatatatatatatatatgcatggatcaaggcatcatcaagggcaccatgaccaccacccactcctacaccggcgaccagaggctgctggacgcgagccaccgcgacctgcgccgcgcccgcgccgccgcgctcaacatcgtgcccacgtccaccggcgccgccaaggccgtctcgctggtgctccccaacctcaagggcaagctcaacgggatcgcgctccgggtgcccaccccgaacgtctccgtcgtcgacctcgtcgtgcaggtctccaagaagaccctcgccgaggaggtgaaccaggcgttccgcgacgccgcggccaacgagctcacgggcatcctcgaggtctgcgacgtgccgctcgtgtccgtcgacttcaggtgctccgacgtctcctccaccatcgacgcctccctcaccatggtcatgggcgacgacatggtcaaggtcatctcctggtacgacaacgagtggggctactcgcagagggtcgtcgacctcgctgacatctgcgccaaccagtggaagtgaagcgttgcattgtaatagcactttgtaactcctcaccctccacagggctttgggattcaccccgaaatgactcactttcggtgaaattcacccgtttcggcgaggtcgtccgaatataccggccaaatgtttccattggatttcaattattagtcaactctagagttgaaac

SEQ ID NO: 20 - DNA, 1010 bp, Zea mays
  Clone ID: 700042624_FLI
attcaaccgtggttccatttcacggtcattggttaattatctgttgttcatttcgttttttttttctttaaatataggccacttcttataaatatgtaggagggctaatatgtactttctttactgtgtccttttcaggatcctaggactgagaataatccttatcttggtttcatctacacctccttccaagagcgggcgaccttcatctcacacgggaacactgctcgtcacgccaaggactttggcgacttaaagcttgcacaaatctgcggcatcatcgcctcagatgagaagcgacatgaaactgcgtacaccaagatcgtggagaagctgtttgagatcgaccctgatggtaccgtggtcgctctggctgacatgatgaggaagaagatctcaatgcctgcccacctgatgtttgacgggcaggacgacaagctgttcgagcacttctccatggtcgcgcagaggcttggcgtttacaccgccagggactacgccgacatcctcgagttcctcgtcgacaggtggaaggtggcgagcctgactggtctgtcgggtgaagggaacaaggcgcaggactacctttgcacccttgcttcaagaatcaggaggctggaggagagggcccagagcagagccaagaaagccggcacgctgcctttcagctgggtatacggtagggacgtccaactgtgagatcggaaacctgctgcggactgcttagacaagacctgctgtgtctgcgttacataggtctccaggttttgatcaaatggtcccgtgtcgtcttatagagcgataggagaacgtgttggtctgtggtgtagctttgtttttattttgtatttttctgctttgatgtacaacctgtggccgcatgaactggggcgtggagatgggagcgaccatgccgtactttgtctgtcgctggcggtgtgtttcggtatgttatttgagttgctcagatctgttaaaaattttgtgagctatgcagttcagttctgttc

SEQ ID NO: 21 - DNA, 1686 bp, Zea mays
  Clone ID: 700042758_FLI
ggcgagacgagaggccgctaaaacccaagcgcggcccgagccgaacctgaacctgaggtggagagatcgcacgcgccctctgccgcttgttcgttcctcgcgcttgccaccaggcaccaccacacacatcccaatctcgcgagggcaagcagcagggtctggcggcggcggcggcggcggcggcacgcttccggctcccctttcccattggcctccacgatggcgctccgcctcaacgacgtcgcgctctgcctctccccgccgctcgccgcccgccgccgccgcagccgcagccgcagcagcggcaggttcgtcgccgtcgcctccatgacgtccgccgtctccaccaaggtcgagaataagaagccatttgctcctccaagggaggtacatgtccaggttacacattcaatgccacctcacaagattgaaattttcaagtcacttgatgattgggctagagataatatcttgacacatctcaagccagtcgagaagtgttggcagccacaggatttcctccctgacccagcatctgaaggatttcatgatgaagttaaggagctcagagaacgtgccaaggaaatccctgatgattattttgtttgtttggtgggagacatgattaccgaggaagctctaccaacataccagactatgcttaacaccctcgatggtgtcagagatgagacaggtgcaagccccactgcctgggctgtttggacgagggcatggactgctgaggagaacaggcatggtgatctgctcaacaagtatatgtacctcactgggagggtggatatgaggcagattgagaagacaattcagtatcttattggctctggaatggatcctaggactgagaataatccttatcttggtttcatctacacctccttccaagagcgggcgaccttcatctcacacgggaacactgctcgtcacgccaaggactttggcgacttaaagcttgcacaaatctgcggcatcattgcctcggatgagaagcgacatgaaactgcgtacaccaagatcgtggagaagctgtttgagatcgaccctgatggtaccgtggtcgctctggctgacatgatgaggaagaagatctcaatgcctgcccacctgatgtttgacgggcaggacgacaagctgttcgagcacttctccatggtcgcgcagaggcttggcgtttacactgccagggactacgccgacatcctcgagttcctcgtcgacaggtggaaggtggtgaacctgactggtctgtcgggtgaagggaacaaggcgcaggactacctttgcacccttgcttcaaggatcaggaggctggaggagagggcccagagcagagccaagaaagcaggcacgctgcctttcagctgggtatacggtagggacgtccaactgtgagatcggaaacctgctgcggactgcttagacaagacctgctgtgtctgcgttacatagttctccaggttttgaccagatggtcccgtgtcgtcttatagagcgataggagaacgtgttggtctgtggtgtagctttgttttttatttttatttttctgttttgatgtacaacctgtggccgcatgaactggggcgtggagatgggagcgaccatgccgttctttgtctgtcgctggcggtgtgtttcggtatgttatttcagtcgttcagatctgtt

SEQ ID NO: 22 - DNA, 641 bp, Zea mays
  Clone ID: 700042791_FLI
attctccgccagagaatgaagaaatcgcttcaaggcttacacaaagatttgacgatacagaagaaaaggttaagttgaggctggagacttattaccaaaatatcgagtccttgctatcaacatatgagaacattattgtcaaagtgcaaggagatgccacagtggatgctgtctttgctaagatcgacgagctgctgggttctatcctggagaagaaaaatgaaatggtgtccagcacatgagcaaggggaatatatctgaagcacaggacgacacgtacaagtaatgtaagccagtctcacgtaatggaaatttctccatgtggatgtggtcaaagcataggattttttttctccaattgttaactgtacgcgaatggaagcgacagatcattcgtaggttgtgagggcttcaaagatcatctgctgctgtacatgttttgttgctgtcttgtgaacatacatgtcttgttgtttctcaactggaggaatggtgttaacctgctgtatcatttccttgaatggcttacgtgagagggaggaggacctgagcagcagctcttgcaatctttgtctaatttccttcggatggtgaaggccatttcgcctgttctccgaaaagtatattggctgcattttccg

SEQ ID NO: 23 - DNA, 2382 bp, Zea mays
  Clone ID: 700042820_FLI
tgcacctattcctattggcaaagtggagtctgcaacctccattgttgaacgtttttgtactggtggaatgtccctaggagccatttcaagggaaacgcatgaagctattgcaattgcaatgaatagaataggtgggaaatctaattcaggagaaggtggtgaggatccaatccgttggaatcccctcactgatgttgtagatggttattctccaacacttcctcatctcaagggtcttcagaatggtgacacagccacaagtgccattaagcaggttgcatctggacgttttggagttacaccaacattcttagtaaatgctgaccaaattgagataaagattgcgcaaggtgcaaagcctggtgaaggaggtcaacttcctgggaaaaaagtcagtgcatacattgctcgtctgaggaactccaaacctggagttcctctaatctccccgcctccacaccatgacatttattctatcgaggatcttgcacagttgatttatgacctccatcagataaatcctaaagctaaagtatctgtaaagcttgtgtctgaagctggaattggaactgtagcttctggagtttcaaaggcgaatgcagacataattcagatatcaggtcatgatggtggtactggagctagcccaatcagctccatcaaacatgctgggggtccgtgggaacttggtcttacagaaacaaatcagacacttatacaaaatggattgagagagagggtagtacttagggtggacggtggattcaggagtggtcaagatgttcttattgctgctgctatgggagctgatgaatatggctttggttctgtagccatgatagctactggatgtgtcatggcacggatttgtcacacgaataattgtccagttggagtggctagtcagagagaagagcttcgtgcaaggtttcctggtgttcctggtgatcttgttaactacttcctctttgttgccgaggaggttcgagctgcattagcccagttgggttatgagaagttggatgacatcattgggcgaacagatttgcttaaaccaaagcacatctcattggtgaaaacgcagcacattgatcttggatacctcctatcaaatgctggattgcctgaatggagcagctcccaaattaggagccaggacgtccacactaatggccctgttcttgatgagacaatccttgcagatcctgagatagctgatgctattgagaatgagaaggaagtttccaaggcatttcaaatctataatgttgacagagctgtctgtggtcgggtagcaggtgtgattgccaagaagtatggagacacaggttttgctggccagctcaacatcacgttcaatggaagtgcagggcagtcctttggttgtttcctgactcctggaatgaacattcggctagttggggaggccaatgattatgttggaaagggtatggctggtggagaactggtggtagttcctgtagacaaaacaggatttgttcctgaggatgctactatagttggaaacacttgtctgtatggagctacaggtggtcaggtatttgtgagaggcaaggcaggagaaagatttgctgttagaaactctctatgtcaggcagtggttgagggcaccggagatcattgctgtgagtacatgactggtggctgcgtagtcgtacttggcaaagctgggaggaatgttgcagctggaatgactggtggtcttgcctacattctagatgaggatgatacacttgtcccaaaggtcaacaaggaaatcgtcaaaatgcagagagtgaatgctccagctgggcagatgcagctaaagggcttgattgaggcctatgttgataaaacgggcagcgagaaaggtattgcgattttgagggaatgggaggcctatttgccgctcttctggcaactggtaccgcccagtgaagaagactcgcctgaggcttgtgcagagtttgagagagtacttgccaagcaagcaaccacccaattgtctgcgaagtgatcgaatcagactacaggaaggtggtaggtgttttctatttgacacaaagtgatctcatcttatcacttcaagaaaatcgaagaccataaccggcgctctgaggcaccgaagtgcccgtctgaagactgcaactttgtggaggctctgcccaggccatctttttgagttgagctaacagaaccgagggttcttctcgacgctcgtgcacctaggtaacccctgtaaattggtttgctgacgctaggctgcaaggggcctgccctgtttgaactgctgtactgtacatgattcttggccgttgccctgtgtaattatgttttggttagctcgtaaatttatacgcatccaatggaggcatacaatgc

SEQ ID NO: 24 - DNA, 774 bp, Zea mays
  Clone ID: 700042840_FLI
cactgacaagccgccgccgctcttccacctacctctccccggcctcgcacccatggccacggctttgatggttgcagccaccacctcctgctcccccggccgcgccgcgccgcgcctgaagccggtggcctcctcctcctcctccagcagcagcagctcggcgcggccgcggtggcccttggcgcagcagctcccgcggctgctggcgacggcggcggcggcggcggtggcagccgcgccgctcccggcgctggcggagcagatggagaaggccgcactgtttgacttcaacctgacgctcccggcgatcgcgaccgagttcctgctgctcatggtggcgctggacaagctctacttcacgccgctaggcaagttcatggatgagcgggacgccaagatccgcggtgagctcggcgatgtcaagggcgcctccgaggaggtgaagcagctggaggaccaggcggcggccatcatgaaggcggcgcgcgccgagatcgcggcggcgcttaacaagatgaagaaggagaccaccgcggagctggaggccaagctggacgagggacgcagccgtgtggaggccgagctcgtagaggcgctcgccaacctcgaggcgcagaaggaggaggctgttaaggcgctcgacgcccagatcgcctcgctcagtgatgagatcgtcaagaaggtgctcccatccgcgtgatgaaaccaaaccggccctgccttatcctatgactatagttacatgaacatcataaattaatgataattttcaag

SEQ ID NO: 25 - DNA, 841 bp, Zea mays
  Clone ID: 700042914_FLI
gtctcccttccaattcgatgcctttgtagcgctgctgcctcgccgcgtcgtcgcgggtccccgatttccgcttgctgctgcgcttccaacaccatggacggcgggggatccggcaatgcctccggcggcagcggcggcgcatcgacgtgctgctactacgcgctcctcggcatccgcaagaacgcctccgccaccgacatacgcgccgcttaccggaggctcgcgatgaagtggcacccggaccggtgggccagcgaccccggcgcggccggcgaggccaatcagcggttccagcggatccaggaggcatactccgttctgtcggacaaggggaagaaggccatgtacgacgccgggctcttcgaccccctcgacgacgacgaccaggatttctccgacttcatgcaggagatgctggtgatgatggatagcgtgaaaaacgagaagccggacacgctggaggacctgcagaagatgctggaggacatcgtgaagggcgacggcgggggcgggagcggcgcaggcgggcgggcgccgacggacggtgctcgacggacgcgcgttgcgccctacccgcagccgcagcgtgcgcgcaggtgaccggcgagcccgtgtacgagcgacgtacgcttcccttttggcgaaagggaccggaccccagcaacggacgggaggctctggaaaagaagaataaaaagtttcacctttctttttagttttaggccatcttcggatggtaatctacgcatcctttcatgtagcagtggtcgattgtgtaagctggggtttggggttgggtggtggtggtggtggataccggctgcgccgctgcaataacttg

SEQ ID NO: 26 - DNA, 2005 bp, Zea mays
  Clone ID: 700042933_FLI
cacggtggaagcagccaagcagccggcctggcgcccctccccttccgtcccgccgctgctgccgtgcctcgtgcctgccagcggcggatgccgccccgccccgctgctgaccaccgccgctgctgagcatggccgccgctcccgcgggcgctcagaaccgctgcgtcttcgttggcaacataccatatgatgcgacggaggagcagctcgtgcagatttgcgaagaagtcggcccagtcgtatccttcagattggtgattgacaaagagaccggcaagccaaaaggttatggcttttgcgagtacaaggatgaggaaactgctttaagtgcacgccggaaccttcagggttacgagattaatggtcgtcagttacgtgttgattttgctgaaagtgggaggaacactgatagaaatagagaaaagggtcgtggaggaccagggatggcatctaatgttgatagtcaaaaacggttagctgggacttctgttgttggagagacaaactttcatcagcctgttggtctcccaccggcaatacatgctgcatctgtgatggctggtgtccttggtggagctcagactgcaaatgttcaaaacggtttacctgtccagtatggacttggaaacgaccctcttactcattatttggccagaatgtcaaggcatcagttgcacgaagtcatggctgaattgaagttcctaactactcaaaacaaagaacattccaaaactttgctgcaaggaattccacagctgccaaaggccttatttcaggcacaaataatgcttgggatggtgacaccacagatgatgcagatggcaaagagccaacagccgttgggctccttagcacaatcttcatctcacctcaatgagccatatccacagccagagccagatgctatggttccagtagtctcaagaccatcaagtttgccaactaacgtactaccaaacccagttatcctacaggaacaaacagctgcaatacatagttttcctcagcatcaacatgcatctcagccccaagtcaaaatgtttccacatggacaaccgtctgggatcaccgcacaatctccaatgctacatcagccccttggtggttcttccagtgttcctattcaatctcttgtgacctcagtaggcttaacctcacaggttcagcctccatttgtgccagagcaccctggaccacctgtcatgcctacaagtgtacaacagctacctttgacccaccctcatcttgctctggtagccgccgcacctgagactctaccaaatgaaataagggttgctgatcaagcaagtcatttgacagagtttactcatccttcaaaattgagaaaattggaggatggaacctcggtgcctggaatggtgaacagcagccatgctatttatacagctccactgcaagcagtgggccctagtggaccatcagggagctatagtgctggtgctggtagcttacaacaaccagggaatgaagggcagattacgcctgatgtggagtcagctcttctgcagcaagtcttgcagctgacacccgagcagctgagttcgttgccaccagagcaacagcagcaggtgattgaactccagaagatgctttcagctggtaaatagaagcaaccgagctagtgcagcaatattgccggtcgaggatctggcacgtcacataatggcgagttggcaactagtggaagctggaagtgatcctcagatttgttatcaagtcactaggccgcttcataacctgtcagcattttcttgtgggcatcttgatgccatcagttttgctcagaagtatccatatggctttctttcttcagatcagagataaaagaaatgttacaggagatggtagtttaaagaaagggatacacattatccatcactgctgtatcattatagggagaaaataacaataatctgtatccaaaggagctgtttttttttctgcttctccaaaatgggatatagcatcagatttttgtcctttc

SEQ ID NO: 27 - DNA, 963 bp, Zea mays
  Clone ID: 700043225_FLI
cgacgtcgtcatcgtgggcgccggctccgcggggctgtcctgcgcgtacgagctctccaaggaccccgccgtgagcatcgccatcgtggagcagtcggtgtcgccgggcggcggcgcgtggctgggcgggcagctgttctcggccatggtggtgcgcaagccggcgcacctgttcctggacgagctgggcgtggcgtacgacgaggccgaggactacgtggtcatcaagcacgccgcgctcttcacgtccacggtcatgagcctgctcctggcgcgccccaacgtgaagctgttcaacgccgtggccgtggaggacctcatcgtcaggggagggcgcgtcggcggcgtcgtcaccaactgggcgctcgtgtccatgaaccacgacacgcagtcctgcatggaccccaacgtcatggaggccaaggtcgtggtcagctcctgcggccacgacgggcccttcggcgccaccggcgtcaagaggctccaggacatcggcatgatcagcgccgtgccggggatgaaggcgctcgacatgaacaccgccgaggacgagatcgtgcgcctcacgcgcgaggtcgttcccggcatgatcgtcaccggaatggaggtcgccgagattgacggcgcccccaggatgggcccgacgtttggcgccatgatgatctccggccagaaggcggcgcacctggcgctcaaggccctgggcaggcccaacgccgtggacgggaccatgtcgccgccgttgcgcgaggagttgatgattgcgtacaaggacgacgaggtcgtggacgcctgagtgcggcaagcagagaggaggatcgacgccagcagcgtcttatcttaattgccttgttgttcaatgatgaatcgatcgaattcccttgggttagctttattattgttgttgttattattaatttgactcgctatagtgtgtcgtgttcatagcaccaccaccgcgcc

SEQ ID NO: 28 - DNA, 1083 bp, Zea mays
  Clone ID: 700043331_FLI
ctccacttgaacttttttgtcgtttaatacaaaggcaggagagctacagatcattgcattaatgagaagtatttagtgtacaacccacacaagcacacaaccaaacatatattgaactggttctattgagaatgctatagtgataggttgatagtataacgtgatggattttaaacccactatgtctaatgtagcaaatagttaagggcacggatttccagactttatacaatacaataaaatgagctttcttgtataagctacgtcgagaccactcaaagactctagttttcttgaactgaaatttattgaccatatgaattatgaactaaactaaaaacactaaatcatttgttaccatataagcattatattttatgaaatatcaacgaatttgaagatttgaacaaacaagaaagacaataattaacctgagtgtgaagcaagcgcattcagagtagtggaccaactcgagcttttggaaaactttaatgtaaaccctattattgtgcctgttcctgtaatatgtacccttgagctaattacatgtcctgtcttcaccacaggaaaaataaatttactgagaaccttctttcagcagatcttcatggggcccttctaatagtggcagaacacaaagctgcttcatataaaagtgtaaacggaatcatgattcgagatactgcagagacgtttggaattatatccgaggacaaccgcttccgggtttatcaaaagctggttcagttttcgtacttcaagcagaccgctggaagttcacactgatcggcgacaagctctcgcccagggagaagttgaaggaggatcagcgtcaacaacgtgcgcaatcgctaatcagatagtttccaatgtgccagctgttctctcacaaaatttttgctccacggaatacttgcttttgtttaggtcctgccactgtagcatggtagttttaggctggctcccgcaatagtctctaaagcctcctctatcttaaatatagaggatcaaacggtcctatatgctcttcaacagcgtactctaaattatcctctaaatttagaggacgctactggattctct

SEQ ID NO: 29 - DNA, 345 bp, Zea mays
  Clone ID: 700043388_FLI
cagcagggtgtgtcccggccggtcctctctagtttctaccccggcccccaacattggcctgatgctgctgccatgtagcccagcgctcccccctcggcttcaccggcggcggcggcaacgacggtgaaaactacatcgggtgctagctccgacggtggtgcgtgccctgttgacgatagggcgcgcggggcgcgggcagcttgtaggcgttcgatcggccatgtagggcaactatacatctttggcaggtctccatcatcctccgtgggagagaagatgcatggtaatggagtgcgtgtgtatgtatgtgtatgcccatggcgcgcgcgcgcggctctgggcgag

SEQ ID NO: 30 - DNA, 2706 bp, Zea mays
  Clone ID: 700043404_FLI
ggcgacctcctccactccgcctgctgcttcccacgcctccctctccccccgtctctaggttcgttcgttccacgtcgccgtccacccctgtccacagccgcgacaaactcttcctcagacccacgccacgtacgatgcctctctccccttccccttcccctccgcccaacgccaccgccgccgccgccgccctgcccctcctcctgctgctcgtctgcgccagcagcattgccgcgcagccgctggcgtcgtcgcaggccaaggcgctcctccgggtgcgccgcctgctgttctacccgccggcgctcgagccgctgcgcggggcgccggacccctgcgcgctgccgcccgcgccggccctcgccgtcgcctgcgagggcggccaggtcacggcgctctccgtcctgggcgaccgcgacccggacgcggcctggcgcgccgcgctgccggccagcttctcctccgaggcgctgttcaccacgctcaccaggctcccggcgctcgcgcgcctctcgctcgtcggcctcggcgcctggggcccgctcccgggcgccaagctccgccggctccaggcgctgcagcagctcaacctcagctccaactacttctacggcgccgtccccgatggcctcgcccggctctactcgctgcagagcctcgtgctgtcctggaactggctcaacggcaccgtgccgtccctgtccgggctccagttcctggaggagctcgacctgtcgcacaaccggctcggcccggcgttcccggacgtggggaggtcggtcgcgcggctggtcctggacgacaacaacttcaccgggggtatcccggcgggggtgagctcgctgggcctgctccagtacttcgacgtgtccgggaaccagctgcagggttggatcccctcctccgtcttcgcgctcccggcgctgcggtacatcaacctctcccgcaaccggctggcgggccagcttcccgccaccacggcttgcgcggaggcgctggcgttcgtggacgtctcggcgaacctgctcactggggcgcgccccgtgcatgcggggcaattcctcggcgcgcacggtcctcgtcgcgggtaactgcttcgccgacgccaagcagcagcgggccagctcgtactgcaaccccggcgcgctggccgccgtgctgccgccgccgcagggcaacggaggaggagggcaggggacggggaagggccgcgagatcgggatggttcttgcgattgccggcagcgtcgttggtgccgcattgctgattgcgctggccatggtggtggtcctgaggagggcgaggaggcagcgtccggaggcgaccatcctgccgaagtcgcccgcggcgacaccgaccaacaaggcggatggatggaaggctccggctaaggcaacccagaagattattactactgctgataagagacatgcatcacaagctgcaagggtgaatacactggaagtaccagcctaccgagtgtgtacactggaggagctccaagaagcaaccgacaatttcagttcctccaacctaatcaagactagtcctcttgcacaggattataatggtcagcttcaagatggttcacgagtactggttagatgtttgaggctgaagccgaagtactcctcccagagccttgtccaatacatggagattatttctaaacttcggcaccgtcatttggtcagcatcattggtcattgcattgtcagtgatgaggagaatcctaatatcgcgagcttggtctacctcgtttctgaatgcgtgacaaatggatctttaagaagtcaccttactgagtggaggaagcgtgaaatgctcaaatggccccaacgggtttgcgctgccattggcattgcgagaggggttcagtttctgcataatctgactgctcctgggatcgtacagaacaatctcaacatagaacatatcctgctggacaagaccctcacgtctaagatcagcaacttcagtcttccaatgatatcaactagcaagaacggcaagattctctcagagaccccatttgctgtccatgaagacaatgatattggcagtgctcagaacgcggcacaaggtgacaaggaagacatctaccagattggcctaattctcctggaggtgatcacaggcaaaccaacagagtcccaaaggcaactggagtccctgaaagctcagctaagtgaggcgctaactgaagacccagacaggctgaaagacatggcagacccggcgatacacggtacttttgcagtggactcactgagcacagttgccgagatagccctcaagtgcacgactggcgacccaagcgaccgaccttccatcgacgacgtgctctggaacctgcagtactccatgcaggtgcaggatgggtgggcgagcagcgagagcttaggcttgagcgtcaaatctcaggcttagataaaggcgcagtgattcggttcctatgcaaatgatgattatgaagctctatgcgccatcactctgcctctagttttctggggtttttttttttgggaggaagagaggtcgttggtatagtctctactgtatatatgtggaccttacttttttcagaactgttgtttatggtacctgtaaaactcaggttctcttaagcgtttgtccactcaacagatatgtgctgccatttatggagcagcacacaagcagtagttaaaatgggacttacagcct

SEQ ID NO: 31 - DNA, 745 bp, Zea mays
  Clone ID: 700043422_FLI
ggcctacggcgaggtgatcaacggccgctacgccatgctgggcgcggtgggcgccatcgccccggagatcttcggcaagatgggcatcatccccccggagaccgcgctgccgtggttcaagacgggcgtcatcccgcccgcgggcacctacaactactgggccgactcctacacgctcttcgtcttcaacatggcgctcatgggcttcgccgagcaccgccgcctccaggactggtacaacccgggctccatgggcaagcagtacttcctcggcctcgagaagttcctcgccggctccggcgacccgtcctaccccggcgggcccctcttcaacccgctcggcttcggcaagaccgagaaggagatgaatgagctcaagctcaaggagatcaagaacggcaggctcgccatgctcgccatcctcggttacttcatccaggggctcgtcaccggcgttggcccgttccagaacctgctcgaccacctcgccgaccccgtcaacaacaacgtgctcaccagcctcaagttccactagaacgttggtgcatcagcatacctgctgccgccgccgccagttgtttgctgtggaaagctagatgcatgcgtgttgtaaaggaacctgaagcgttgcatcggtcatgattcatgcatggccagcctgctgcctgtaacaacaaactagtattgatcttattgagaccggaaactgtattgcacatggtaaatcaatgtacaattcctccct

SEQ ID NO: 32 - DNA, 1174 bp, Zea mays
  Clone ID: 700043623_FLI
tttgtgcacaaaggcatgattaagcaggggtctgtagaggttggcaaggaagtagatgcttctgttgatgcaaaattgaggcagggggctaaggctcatcacactgcaacacatctactacaatctgctcttaaaagtgtagttggttcagaaacttcacaggctggttcccttgtggcgtttgaccatctccgatttgacttcaatttccatcgtccactttctgaagaggaattaacaacaattgaagcacttataaaccaatggattggcaatgcagcacatgttgagacaaaagtcatggctttgcaagatgcaaaaaatgctggtgcaattgcaatgtttggagaaaaatacggtgaacaggtcagagtcgtcgcggttcccgggatctcattggaactctgtggtgggactcacgtcagtaatactgctgagattcgtggtttcaagataatttcagaacaaggaatagcttctgggatcagaaggatagaagcagttgcaggtgatgcttttgttgactatgtgtgtgctcgggacaactacatgcggcgcttatgcttatcccttaaggttaaggctgaagatgtgaacagtagagtagaaacaattcttgaagagctaagagcaaccagaaacgaagcatcatctctacgcagcaaaattgcagtgctaaaagcagcttctcttgcaagtagagctacaactgtggagccccagaatgtcaggattgtggtcgagaacatgggtgatgtagacgcagatgggctgaaaagcgctgcggagcatctcatagacaccctcaaagaccctgctgcggtgattttaggatcaagcccaggggatggtaaagtcagcctggttgctgccttcagccctgcaatcgtcgaaatggggctgcaggccgggaagttcgtgagtggcatagccaaactctgcggcggaggcggtggaggcaagcccaatttcgcccaagctggggggcggaagccggagaacttgccggatgcccttgagaaagcccgagctgaaattgtggcaggggtatcaagttcgagctgattctccgctgcctcacacctgatactggaagtatagggataggattcatatgaaatgtatgtgtaattatcattggcattctaagcgaaaacacttttgtattctccct

SEQ ID NO: 33 - DNA, 1097 bp, Zea mays
  Clone ID: 700045969_FLI
gagccatcgacacgatcgcgagcgcaagcacgtacgttgtcggaagctcaagttagaagaagcaccagtgcctgatcgatggcggcccaggctctcctctccggccggcagctgctgggccgccccgtgcagtcggccgtctctaggtcgtcggcgaggaaggcgcccttcgtcgtcagggccagctccagccctccagccaagcaaggtgccgacaggcagctgtggttcgcgtccaagcagtccctctcctacctcgatggcacgctgcccggcgactatggcttcgacccgctgggcctctcggacccggagggcaccgggggcttcatcgagcccaagtggctggcctatggcgaggtgatcaacggccgctacgccatgctgggcgcggtgggcgccatcgccccggagatcttcggcaagatgggcatcatccccccggagaccgcgctgccgtggttcaagacgggcgtcatcccgcccgcgggcacctacaactactgggccgactcctacacgctcttcgtcttcaacatggcgctcatgggcttcgccgagcaccgccgcctccaggactggtacaacccgggctccatgggcaagcagtacttcctcggcctcgagaagttcctcgccggctccggcgacccgtcctaccccggcgggcccctcttcaacccgctcggcttcggcaagaccgagaaggagatgaatgagctcaagctcaaggagatcaagaacggcaggctcgccatgctcgccatcctcggttacttcatccaggggctcgtcaccggcgtcggcccgttccagaacctgctcgaccacctcgccgaccccgtcaacaacaacgtgctcaccagcctcaagttccactagaacgtggtgcatcagcatacctgctgctgccgccgccgccgccagttgtttgctgtggaaagctagatgcatgcgtgttgtaaaggaacctgaagcgttgcatcggtcatgattcatgcatggccagcctgctgcctgtaacaacaaactagtattgatcttattgagaccggaaactgtattgcacatggtaaatcaatgtacaattcctccct

SEQ ID NO: 34 - DNA, 1340 bp, Zea mays
  Clone ID: 700047402_FLI
gccttttatttcactgacagggtaatgactgtgagtttccacaagtatggtgacctgttctttcctggaacaggtgatattaaagatataggagaaagggaaggaaaatattatgccatcaacattccacttaaagatgggatagatgacactagctttactcggctttttaaaacagtaagctcactgcactttatcccttgttattttgtcatttttttagtcctgccatgttatctgagtttgtcatgcagattattgccaaagttgttgagacatatctgcctggtgctattgttcttcaatgtggggctgattcattggcgagggatcgtttaggctgcttcaatctctctattgaaggttctccagtttttaacagatatatacacacatagaatctacaagactcatgtgtgtatataatatttatccatcggctgctagagtgtcttttgtgggaatgggaagccccatgtccttgattatccattttttctgtttttgctgagtttcctcgcattattggaggtttagagttccttcggacaagtcacctagtttcctgaagctaagcctactatatttgtccattagtgcttaactgcttacttgccctatctgttttcataaacaggtcatgctgaatgtgtaaagtttgtcaagaaattcaatattccccttctggtaactggaggtggtggatacaccaaggagaatgtagcacggtgttgggctgttgaaactggggtccttttagacacagaactcccaaatgagattccaaaaaatgaatatattgagtactttgctccagattatacattgaaagttccaaatttgaacatggacaatttgaacagtaagacctatctcagttcaatcaaagtgcaagtgatggagagtttgcggtacatacagcatgctcctggtgttcaaatgcaagaggttcctcccgatttttatatcccggactttgatgaagatgaattggatcctgatgaacgtgttgaccagcacactcaagacaagcagattcaccgtgatgatgagtactatgaaggtgacaatgacaacgatcacgacgacggcacacgctaatctgcttcttctgaggccctggtgtaaatggaaacctgagattcttcactgttgtgtgtagttcagcagccttgagatgtaatagtttgtcagttgacagcagggatctaatttagcaggtcaaagtggtttagacttttataagggattctgacccctcctgaattacacattgtagtacaagtctgcatatttttaagcatgcaaaaattcaaatttctcagtggtattagtatctc

SEQ ID NO: 35 - DNA, 1060 bp, Zea mays
  Clone ID: 700048468_FLI
atcgctgatatgcccttgggccacgccttccttcttatcccctgcgcctgccctcccctcctgcagcgcccgtcgcctccctttccccttccctccctccctctccccgcgggccgccagaggcaatttcgccctcgattcgaccccgattcgtccgcccgcgaccgggattccctccgccaagcgcggatctgaacgctgcgctccgtgtcgccgctcgaatccgccatgaagggggccaaatccaagggcgccgccaaggccgatgccaagctggcggtgaagagcaagggggcggagaagcccgccaagggcaggaaagggaaggccggcaaggaccccaacaagcctaagagggctcccagcgctttcttcgtgttcatggaggaatttcgcaaggagttcaaggagaagaaccctaagaacaagtctgtcgctgcggtggggaaagctgctggcgacaggtggaaatccctgagcgagtcggacaaggctccctatgtagccaaggctaacaagctcaagctcgagtacaacaaggccatcgctgcctacaacaagggcgagagcactgcagctaagaaggctcctgccaaggaggaagaggaggaagatgaagaggagtctgacaagtccaagtcggaggtcaatgacgaggatgatgaagagggtagtgaggaggatgaagatgatgacgagtgatggagctcctcgagacaatggaccgtgcttcatccaacaatggagcggctacacaaggccccgtggcgatcacaaaaaaggagcctatatccatgtactagaattattcagtttcactccacatcgtgatgttttatttttacttttgtcgtgctataacggatagcgctcctcgttggcgccactggcgggtggttctgcctctggtctggtgtgtttgtgtgtggtcacacttgccagccagcagaggcgcctgcttgtacctagattactgtttccattgtcgtcatcatcggctaacattgtcataatgtcagtttgggtaatgttagattaagtaattattgtgttctgtatt

SEQ ID NO: 36 - DNA, 632 bp, Zea mays
  Clone ID: 700048496_FLI
cgtgcccttcggcatgttcatcagcacctgcaagaggctgaggatcatgaaagggtctgaagcgagagggctcggctcggccaagaacaactgatgatgaggcgtctatcgcatgcttgtgctgtgcgtgcgtgcatgcgccagcaaattcttttgttcttttggggtcttatttcttctccaaggcgtccctgcatgggtgtgggcgtgtggtgttgagtattatgtaccttctcccctagcattgtctgccaacaatggagcagcagctagcagcaaaccagagacatggcgaggcgaaatatgaagctgcttgcttggaaggagggagagagagagagagagaggaaagctttgtgcatgcgtggaatgatgtgtggtcgctttgttctttttcttttgtgcccctagtaggggtgtgtgtgcgtgtgtgtttagcaagacatgcaaaaggagtggagagtcgagttgaatctccatgatgcgtggttgtacaaagccaaagatcactcttctttcttgtctatcagtctattgtctatctatcgatcagcagcctggtcgttgcttctgtaattgcgattgttgaaattgcaggggaggaattgttttcctccctggtgagttgagtt

SEQ ID NO: 37 - DNA, 1882 bp, Zea mays
  Clone ID: 700048507_FLI
cgctccccgatccctcctcgctgcccgtcgccgccgccgccgaccgaccgaccgaccggggccagggggaggaggagggaaggggagtacggacacgatggaagccgactctgggaagctcttcgtcggcggcatctcgtgggagacggacgaggatcgcctccgcgagtacttcggtcgcttcggcgacgtcaccgaggccgttatcatgcgggaccgcaacaccggccgcgcccgtgggttcgggttcgtcgtcttcgccgactctgggatcgccgagcgcgtcaccatggagaagcatatgatcgacggccgcatggtggaagcaaagaaggccgttcccagggacgaccaaagtattgcgagcaagaacaatagcagcatagggtcacctggaccaggacgtactagaaagatctttgttgggggtctggcttcaaatgttaccgaggtcgaattcagaaggtactttgagcaattcggtgtgataaccgatgtggtggtgatgtatgaccacaatacgcagaggcccaggggctttggtttcatcacatatgactcagaagacgcagtggataaggcactgcacaagaacttccatgagctcaatggtaaaatggttgaggtcaagagggctgtaccaaaggagcagtctcctggacctattgcacgttcacctgcaggggggcagaactatgctatgagcagggttcataactttctaaatggttttaaccagggttacaacccgaacccccttggtggttatggcatgcgggtggatgcaaggtatggtctccttgcaggtgcacggaatgggttctcttcgtttggtccaggttatggaatgggcatgagcgttgaaggtggaatgcgtggatattttggtgcaagttctggtttcgtcaatagctccaatgggcggcaaataggttcttactttaatggtagttcaaaccgattaggtagtccaattgggtatgttggccttaacgatgattcaggatcaatactgagttcaatgtctagaaatgtctggggtaatggaaatctgaactacataggcaaccatacaaacatgaattcttttcctcaacctggaagtggtgggggtatttctggtgatgaaattagttggggaagccttacttctgctcatgggatgagcaacatttcaagccttggatcgggaaaccttggccgtggaaccggagataacaactttggcttgccttctggaaactatgttaggagcaactcaactggtacaattggtgagccattttctgcatcagccaatgcatatgaatcgaacaatccaggtgcatatggcagcagctctatttatggtgactcaacctggaggttcaactcatctgaggttgatatgcctccttttggtcatgatcttggaaatgatgatccagatatcaaatcagaaatatcagcaagctatatgggcaactatactgttaataacaatcagacaagcagaggtatcacttcctagggagagtactattatattcatatatgacttgggataggtgaaacacccactactatatcaggctttcaggtgcatgactgtgaattggtgatgtcagattaatatacaggttagttgcttgtttctaggtaaccagaggtgtggtttacaacaccaaaatgctagaggagccgatacaaacattttagtttaatttctacatctattaggccttttgttttttgaatgagatgtgcagtgttgattgcggcacatacttagaagtgttccaacataagctggaattctgtcatacggaaggataaacttgtataccaagggaatgctgtattattatctttgcccatttatggctacattagcttgcttgtt

SEQ ID NO: 38 - DNA, 996 bp, Zea mays
  Clone ID: 700050660_FLI
agactatggagcaccaagctgaatgctaatcttgtctgttacaaaggacacaactacccggtttgggatgtccaattcagtccagttggccattactttgctagtgcttcgcacgacaggactgctagaatttggtcaatggataaaatccagcctttgcgaataatggctgggcatctttctgatgttgattgtgtccagtggcatgtaaactgtaactacattgccactggctctagcgacaaaactgtaaggctatgggatgttcagacgggtgaatgcatacggatgtttattggtcataggagtatggttttatcactggcaatgtcacctgatggacgatacatggcctccggagatgaagatggaacaatcatgatatgggatctctcgactggccgttgtgtttcaccactactaggacacagctcttgtgtgtggacacttgctttcagctgtgaaggagcattgcttgcatcgggatcggctgactgtactgtaaagctctgggatgtcgcttctagcacaaaaaccctgaagacagaggataccaaaggcagctcagctaaccgactgagactgcttaaagctctccctacaaaatcaactcctgtttatagcctgcggttttctcggaggaaccttctatttgcctctggtgctctctcgctaagctcgtcgtaagctgtgtttttttttgcagaaaactagaactggtcctgttttgacattgagtagtgaagctggcatttcagagactgcctattgtacagctaatattttcattagcaattccaacgaactcagcatgtactgccgaattgagcaccgcagattcgttgtagcgggttgtgatattgtaacaatattattaggtaattacgttctgtaaaattgttttttaggttgtgaccttatgaacgcaactaaatgtacaagtgctgacaggcgatagcgtgaatgcaatggtctatcaggtctggagtttggttt

SEQ ID NO: 39 - DNA, 1084 bp, Zea mays
  Clone ID: 700050701_FLI
cgacgtttacgatcatctctaccccggaaagaatgcggaaagtggtcaagaagttgcccaagtggatccacaggagctcgtggttcccaagctgtttgagaggtttatgggcctgagagctgccttggtcaccagttgcccccatgtcagctccttcgcagcgaatcttggtttccatgtttttaaaaccaatgattttgccccacaatctggctcgtccagcattactaaagaggatggattaatcaaaagagcatttgatcttctaggattctcggatggggatgtgcaggaaacatctgaattcgatctagtcttcatgcatgttgccatggagaacacaagcagcaagttaggaaagttaggaatgaagacagatatcaatcggctcgacaaattagttggtgcagtcttggaatctgcgcctgttggttcagctattgcttcgcgtattcatgtatctgtgattttgagctatgggtctgcttctggaaataaggatgagttttcccttttaacctcttcaaccgaaacagattcagacttgaatctactgcgtccacgccagagctacacaatgaaaacagggcgtacattagatgatgtcagacttcatcatccaattttgctggcacagtggcaggacagagtaacacgtgttgatttggctaaagggttctcttttgaggagtttatgaagcgtggtggaaaccttgccatgcttgctgagcgcttcctgcacgaggtggcatttaagctctggaaagcgcctaaatatggggcttgaggagggtatccagcgttgactgacttggcgtcgcggataaataatcgaagcaccagatgagttgtcgctttgtaacggaaatgacttgagtgatgccggacactgtggcgtgtgagctttttatgtgaagtgtaacgtggacaggccctgatgcgataaactgtttggacatcgttactggttcagccaatgagaacctgtagcaaaacaatatgatgttttcttatggtagtttggaatggatggagttacatgcattgagcactgtaattttgataatataagattatctctggc

SEQ ID NO: 40 - DNA, 1567 bp, Zea mays
  Clone ID: 700050718_FLI
ctccctagtcgctccccaaatcggatctccaggccggcagaagttgagcggactgactggtcactgtagttcgatcgaatccgagtagggctgatacagttcgattcggcgggaggcatggcgtccgaaaagcacttcaagtacgtcatcctcggcggcggcgtcgcggcggggtacgcggcgcgggagttcgccaagcagggagttaagcctggggagcttgcaatcatctccaaggaggctgtggctccttacgagcgtcctgccctaagcaaaggttacctctttcctacgaatgctgcaagactcccaggattttatgtatgtgtgggaagtggtggagagaagctattgcctgagtggtactcagagaaaggcattgagctgatccttagtacagaaattgtcaaagctgatctttccaccaagactctgactagtgcagctggagcaaactttacatatgagatcttgctcattgctactggctcctcggtcataaagctcaccgattttggcacacaaggagctgattctaacaacattctatatctaagggaaattgatgatgctgacaagctggttgcagctatccaggcaaagaagggtggcaaggcagtggttgttggaggaggttatatcggcctcgaactgagtgcagccctgaagatcaatgactttgatgtcactatggtgtttcctgaaccttggtgcatgcctcgcctcttcactgccgatattgctgctttctatgaggcttactatactaacaaaggtgtaaagatcttgaagggcacgctagctgttggttttgatgctgatgccaatggtgatgtcactgcagttaagctaaaggatggcacagtacttgaagccgatattgttgttgtcggtgttggaggcagaccattgactactctcttcaagggtcaagttgctgaggagaagggtggaatcaagactgacgcttcctttgaaacaagcgttcctggagtatatgccattggtgatgtggctaccttccctttgaagatgtacaatgagttgaggagagtggaacatgttgaccattctagaaagtctgcagagcaggctgtaaaggcgatcaagggcaaagagtccggtgaaccagttccggagtatgactacctgccatacttctactcccgatcattcgacctggcgtggcaattctacggcgacaacgtgggcgaaaccatcctgtttggcgacagtgaccccacctccagcaagcccaagttcggctcgtactggatcaaggacggcaaggtcttgggcgccttcctggagggcgggtcaccggacgagaacaaggccattgccaaggtggcgaaaacccagccgccggtcgctaacctcgaggagctcaagaaggatggcctccagttcgccagcaagatctgagacgctcccgttccatgtaaaattccgtgtcatcgtgaaggttcttctggagctctggtcatgattgagaaatgttctgctacagatgttatactacatacgtgactacactacatgatatattcggttttctgattgtgat

SEQ ID NO: 41 - DNA, 368 bp, Zea mays
  Clone ID: 700052405_FLI
tccacgtcgaggactccatgggccaccagttcgccacccgcatgggcaacgtgttcaccatcggcaagggcaacaagccgtgggtgagcctgcccaagggcaagggtatcaagctcagcatcatcgaggagcagaggaggcgcgactttgctgcccaggctgctgccaaggcataagttctctgaatgtgctgcttggagctttttgctatgtctagttttatttttatctgcaaggatatagagctaccttcccaagacgttttatcatcatgttttgttgcttttggttcttgaacagcgtttgcagcttagctgtaatgctttaattcgactttctatatattgttgaaccgtgttgtcgacacc

SEQ ID NO: 42 - DNA, 866 bp, Zea mays
  Clone ID: 700052422_FLI
ctgtcagctgaaagaactggagctggaactgacggagatcagggatgttctgcgctgtattttgcacaccatattcttccatagaaccctcagcctggttcgccccaaagatgttgactgtgatttcctcgatattacttatgtacaatgtggtctaccggaactagaaaaggaagttgacgaaaagatagaccagttcagtgcatgggtggagaaacacccaaaccgcagaagccagatctgcctctcctttttcgacgagaaacacagacaccctggttggtttgtcaacaaaacagagcgcatctattgggagcaatggttcatcaatttgcaagtcatgttccccaaaagatacagcaagtcaaacagctccaaagggctgacaaacatccaagcaaatgccgtggaggagaccagcacaaggcgtgctgcattggaggcgtcgattaacgaagtgctgttccagatcataaagttcgccaacgagaaaaaggaccacattcctgctatccctgacaggattttcaatcacgagatcatgatcccaagctcggattctgtatttggatggaacacggacgtcattcgcagagttctgaatagcgggcacccatactcgctttaactgaagacgacatctcagtgggcgcccgtattcagtttattagcgtgctgccgccctgtttggaagacggctctgttaaccatcgtggtgaaccatataatatgcctaaggaaaaacctagttctgtgtacatcaccctgctcatctggcatgtacatactgtgttgggatcttgctcatcggtcaaacattcttaagttcgattaagtttataaataacaatattatgattctaaat

SEQ ID NO: 43 - DNA, 1892 bp, Zea mays
  Clone ID: 700052427_FLI
gcggcgcgggcacgcggccggtacagcttccccctgccccccatcctcctcgtcgccggatgatcgccgccggcgccgcctcgatggggcgcgcagcgactccagcccccggggcccagtcctcccggttgccgcgcgccgtctcgaggctgcggcttgtgcttcgctcctcggaagcagcagcgaggagcggcagcaagagatggatagggtgcttccggccgtcgccatcgccggccaccgccgcggcgggggcggccgtggtgaaggaggcgaagggaaagcggccggaggtggaggtggagccggcgcgcggcggaggggaggacgtgtggagcgccgatgctgagaccgaagtggctcagggtggggcgttccccgagcacctcgtcatcatggtcaatggcctcgtcgggagcgcggacgattggaagttcgcggcagagcagtttgtgaggcggatgccggacaaggtgatcgtgcaccgaagtcagtgcaactctgccactcagacatttgatggtgttgatttaatgggtgaaaggttagcaaatgaggttctatcagttgtagagcaaagacgaggtgtgaagaaaatctcgtttgtggcacattctcttggtggccttgttgccagatatgctataggaaggctctatgaacctaatagtagaaggaaatcttctgggggggagagcagagatgatgttgtgcacttgaatggtcacattgctggtttagaacctatgaatttcataacatttgcatcaccacatttgggttcaagtggaaacaaacagctaccttttttatgtggccttcctttccttgagcgaagagcttcagaagctgcgcatttgattgttgggagaactggaaagcatttattccttacagacaatgatgatggtagacgcccacttctccttcgaatggttgatgactctgatgatttacagttcagatcggcgttgcgttctttcaaacggcgcgtagcatatgctaatgctaattttgaccgtatcctttaacagcttcatccttgtctgtgtactaattattaatgctgagttacacttcttacctctgacgtgtttccagttaactaagcaaacagatatggttggatggagaacatcatcaatccgacgtcagcatgagttgccaaaacatcgtcttcttgttcgtgatgaaaagtatccacatattgtttatgttgaaaaggaagttacagacaacaatgaaacgaaggcccatgctgatcattatgatccagaagaggagatgataagaggccttacgcaagttccgtgggaacgtgttgatgtgagcttccagaaaagcacccaaagattagttgcgcataacacaattcaggtgaaaagctattggctaaactcggatggagcagacgtgatcaaccacatgatggacaatttcatcgtctagtccatggaggcatgaagcctacgttgtgtcgatggaggttcagtctacgctgtgggtttgacgaatgtccgtcgaaatttgttgatcagtgaccattcaattttgcctcggccaatttttccttctaggttgcagtttcccatcccaggaaatgtggttgattctttaggcccgtttgctgcaggcgcagagcagagccccgccctcgatgcttatcatcctgcaccatcagcaaggctagttcgttcaactgtatcataatctgtcccctcctttgtatacttgtattccgcaactaagctagtaaatagatgttgctggaaatagaattcttctatctggttcaattggagttgaagttcgaactgaaacttgccatattcttgtgatccatcgacgtgcttattgggcacggtacggtacttcaatcaagctgttttttt

SEQ ID NO: 44 - DNA, 1610 bp, Zea mays
  Clone ID: 700052459_FLI
ctctggtcgtcctcgcgccgccgcagcgacgccaccgccggtaatggcttccaccgttgtgctccggaacgcctgctcccgccgactcttctgctactccactctccgcgccgccgcaatattgggacccgccgcgccacctgatgcgcccgcggcggcgtcggcccagccgccaccgatggcaggaaccctctgggcgaggtccatggccactttcacgcgcacgaagccacatgtgaacgtcggcaccattgggcacgtcgatcacggcaaaaccacactcactgctgccattaccaaggttctggcagaggcagggaaggccaaagcagttgcttttgacgagatcgacaaggccccggaagagagagccagaggaatcaccattgcaacagctcatgtcgagtatgagactgctaaaaggcattatgctcatgttgattgtccaggtcacgcagattatgtcaagaacatgatcactggagctgctcaaatggatggtggtattcttgtcgtgtcagctcctgatggcccaatgccacaaacaaaggagcacattcttcttgcccgtcaggttggtgtaccttcccttgtgtgtttcttaaacaaagttgatgctgttgatgacccagagctactggaacttgtagagatggagcttcgggagctcctcagtttctacaagttccctggtgatgagattccgatcatccgtgggtctgcgttgtctgctttgcaagggaacaacgatgagataggaaagaatgccattttgaaactaatggatgcagttgatgagtacattcctgatcctgtaaggcagcttgataaggctttcttgatgccgatagaagatgtgttttctatccagggtcgtggaactgttgttactgggcgtgttgagcagggaacaattaaaactggcgaagatgttgagatcttgggtttgacacagagtggtcccttgaagactacagttactggtgttgagatgttcaaaaagatactggaccatggagaggctggtgacaacgttggtcttcttcttcgtggtctaaagcgtggtgatgtcgagcgtggccaggtggtgtgcaaacctggtagtctgaagacatacaaaaagtttgaggcagaaatatacgtcctgacaaaggatgaaggtggccggcacactgcctttgtcacaaattacacaccccaattctacttcaggactgctgatgtcactggaaaggttgagttgcttggtgagacgaagatggttttgcccggtgacaatgtaaccgcgaatttcgagttgatatcgcctgttcctcttgaaactgggcaaagatttgcgatgagggaaggagggaggacagttggtgccggggttgtctccaaagttattagctgatgagtttccactttcttgcccgtagcaatttagtaaagaaatgaatgctgacatgtttcttggaatgcatgggcaaaaaggcagagctggctggtctggccgccattcattctggacagtaccttgtgctttcttgttgaggtggctcatcataaagcatattttgtagccacttttccgagttgatattagtgggttcttaccaaaaaaaaac

SEQ ID NO: 45 - DNA, 1558 bp, Zea mays
  Clone ID: 700072933_FLI
ctcaggccgtggcttccacccacagccttcgcacttccctccttcctcgcaaatggccgtcgccgtccccaacgctcccggccgcctcttccttctccaatccaccccgttcccgaaccctagcagctcggcatccgccgctcgagcccaatccttccgcgtaccacccctccgcctctcgctattccgacgcatggctgggcgctcgctgacggtgatcgcaggcgcctccggcggctccgaacgagatctcagcgcctccgcagtctccgtggaggccctggactccatcgcctccgattctgacttagagacgaaggagcccagtgtgtcgacgatgctgacgagcttcgagaactcgttcgacaagtatggggctctgagcacaccgctgtaccagaccgccacctttaagcagccttcagctacagattatggaacttatgattacactagaagtggtaaccctactcgtgatgttctccagagcctcatggctaagcttgagaaagcagatcaagcattctgcttcaccagcgggatggcggcattagctgcagtaacacacctccttcaggctggacaagaaatagttgctggtgaggacatatatggtggttctgatcgtctactctcgcaagttgtgccaagaaatggaatagttgtaaaacgagtagatacaacgaaaattagtgatgtggtgtctgcaattggaccctccactagactggtttggctcgaaagtcccacgaaccctcgtcagcaaattactgacattaagacaatctcagagatagcacattctcatggtgctcttgttttggttgacaacagcatcatgtctccagtgctctcccgtcctatagaactgggagctgatatcgtgatgcactcggctaccaaatttatagcgggacatagtgatcttatggctggaattcttgcagtgaagggtgagagtttggctaaagaggtagggtttctgcaaaatgctgaagggtcgggtctggcaccttttgactgctggctttgcttgaggggaatcaaaaccatggctctgcgggtggagaaacaacaggctaatgcccagaagattgctgaattcctggcgtctcacccgagggtcaagcaagtaaactacgctgggcttcctgaccatcctgggcgagctttacactattcccaggcaaagggagcgggctctgttctcagttttctcaccggctcactggccctctcaaagcacgtcgtggagaccaccaagtacttcagcgtaacagtcagcttcgggagcgtgaagtccctcatcagcctgccgtgcttcatgtcccacgcatcaatccctgcctcggtccgcgaggagcgtggcctaaccgacgacctcgtccggatatcggtcggcatcgaggatgtcgaggacctcatcgccgatctggaccgcgcgctcagaactggcccggtgtagacatcgccgatccttaggtcatgtcaagctatcttttgatgattcattggttgactgcttgcgtgatgataataatgggaatgttgcttggat

SEQ ID NO: 46 - DNA, 2149 bp, Zea mays
  Clone ID: 700073711_FLI
ctgcctgccgcttctcctgctgcgggcgggcactgctgcaagtactagaggaggacatccgcttccattactgcgcctgcggaggatcggaggaaccagtagcggaggcttcgattttcggcgggcgcaataaatttcccgcatggctcggagggccgcgtcctcgctcgtctcccgctgcctcctggcgagggcccctgccggcgcgccgcccgctgccccctctgcgccgcgcaggacagtgcctgcagatgggatgcacaggctgttgccaggtgtccttcagaggttcagcactgcagcagcagtagaggagcccatcacgccgtcagtccatgtgaactacacaaagctcctcattaatgggaactttgttgattccgcatccggcaagaccttcccaactctggaccctcgtacaggggaggtgattgctcatgtggctgagggtgacgcagaggacattaaccgtgcagtagctgcggctcgcaaggcttttgatgaagggccatggccgaagatgactgcctatgagaggtcccgtatcctactgcggtttgctgatttgatagagaagcacaatgacgagcttgctgctttggagacatgggacaacgggaagccatatgagcaagcagcccagattgaagtacccatggtggcccgtcttatgcgttactatgctggttgggctgataagatccatgggctcattgtgccggctgatggcccacaccatgtacagatcttgcatgagccaattggtgttgcaggtcagatcatcccatggaactttcctcttctgatgtatgcctggaaagttggccctgctttggcatgtggaaatactctcgtgctcaagactgctgaacaaacccctctatcggctttgtatatctccaaattgttgcatgaggctggactacctgagggtgttgtgaatgtcgtttctggttttggccctactgctggtgctgctcttgctagtcacatggatgttgataagatcgcatttactggatctaccgatactggaaaaattattctcgagttggctgcaaagagcaaccttaagacagtgacactggagttaggaggcaagtcccctttcatcataatggacgatgctgatgttgaccatgctgttgagcttgcgcactttgccctgttctttaaccagggacaatgctgctgcgctggatctcgcacgtttgtacatgagcgtgtttatgatgagtttgtggagaaggccaaggctcgtgcattgaagcgcgtcgttggtgatccgttcaggaaaggtgttgaacagggcccgcagattgacgacgagcaattcaaaaagatcttgcgctacattaggtatggtgttgacggtggagctacccttgtgacgggtggtgataggttgggtgacaagggtttctacatccagccaacgattttctcagatgtccaggacggcatgaagattgctcaggaggagatatttgggcctgtgcagtcgatcctcaagttcaaagacctcaatgaggttatcaagagggcaaacgcgagccagtatggattggccgccggcgtgttcaccaacagcctggacacggccaacaccctgacgcgcgcgctcagggccgggaccgtctgggtgaactgcttcgacgtcttcgatgctgcgattccgtttggcgggtacaagatgagcggcatggggagggagaagggcgttgacagcctgaagaactacctgcaggtgaaggcggtcgtcaccccaatcaagaacgccgcgtggttgtagacgctgcaagtgtggccttgtgcacgagaaccacgtatattcatttcctggtcacatccccgaacaatgtgaagcgttaatcagatagatgacgatgaagaagaacaactataataagatttgccctagcctgggttctcagttatctctaataagccttatggttggtgcctatatattgtgcaatttggttgctccttttttttccttctttttgataagactgttctaggaacggatatgcagagttcattatgaaaatgcatttgttagtgtctttgatggttaagtccctaattgtcatcagtgttgattccctagatttggcgaagaatgtaaggaagagaaagattatgg

SEQ ID NO: 47 - DNA, 941 bp, Zea mays
  Clone ID: 700073712_FLI
gcagaggaagcgaggcggagatgtcggcggggctggtgaccgacgaggccaccgtggggcggctgtaccggatccggcgcacggtgatgcagatgctgcgtgaccgtggctacctggtggtggaccacgagctcgccaccagccgccgcgacttcctccgcaagttcggcgagtccttccaccgcgaggacctcctcatcaacaagtacaagaagaacgacccatccgaccagatatatgtcttcttccccaacgatgacaaggtagggatgaagcacatcaagaagtacgtcgaaatgatgacgcacgagaacgtctccagagctgtgctggttctccagcagaacctaactccgtttgcgaagtcgtttctcatagagctggagccgaagatccatctggaaattttccaggaggccgagatgcttataaacatcaaggaacatgtccttgttcctgagcatcaggtgctcacaaacgaggagaagaagacgcttctggagcggtacaccttgaaggaaactcagcttccaagaatacagatcacggatcctattgctaggtactacggcctgaggcgaggccaggtcgtgaagatcatcaggcccagcgagacggcgggcagatacgttacataccggtacgttgtatgacagaacgtcagaacactgaagaagaagagaaccacagatatgtcaaaaaaaattcaagctacacataccccacgtgcttgcagacatctgtatcgctttgtagcagcagccactggtaacgatcggtggctgatgtgtaagtgtaagtggattgaataagctgagtcagagcatacgagaattctcatgttgtacacttgtgttttatgaaccgcataaacactcacgacgataaaagaagcctgtttttcggagcgacagaagctcctgcgatcaggatttcggatt

SEQ ID NO: 48 - DNA, 2103 bp, Zea mays
  Clone ID: 700043627_FLI
gcggggagatgagctgcttaccgtgctccggttcctcggggaaggaggacaagagcttggcggcgctctcgccgagcccccggcctgcggccaaggcggcaccagttcgatcaaattcacgtgcttcgagctccaggaaggaagattctgtacctgttcgcagaggaggaaacgctgcacatggcccggcacagattttcagtttccgggagttggctgttgccaccaaaaatttcagaagagattgcctgttgggagaaggtggctttggtcgtgtgtataaaggacatatggaaaatgggcaggtcattgctgtgaagcaacttgatagaaatggttttcaaggaaatcgtgaatttcttgtggaggttctcatgctaagtctcttgcaccatcctaatctggtcagattaattggctattgtgccgatggtgaccagcgcctcttagtttacgaatacatgttgttgggatcactggaaaatcgtctgtttggtccagcaggcaaggaacctcttgactggaatacaaggatgaagattgctgctggtgcagcgaagggtctggagtaccttcatgacaaggcaaatccaccagtcatatacagagacttcaaatcatcaaacattcttctgggtgaagactactaccctaagctgtctgattttgggcttgcaaaacttggtccagttggtgacaaaacccatgtatcaacacgagttatgggaacatatggatattgcgctcctgagtatgccatgacagggcagttgacgctaaagtctgacgtttacagctttggtgttgtgttccttgaacttattacaggccgcaaagcaatcgatcacacccagccttcaggggagcaaaaccttgtcgcatgggctcgtccacttttcagagaccgaaggaagttctgccagcttgctgatccattgttgcatggcggctacccgaaaaggggtttgtaccaggccttagctgttgcagctatgtgtttgcaggagcaagcagcatcccggccgctgataggagacgttgtcactgcactgtcttacctagctgcacatccttatgatccaaatgcgccttccacaaaggattctaagacctgcccgtctaccccaagggcaaagacacaccgacgaaccaccagtgttcctgatgctcaacatgctgctgagtcgcttattttgaacttcccagacatgaggaaggagactgtcagaggaggggaattcgagaaggatcgtactgaaggttctggcagcagcagtagctctggaaggaacgattgcctggatgtcccgcgacttctatccgttcctaacggcaaagtttgcggtgaaggtaataacattcagaagtccactgttaaggttggtgcccgtgagaactagaatacagagccggccaaattctgcaggcatctttgaatggatgcatggattagaccattctttccatgcttgctgtcaattttgcgaggaatcttcgtcgcttggcgtgagtctttctgaaggggactgttgtcgagagttgagtactaccactgcaacaggtttggttttgcagacccggatagcctcatgctccacggttggtttttggttgcctccacggaacagttcaacaattcctccaggctttacatgaagtctcatgctgatgaaaggaagaactactctgtcgctgagattcagagcttagactctttagagtgtgcatttcgatgagaatctgctacattctgaatgtcacccacaccacagctttcacctgtgctgactaacgaaccctgcagtaatgtgtcattgaaggatgtggttgagtttccttgttctgttcttgtaggaaccacgtgccgacagggctgtgtctgtacatgttaatgggttgtttgtaggaacaattggatctataccattaaaagatccaaactttagatatataccatggacctcatatgtcattgactcatgtggacccacatgtaagtgagatagtaatggtatggatctaaagtggtgatcttttaatggtatggatccaaatttcccttgtttgtaagtagagctgttcatatatttattttttcttctt

SEQ ID NO: 49 - DNA, 1392 bp, Zea mays
  Clone ID: 700043633_FLI
caagtccattttatatgacaccaagatctctagtgccattgcagcattcaccatcagtaactgaaggaaatatttgtacaccaattgctgacaagtcattttcatctgattcaaaatcacaccatgttgtaaatatggtagctgatggcttcaactggaggaaatatggtcagaagcaggtgaagagtagtgataattccaggagctactatagatgcacaaactctggttgtctcgctaaaaagaaggttgagcatttccctgatggccgcgttgtggaaatcatttacagaggagcccataatcatgaaccaccacagaagaccagatttgcaaaggaaagagtgactcctattagtgttccctctggaggcgaaaccttgaggcttgtgaacacagaaattgtagaatctagcacgcctacctgtgaattggaacggagtgccatctcagaaacttctgagcagcatctcttttgctcaagtgactgcgaaggggatgctggtaacaaatctgaagatgaacatcctagcgcggaagccctgccaaagcgaagaacacttgaggctacagcaccaaatttaacgccggttcgcagaactgttagagagcaaaagattattgtgcaggctggaaagatgagtgatggatacagatggcgtaagtatggacagaaaattgtgaagggaaatccaaaccccaggagttattaccgctgcacgcacggtggatgccctgtccgtaagcatgtggagaaggcgccagatgatgttaacaatattgttgtaacgtatgaaggcaaacacaaccacgacgaacctttcagaagcagcagcataccagtttctgtaatcagtccatcagcgacagccactgagcaacccaacacatcaagtacgtcagatgagagacctccaaccattacccagaaggacgccaacagtgagtctgataaggagacaaccttgaaatttggaggcgagaaggcactcgaatctgcgcaaacgctgctcagcatcaaaactaactccgatgacatgaagaactctgtcctgaaggaaacttctgctgcagttccagtccaaaacaattgagcatgctgagatagggtgattctattgacatctcttaggctgtcatatttattggttgagtgatatgctattatgttaacttgtatgacgtgaggcttggtgttcggtattccgtgtggagcatttgaggaagcattaggtttcaggaagccacgactggttgtttctgcctgtatagattcccattccctagtgtgtacaggtactgtattttatctgaggccagataacatgtgtggggtggttcttgagaacctgtgtgtgctgtattgttctagctcgatctattgcaatagct

SEQ ID NO: 50 - DNA, 1208 bp, Zea mays
  Clone ID: 700043679_FLI
cggcgtccccgtcccgagtcaccaccgacccaagcaaaaccgcacgcaccctgccagcggccccccaactcccaacccaacccctactccagctagctcgcggcggcggccagcggccatggccttccggctgagcaacaacctgatcggggtcctaaacttcgtcaccttcctgctctccgtcccgatcctgggcgcgggcatctggctgggccaccgcgccgacggcaccgagtgcgagcgctacctctcggcgcccgtcatcgcgctgggggccttcctcctcgccgtctccctggcgggcctcgtcggcgcctgctgccgcgtcacctggctgctctgggcctacctcctcgccatgttcgtcctcatcctcgtcctcttctgcttcaccgtcttcgccttcgtcgtcaccaacaggggcgccggcgaggccgtctccggccgcggatacaaggagtaccgcctcggggactactccaactggctgcagaagcgcgtcgagaacaccaggaactgggaccggatcaggagctgcctccaggactccaaggtctgcaagagcctgcaggacaagaacgagaccgtcgcccagttcatgagttccagcctctcccccatcgagtctggctgctgcaagccccccaccagctgcggctacacctacgtcggcggcacggactggacgccggtgaccaccaactcgacggacccggactgcaagacctggagcaacgacgcctcggcgctctgctacaactgccagtcgtgcaaggccggcgtggtggccacgttccagcggaactggaagcgcgtcgccgtcgtctgcatcgtcttcctcgtcttcatcatcatcgtctactccgtcggctgctgcgccttcaggaacaaccgcagagacaacgcctaccgcggcgggtggaagggcgggtacgcttgatccaccatcgcgtcgtttaggagcggagccatgcacgcgcgctcggtgctctgctctgctccctgcccgccgctgtcgtcgtacgtacatgtttagtaggctcgttgtagctctgtacaggtgatggagatcgttgttgcggattcttatcgtcttcctggttacatacttacattattgttatgatctgatcagcggtaggttttgtatacgctgctcattgattcgtctgcctgctattttcgtatatcgatgcacttgttttacc

SEQ ID NO: 51 - DNA, 763 bp, Zea mays
  Clone ID: 700043757_FLI
aaaccatggcgtccatgaccggcctctcgcagggcgttctgcccagcaggcgcgccgccaacagggccaggacggccgccgtcgtcagggcgtccgccgaggcgcaggcgggccgccgcgccgtgctcgggctggtggccactggcatcgtcggcggcgccttgtcgcaggcggtgcacgccgagaccgtcaagaccatcaagatcggagccccgccgccgccctccggtggactccccgggactctgaactctgaccaggcgagggacttcgacctccccttgaaggagcggttctacctgcagccgctgccgccggcggaggcggtggcgagggtgaagacgtcggcgcaggacatcatcaacctcaagccgctcatcgacaagaaggcgtggccgtacgtccagaacgacctccgcctccgggcctcctacctgcgctacgacctcaagaccgtcatcgcttccaagcccaaggaggagaagcagagcctcaaggagctcaccggcaagctcttcagcaccatcgacgatcttgaccatgccgcaaagatcaagagcaccccggaggccgagaaatacttcgcagcaaccaaagatgcgctcggcgacgtcctcgccaagctagcctagatggaagctaatagatgggttaacgatggccacgtaatttcggacttgtgtttgttcatatggagccggcaaatgtaccgtttcctgttcatattatatcccgagttcttgacaagtacctttgcgggcgg

SEQ ID NO: 52 - DNA, 924 bp, Zea mays
  Clone ID: 700043810_FLI
cgctcgtcggcaagccggcggctggcacgagggacgtcttcggcgagggccgcatcaccatgcgcaagaccgccgccaagcccaagccggcggcgtccggcagcccatggtacggtgccgaccgcgtcctgtacctgggcccgctgtccggctcgcccccgagctacctgaccggcgagttccccggcgactacgggtgggacaccgcggggctgtcggcggacccggagaccttcgccaagaaccgcgagctggaggtgatccactgccgctgggccatgctcggcgcgctcgggtgcgtgttcccggagctgctcgcccgcaacggcgtcaagttcggcgaggcggtgtggttcaaggcgggctcccagatcttcagcgagggcgggctggactacctcggcaacccgagcctggtccacgcgcagagcatcctggccatctgggcgtgccaggtggtgctcatgggcgccgtcgaggggtaccgcgtcgccggcggcccgctcggagaggtggtcgacccgctgtaccctggcggcagcttcgacccgctcgggctcgccgacgacccggaggcgttcgccgagctcaaggtgaaggagatcaagaacggccgcctcgccatgttctccatgttcggcttcttcgtgcaggctatcgtcaccggcaagggccccctcgagaacctcgccgaccacatcgccgaccccgtcaacaacaacgcctgggcttacgccaccaacttcgtccccggcaagtgagcgagggcatgatgcttgcatgcgtgtaccgtagacgtacgtattcctacgtactgcaggttgcaccagtatttgtgaagggagctttgggagccagagattgtaccgctagtgtatttgtatgcatgctgtggagctgaacaataaaatatgctgtaaatat

SEQ ID NO: 53 - DNA, 728 bp, Zea mays
  Clone ID: 700043830_FLI
gagaaggcaaggcttgcattttgcaagttcatggtgactccatctactctactcatcttggatgaaccgacaaaccatcttgatatcccatcaaaagaaatgcttgaggaggcaatatcagaatatacaggcaccgtcataacagtttctcatgaccggtacttcataaaacaaattgtcaacagagtcatcgaagtgaaagatcagactatccaagactatcaaggagattacaattactaccttgagaggaaccttgaagcccgagaaagggaacttgcccgcgaggaagagctcgaggagagagcccccaaagtaaaagccaagtccaagatgtcgaaggcagagaaagccgtcaggaagaagcagaagatgcaggccttccagcagagcaagcagaaatccaagtcgcttaagaactcgaagcggtggaactgagatttttcgtcgttcgtagaggcggcgttggcgttcgtcacaatgccgaatgccatctgagacaccttgcaatgcagataccagtgtttgctactctgcctgctgtgccgtatgctataatagtcgccatatcagcagaagcactgcaaatacatcatcagaaagtagccctagtagcaatgaatgtagaagatcgaaaaaaaatactgtaactataagcaggaagcgttatgtgaccttgtacataatacatgcactttcggatggaggaacggcttattttttggatg

SEQ ID NO: 54 - DNA, 600 bp, Zea mays
  Clone ID: 700043901_FLI
gcgggcttctgcactcctgctgccactgcagctgcccatgccgccctaacccctctgacgagctcaaggaagcacatcgccatgtgcctgtcccccaggccaagcggcggcggcggcatcggcggcggccagagggcgcggcttgcgagtacaggcgcagctcctcaggttcgcgcgctggcgccgacgaccgcggcagaagaagcagcgggtccctcccccgcccctctcaacgtggagtacctggccgctgagttcgccggccacggcgtcagcttcgagcccgtgggcgtcagctgcgccgtcaagatgtcgctgcgcaacggcagcgtggcgcacgtgctgctccccagcgggctcgtcacgtcttacaagcccgccatgtggcacggcacggtcacggaggttctccacacgaacgtcgccgaggtcccaggcgggcgggccgtcatccgcggcggcgtgttcgtggacctccgttgcgatggctgcgacggcgtatggtcgccgagcgcgagcggggcgtggtcgctccgcgacgtccggggaagcccagccacctccatagaggtcgagctcgcgtcagcggcgccggggaac

SEQ ID NO: 55 - DNA, 591 bp, Zea mays
  Clone ID: 700043939_FLI
ggcctccctctcctctgccgccgtcaccgccccttccttcgccgcacccgcaccagcccgcgccgtggtcagaaggaggtccttcaccgtgcgcgcctctctccgcaaggccaccggcaccgccgccgtggcaatggctgccagcgccctgcttgccggcggtgccatggcccaggaggtgctgctgggcgcaggcgacggcgggctcgtcttcgagcccagccagttcaccgtcaaggccggcgacaccatcacattcaagaacaacgccggcttcccgcacaacgtcgtcttcgacgaagacgaggtgccgagcggcgtcgacgccaccaagatctcgcaggaggagtacctcaacgcgccaggcgagacctactccgtcaccctcaccgtgccgggaacctacggcttctactgcgagccgcatcaaggagccggaatggtcggcaagatcaccgtcaactaattaagctagctatcgatcgatatccattcatgtattagctgttgcttcctgctttgtactccgccgatctgtccatctctacatgttttcgtcttcacacaacaacctctgctacgactacgtat

SEQ ID NO: 56 - DNA, 1011 bp, Zea mays
  Clone ID: 700043941_FLI
cacgcatactgcatacacaacgcagagcatcagaagcagctgcgatctgatcgacatggctgccgccaccatggctatcacctcccgcgcgctcgtcggcaagccggcggctggcacgagggacgtcttcggcgagggccgcatcaccatgcgcaagaccgccgccaagcccaagccggcggcgtccggcagcccatggtacggtgccgaccgcgtcctgtacctgggcccgctgtccggctcgcccccgagctacctgacaggcgagttccccggcgactacgggtgggacaccgcggggctgtcggcggacccggagaccttcgccaagaaccgcgagctggaggtgatccactgccgctgggccatgctcggcgcgctcgggtgcgtgttcccggagctgctcgcccgcaacggcgtcaagttcggcgaggcggtgtggttcaaggcgggctcccagatcttcagcgagggcgggctcgactacctcggcaacccgagcctggtccacgcgcagagcatcctggccatctgggcgtgccaggtggtgctcatgggcgccgtcgaggggtaccgcgtcgccggcgggccgctcggagaggtggtcgacccgctgtaccctggcggcagcttcgacccgctcgggctcgccgacgacccggaggcgttcgccgagctcaaggtgaaggagatcaagaacggccgcctcgccatgttctccatgttcggcttcttcgtgcaggctatcgtcaccggcaagggccccctcgagaacctcgccgaccacatcgccgaccccgtcaacaacaacgcctgggcttacgccaccaacttcgtccccggcaagtgagcgagggcatgatgcttgcatgcgtgtaccgtagacgtacgtattcctacgtactgcaggttgcaccagtatttgtgaagggagctttgggagccagagattgtaccgctagtgtatttgtatgcatgctgtggagctgaacaataaaatatgctgtaaat

SEQ ID NO: 57 - DNA, 1056 bp, Zea mays
  Clone ID: 700044109_FLI
cgcaactggtatgcctggtctaggtccactacaaaaagtttgtgcggcattgcgggtactagcatatgggttaccttcagatgctgtagacgagtacattcaaataggggagtccacagctagggaatgccttcatcatttctgtcgaggtatcattgcatacttcagtggatggtacctacgaactcctaacgaagctgacataacacgcatcatgcaccatagcgaatcaaggggtttcccagggatgttgggttctatagattgcatgcattgggagtggcggaactgtcctaccgcatggcgtggtcagttttgtggcagaaatggtcgagcgtcaatgatcctagaagcagtggcaacgtatgacctttggatttggcatgctttctttggcatgcccgggacaaacaacgacgtgaacgtgctccaccgatcaccagtattcgaccccatgacatctggccgaatgccacctgtgcattacacagttaatggtaatgcatataacttcggatattaccttgctgatggtatttacccgaactggccaactttcgtaaaagctataaggcacccctatgagcaaaagaaagtctatttcacacaaatgcaggaaagttgtcgaaaggatattgagcgtgcatttggagttcttcaagctaggtgggcggtgctgcgaggtccagcatatggatgggatcggaatcgtttaactgaaattataactgcttgcatcataatgcacaacatgattgttgaagacgaaggggcatttgcagctaatactgattttggagataacacttcaacgagccaaccaccacatctaattgctgaaggaagggcagaatgggtgattaaccacttggatcttcgtagccaagaaagatcttgctccctccaaaatgaccttgtcgagcatttgtgggctcggcgtggtagcatgtaaactttagcattcgtatgcacaagtttattgaaactagattgtagtatgtgtaatttccattcgcaagtcgtacgtatttcagaaataaagaagtttttcagtgc

SEQ ID NO: 58 - DNA, 726 bp, Zea mays
  Clone ID: 700044242_FLI
agtttctgcagcagaacaaattttcagtgctggtggaaagaggttaagaccagcattagtttttctggtatcgagagcaactgctgaattagctgctttgccggagctaactacagaacatcggcgcttggctgagatcatagagatgattcatactgcaagtctaatacatgatgatgtcatagacgatagcgggatgcgaagagggaaagaaacaatccaccagctgtacggcacacgggtggctgtgctcgctggcgattttatgttcgcgcagtcttcttggttcctagcaaacctagaaaacattgaagtcatcaagctcatcagccaggtaattaaggatttcgcgagcggcgagataaagcaagcgtcgacgcttttcgactgcgacgtgaccctggacgactatctgctgaagagctactacaagacggcctccctgatcgcggcgagcacgaggtccgccgccatcttcagcggcgtgggcagcggcgtgtgcgagcagatgtacgagtacgggcggaacctgggtctggcattccaggtggtggacgacatcctggacctgacgcagtcggcggagcagctcgggaagccggcggcggggagcgaccttgccaagggcaacctgacggcgcccgtgatcctggcgctgcgggaggagccccggctgcggggcatcatcgagtccgagttctgcgagcccgggtccctggcggccgc

SEQ ID NO: 59 - DNA, 1041 bp, Zea mays
  Clone ID: 700044275_FLI
tagccggggcggtcgccccaccttgccgatacgaggtgtccgctcctatttcattcggtccattccgcctctcggaagagttgagagaggagtaaggaaggcgaggacctcgcgccccgcgatgggcggcgacctgtacgccctcgacttcgacggcgtcttgtgcgacagctgcggggagagctccctctcagccatcaaggctgcgaaggtgaggtggccgtcgctgtttgagcaggttgacgccgccatggaggagtggatagtggagcagatgtacacccttcgtccagtggtggaaacaggatatgaaaacttattgcttgtaaggttgcttgttgagatccagatacactctgttcgaaaatcatcagttgcagatgggcttagcatccaagaaatattggagaactggtcaaaactgaagcccactctcatggatgagtggcaagaagatagggaatctcttgtagatctctttggccgtgtaagagatgactggattgaaaatgatttttcgggctggataggtgctaacaggttttatcctggaacagctgatgcattgaagctttcaagctccgaagcatacatagtcacaacaaaacagagtagatttgctgaagcgctactcaaagaattggctggaatagactttccctctgaaaggatatatggccttggcactggtccgaaggttaaagttctccagcagctgcagcaaatgctgcagcaccaaggcctaaaacttcatttcatcgaggaccgactagcgactctgaagaatgtgatcaaagaaccagcactggacaattggaacctctacctggtgaaatggggatacaacacacagaaagagagggaagaaacagaggctataccaaggatccaactcattgatctaccagatttcagtaggcagctcaaataactaccaatggcgtcgacttgtgaatcttggaaactttgtttttgtttggtatacgtaactaatgaacagcagaaatacttgatttttcgattggatatcgttgttcacat

SEQ ID NO: 60 - DNA, 784 bp, Zea mays
  Clone ID: 700044356_FLI
gccatctcccctgttcggttttaggagacctgcgccgctcctccggccacgcgagcacgccgaaatggtcgcccacaggttccatcagtaccaggtggtgggtcgcgcgctgccgaccccgaccgatgagcaccccaagatctaccgcatgaagctctgggccactaacgaggttcgcgccaagtcgaagttctggtacttcctgagaaagctgaagaaggtgaagaagagcaatggccagatgctcgccatcaacgagatcttcgagcgcaaccctaccaccatcaagaactacggcatctggctgcggtaccagagcaggacggggtaccacaacatgtacaaggagtaccgcgacacgaccctgaacggcgccgtggagcagatgtacaacgagatggcctcgcgccaccgcgtgaggtccccctgcatccagatcatcaagactgcgacggtccacttcaagctgtgcaagagggacaacacgaagcagttccacaactcggcgatcaagttcccgctcgtgtaccgcaaggtgaggccgcccaccaggaagctcaggaccaccttcaaggcgtccaggcccaacctgttcatgtgatgggcctcggcgggcgggctgtcgcgcacctctgttttgtgtcttagtgtccagagagataaaggtttttgcctctgcaagatttgctgccccgtggactgagcaattcgatgattttttggatgatgtattgcaaacccttgacttttgtcctactagttatgagcaggctgctctttactt

SEQ ID NO: 61 - DNA, 790 bp, Zea mays
  Clone ID: 700044369_FLI
ccatgtttaccactgggaccttggaacaaggaaatgcatccacaaggcaacagatgacggttccctggctggcctctcgctctgcacctcgcgggatagctctttgtttgccacaggctccagcagcggcatcgtgaatgtgtacaagagggacgattttctcggcgggaagaggaagccgatgaagactatcgagaacctgaccactgatatcggtgagatgaagttcaaccatgacgcccagatcctggcgatcagctcgaggaaagagaggaacggcatgaggctcgtgcacgtcccgtcgttcagcgtgttccagaactggccggggcctcggtttagtctccactatccacggtgcctggatttcagccccggcagcggcttcctgtccgtcggacatgcaggtggaaaggtcctgctgtacaagctccaccattacgagaatgcatgatgagactaggatggttgcttggcgaaaacccatttttgacattatatttgtactcatgaatactccattaatcgagtgagtgtatgctggtccgttccagtcattgtgcctttctatttggtgccgctggtgtcaatgctttggtgcaagctggcgatctcttacatgtcttttactcttttgtagtcgtacgcaagtcgttgtgctgctgtttgctttattatagtggtggactaagttggttgcagaagtttagtttttttttggcaagagattgcagaatcactgttgtcaactgtgcttaaaattggacttgattgcatagctcttacacct

SEQ ID NO: 62 - DNA, 1635 bp, Zea mays
  Clone ID: 700044506_FLI
agttgctggcagccatctctcgcggtcgcggcctcgcgggcaacctcctgtcttctccccatcggatccagtgctgcggatccgcatttccgcaaggtagtcaatggcggcttccccggcggaggcgggggcacaggcgctgcccgaggcgacggaggcgaaggagaagggcaagcggggcggggtgctgaggagggtgtggcgggcgctcttcggtggccgcgaggacttcgagaagcggctgcagtacctatccaaggaggaggccgccgtgcacgcgcggatgcgccggcggacgcagttctcgcgccgcaccgtgcgaaacctcatcgtactctccgtcctcgccgaggtgttagctgttgtttatgccatcatgatgacaagaaatgaggatctaacttggcaaatgagggcaatacgggtgctacctatgttcgttcttcctgttgtatcctctgtcatatattcaacagttgttaacttcacaagaatgcttgagcggaaagatcagaagacccttgaaaaattgagggctgagagaaaagccaagattgatgagcttaaagagagaacaaactattatcttacccaacagcttattcagaaatatgatcttgatcctgccgcaaaggctgcagcagcttcagttttggcatctaagcttggggaggacactggcttaaaagttcatgttggagaagaaccaaagctggatgctgcagtggctagaagcaatgatgttgagatagtaccatcagatggtttgagaaacaggaaacaacccaatgcaagaggaagcaggaccgggagccctactgctgataccccagcacggggaactgaatccagtctaactgctggtgcagacctggaaactgctccagctcctttggtggtagaacatcatcaaggcttaggggctagtgatggtggtggatggattgcaaagattgctgccttacttgtggcagaggacccatcacagtcatatgctttgatatgtggcaactgccatatgcataatggcttggcccgaaaggaagattatccgcatgttacctactactgcccacattgtcatgcattaaacacatcaaagcagtccatgtggcaatactcgggctccaactcagggcggtcatcccctgttgttctggatgatggtctatccacttccagttcagtacaagagactgaattgagtaacctgacacacactgcaggagctacctgaggaaggaaatgcagagaagcaagaaaaggcaagttgatggttcacagaacttctattgatgtgtgtggaactacttaatctttagacgtatatcgtcatgtgttctggtggagccacagatttagcactgttgtaaattggaaatagtgactgatatgatccctcagatacttagcacacacccaaaagaagaaactagccatggtgacatccttgagtggatgattttttgttgtcaatagagcgcgaagacttcctgctgcatgacaagagtcacaagatggtgctgaaaagctatatatgataaatgaggcaatctaacaggtcagatgtgtaacgttcatacaagatggtgtaggatataacataatatcattgcttcgttttctatttctatc

SEQ ID NO: 63 - DNA, 1070 bp, Zea mays
  Clone ID: 700044540_FLI
ttgaggcaggcagcagagtgcgctgaacaccggcatggacaccatcgtctctctctcgcctcagatgcttcgccagcgccagggccaccagtctactgcatcatcatcatcatcagcttgggctattaccacagctaggatcggtcgccacctgtctactgcatcatcctgttccagcccgcggctgctcatcaagcagagggcgacggcggcatcggcaccggcaccggcaccggcacagaaagagaaagaggtcgtcttcgtggctggcgccaccggcagagttgggtcccgggccgtaagggagctcatgaagcttggcttccgtgtgcgcgctgccgtcaggaacgcacagagggccacgtcgctggtgcagaaagagaaagagcagcagctgcttgagcttgtggagtgtgacctggagaaggagccgcaggaaggcatcgtttcagccatcggcaatgcttccttggtggtgtgctccatcggtgcaagcgagaaggagatcctggatgtcaccggcccataccgcatcgactacatggccaccagcaaacttgtacaagctgcgactgctgccaagcagcttgttctggggagttctgttctggaaaagacgagctgaagaagcactcatcgcaagcggcattccctacacgatcataaggcccggaggcatggagaggccgacggatgcttacaaggagacgcacaacctggtgttggcaccggaggacacctacgtgggtggccaggtatccaacctgcaggtggcggagctcatcggatgcatggccaccaacaggagcgcggcctactgcaagacggtggaagcggtggccgagatcaccgcgccgttgctgcccatggagcagctcctctccgcaattccctccaagagggaacaacgccctgcagatcgatgagctagacggcctcaaagcattgcatatgcttctaggttttgttttgtatgcaatgttgtgatatcagagagatatctaagtttttatattttatatgatgacgatgagaactaagtacaagtgcttttattttttattattcct

SEQ ID NO: 64 - DNA, 620 bp, Zea mays
  Clone ID: 700044561_FLI
gaaagttgcacggaacggtgaatggggtgacatgtgacgctgcaggctgctgctgacaagtatggagtaaaaatcttcgtgatgacatcgttcaaggatacttgctacatcgagatcctgcctaaggttcagaagtccaacaaagtgatactgttgagcttctgggcggaggtgcactacaactccatacatccgcagaacgatgctccgaggtcgcagacgaccaagaggagaagatggtggccgttctcgcagcaccaccaccattgatggcgggttcagctctcttggggctggatggatgttcaggatcaggtggtggtcccggtcccggccatcgtccagatgatactacaagggacgtacgacattatgattaatatatatatacccagagcggagcagaaagacctgataagggaattagttgggatgaatgaaatggaataaacatgggatgggatgggaatcgtcgtcccgtatatagtttagagtggaggccggtgagcgccaactcaaactctttgtattgttgtttatatctacaaattttgccggaacgaggctagaattattggggaacaattatggtaataataaatcggttaagaattgagatg

SEQ ID NO: 65 - DNA, 1025 bp, Zea mays
  Clone ID: 700044864_FLI
ctccggcgtgcggtcgagaggtggaacggcgagaggagcgtcaggttctgcatcaacttcggcgacatcgtagacggcttctgccccaaggacaggtcgctggccgccgtgcaggccgtggtgcgcgagttcgacggcttccgcggcgggccgacgtaccacatgctcggcaaccactgcctttacaacctaccccggagcgagctggtctccgtgctgcgcatgccgtcggcgtcgccgggacgcgcttactacgacttctcgccatggcccgggtaccgttttgtggtgctggacgcgtacgatttcagcgccgtggggtggccgcgcggccaccctgtgtccgcggcggcgcggcggtttctggagaagcggaacccgaaccatgacaagaacagcccgagcgggctggaggggacggaccggcggttcgtgatgttcaacggcggcgtgggcgaggcgcagctgcggtggctggacggcgtcctccgccgcgctgagcggcgcggggagaaggccgtcgtgtgcagccacctgcctatgcaccccggtgccgcgtccccgacgggtctcatgtggaactacgaggaggtgatggacgtcgtgcgccgccatggtggctgcgtcgtcgcgtgcctcgccgggcacgtccacaagggcgggtacgccgtggacgacagcggcgtgcaccaccgcacgctggaggccgcgctcgagtgcccgccgggcaccgatgcgtttggacacgtcgaggtgcacccggaccggctgaggctcgttggatcggacagaatggccagcacggagatgctgctcagcccctcgaatgagctagcttctgcgtagaacctgcatttgccgcatctgcttgtaccgacactgttgctctactgctgccatagtcgttggcagttgtttcttgtagttgtagtagttgtagcgaaggctaacgacgaaatcaatggataccaacgaacgtaaccgtcgtccaaaataatttgcctacttttttaaggcagcctatc

SEQ ID NO: 66 - DNA, 451 bp, Zea mays
  Clone ID: 700044865_FLI
tcgtgtcgacggtgaccggcccgccggggccaagcccgatagccctgatgccgcggctggccgacctgcccgtgctggtgctgtggggtgaccgggaccccttcaccccgatcgacgggcccgtggggaagttcttctcgaagctgccgtcggagctcccgaacgtgacgctctacatgctggagggcgtggggcactgcccgcacgacgaccggccggacctcgtccacgacaggctgctgccgtggcttgaagcgctcctgccgcccgccgccggcgcggtgactacgacgacgacgacggttgtctaaggctaataataatacgccttattgctgactggatctttgaagtctagttggactcttcatttttaactctctagttatctctttataaaaaataaattctataaatgttatagattttgtttagaaccaactcagttttt

SEQ ID NO: 67 - DNA, 884 bp, Zea mays
  Clone ID: 700044891_FLI
gcgagatcaatgccaaccagtggtgctcttgatcgtgttgccgagaaattgaatgttccattctttgaggttccaacaggctggaaattttttggcaacctaatggatgcaggaaaattgtctatttgtggagaggaaagttttgggactggatctgatcacatcagagagaaggatggcatctgggctgttctggcttggctttccatacttgcacaccggaacaaggataagaaggtcggagagagattagtgtcagttgaagatattgctatggagcactggaaaacctacggcaggaatttcttttctagatacgattatgaggcgtgtgaatcaaacagtgcaaaccagatgatggatcaccttagagatgttattgcaaatagcaagcctggagagaaatacggagattacaccctccaatttgctgatgatttcagctatactgatcctgtagacggtagtacggtatcaaaacaaggacttcgatttgttttcactgatgggtctaggattatcttccggctttcgggaaccggatctgctggagctactatccgcctctacatagaacaatttgaatctgatatctcgaagcatagtctcgatgctcaaacagctttgaagcctttaatagacctggctttgtctgtttcgaagctcaaggacttcacaggaagagagaaacctactgtcataacataatatttagatgttgtcctcggccataccaaccgagcagcatgggccaagaattgaactaatggcaaatatgtatcattaggacaaattccgccagaataagttgtttctcggaagtgttttgagcacctccagcatcttccaaatatatctccaataagatattagtgggataacat

SEQ ID NO: 68 - DNA, 1046 bp, Zea mays
  Clone ID: 700044892_FLI
aatctagaagcgcccctctccctctctctctctctcttcgccgtccgaagctccgcaccccaatctaatcgacacctcgccgagatgggccgcaagttcttcgtcggtggcaactggaaatgcaatggaaccacagatcaggtcgagaagattgtcaaaaccctgaatgaaggacaggttcccccttcagatgttgtggaggtcgttgtcagccctccttatgtcttccttcctgtggtcaagagccagctgcgccaagagttccatgttgcggctcagaactgctgggttaagaagggaggtgctttcaccggtgaagtcagtgctgagatgctcgtcaaccttggtgttccctgggtcattcttggacactctgaaaggagagctctgctgggagaatcaaatgaatttgttggagacaaggttgcgtatgccctgtctcagggactaaaggtcattgcatgtgttggtgagacacttgagcagagggaggctgggtctaccatggaggttgttgctgcacaaacaaaagcaattgctgagaagatcaaggactggagcaacgtagttgttgcctatgaaccagtttgggctattggaactggtaaagttgccaccccagctcaggctcaggaagtgcacgcctccctgagggattggctaaagaccaacgtcagccctgaggttgctgaatctactaggatcatttacggaggctctgtaactgccgcgaactgcaaagagctagcagcacagcctgatgtcgatgggtttcttgtcggtggagcttctttgaagcctgagttcatcgacatcatcaacgcggccaccgtgaagtccgcttaagatgttacgctgaagacgaacatacttttttttgctcaactgtgctatgtaagctagtagcttttgcgcaggagcagagactgttttgcctgcccccaacttttagcttgagcttgctaataatgtttacctctggacgtatcaataatggtgcttatgtaccccttttttgtgccgaattacggtggatccgtcatctg

SEQ ID NO: 69 - DNA, 768 bp, Zea mays
  Clone ID: 700044912_FLI
gttcgtccaccagagacaacaatggccatggagacgtgcttcagagcgtgggcgctgcacgcccccgctggcagcaaggacaggctcctcgtcggcaacctggtgctgccgtcgaagcgggcgctcgcgccgctgtccgtgggccgcgtcgccacgcgccggccgcggcacgtctgccagtccaagaacgcagtggacgaaggtaataattggatacacagttgctagctgccaatatatatgtatatatgaagtgaactgactgacgatgaccctcggcgatatatgcttgtcggggcagttgtggtggcggacgagaagaactgggacgggttggtgatggcgtgcgagacgccggtgctggtggagttctgggcgccgtggtgcgggccgtgccggatgatcgcgccggtgatcgacgagctggccaaggactacgccggcaagatcacgtgctgcaaggtgaacacggacgacagccccaacgtggcgtctacctacggcatccgcagcatccccaccgtgctcatcttcaagggcggcgagaagaaggagagcgtcatcggcgccgtcccgaagtccacgctcaccaccctcatcgacaagtacatcggtagttcatgagcatgccatgccatgccatgcatacatgcatcgacgactaaacacatatgtgtatctctagtagcctttgcatacgggatatgatcaattcaagcagccagccgtctgctactgctgtgttatatataccatacctccatgtcg

SEQ ID NO: 70 - DNA, 566 bp, Zea mays
  Clone ID: 700044936_FLI
ctcgtctctctcacgagccacagcccacaggctagctctctagcggtctagccagtccacgcagcgcagggatggcgtcgttcgccgtggcaacggccccgtcgctagcggccccggcagccaagaggaggcccgccgccggcgtcacgtacgtggagggcatgaacgcctacagcggcctcaaggggctcaacaaggtgaccatgctcggggtgcgcaagaccgccgactactccttcgccaaggtcgtggcgtcgctcagccccgcgggcaggaagcggcgcggcggggcgttcggcgcccagatgaacgccgccgccgagatcttcaggatcgccgccaccatgagcggcctcgtgctcgtcggcgtcgccgtcggcttcgtgctgctccgggtggaggccgccgtcgaggaggccgagtagggcgctcgcgcctgcttcataagccgtgatatatatataaaaacgtgatgtatgctttcgattcaatctttggtatgtactgtatcaacgatgacaattgatgaatactgtggaaaacatgttttcagagccgaggtcgtc

SEQ ID NO: 71 - DNA, 866 bp, Zea mays
  Clone ID: 700044985_FLI
ggtttgaggacaggaatctttgaagcaagcaagcttgtattaattaatgtcgctccaacacttccagagattcaagtgcaatcaattgcatccttctgcagcacagtcttagggactgcagtccgtatcccttgtgaggttcttaagcagcgattgcaggctggaatattcgacaatgtaggggaggcgattgttggcaccatgcgacgagatggcccaaagggattttttcgtggcactggggccacactgtgtcgcgaggttcctttctatgttgctggaatgtgcctctatgcagaagctaagaaggcagcacagcatgttttgaggagagacttggaagcatgggaagtagtggcagttggagcattgtctggaggacttgcggcaatagtgaccactccctttgacgtgatgaagactaggatgatgactgcccctccaggcacaccagtgtctatgcagatgataatcttgtccatccttggaaacgagggtccacttgggctctttaagggcgcgatcccccgcttcttctggattgctcctcttggagcaatgaactttgcaggctatgagcttgccaagaaggcaatgataaaagatgagaaaaattccagtgagtcaacacgagagatcttgccaagaaagcagtgatcaaccatgcaacttttttattttatttttgggtccatgttgcagagaagcaacagaacatctgcctttttttgatattgggaattacattcccgtagggccttgagatggctgtatagtatacattacatgagaaaagtgctagaggacagaggcacatgctggagctgttgttcttttgctggataggacagctcacttgttttgtt

SEQ ID NO: 72 - DNA, 1718 bp, Zea mays
  Clone ID: 700045010_FLI
gaagatgtgtacaggggaagtgacaagggcatactggctgacgtcgagcttctgaggcagatcactgaggcttcgcgcggcgccatcaccgccttcgttgagaagaccacaaacagcaaagggcaagtcgtcaatgttaccaacaacctcagcaagatacttggtttcggtctgtcggaaccatgggtgcagtacctgtccacgaccaagttcgtcagagcggacagagagaagatgagggttctgtttgggttcttgggggagtgcctgaggctcgtcgtgcaagacaacgagctgggaagcttgaagcttgccctcgagggaagctacgtcgagcctggccctggcggcgacccgatccgtaacccgaaggtgctcccgacagggaagaacatccacgctctcgatccgcaggccatcccaaccacggctgccttgaagagcgccaagatcgtcgtggaccgtctcctggagaggcagaaggctgacaatggcggcaagtaccctgagacggtcgcacttgtcctgtggggcaccgacaacatcaagacctatggtgagtcgctagcccaggtgctgtggatgattggagttcggccagttgccgacaccttcggccgtgtcaaccgtgtggagcctgtcagccttgaggagcttggacgcccgaggatcgatgtcgtcgtcaattgctcgggtgttttcagagatcttttcatcaaccagatgaacctgctggacagggcagtgaagatggtggccgaactggacgagccagcagagatgaactacgtgcgcaagcacgcccaggagcaggcggaggagctcggcgtgtcgctaagggaggcggcgacaagggtgttctcgaacgcatcaggctcctactcgtccaacgtgaacctggcggtggagaacgcgtcatggaccgacgagaagcagctccaggacatgtacctgagccgcaagtccttcgcgttcgacagcgacgccccaggggcaggcatgaaggagaagcgcaaggcgttcgagctcgccctggcgacggcggacgccacgttccagaacctcgactcgtcggagatctcgctgacggacgtgagccactacttcgactcggacccgaccaagctcgtgcaggggctgcgcaaggacgggcgggcgccgtcctcgtacatagccgacaccaccacggcgaacgcccaggtgaggacgctgtcggagacggtgcgcctcgacgcgaggaccaagctgctgaaccccaagtggtacgaggggatgatgaagagcgggtacgagggggtcagggagatcgagaagcggctcaccaacaccgtcgggtggagcgccacgtctgggcaggtcgacaactgggtctacgaggaggccaactccacgttcatcgaggacgaggcgatgaggaagaggctcatggacaccaaccccaattcgttcaggaagttggtgcagaccttcctggaagccagtggcagaggctactgggagacaacggaggagaacctggacaggctcagggagctctattcggaggttgaagacaagattgaggggattgacaggtaaattgatttgccagatcggtcggccgatcggttccagcattcaacccataacgaggttggaactcttctgcctcattgggactcttgtacaatgtctgggtgtgtgatttatatatatatatatatatataaagttgtaac

SEQ ID NO: 73 - DNA, 526 bp, Zea mays
  Clone ID: 700045104_FLI
cagcaatccacacaagcacttcgacgtcacacgggcgctgcgcacagacacaccaagcgtcggcaccaatggcttactaccaggaggtggactactgctcggaggaggtgaggtcggtggccccggccggcttcggccgccacggcggcggcgtccagcagcacgtcgtcaaggagaagttcgaggaggtcgacacggtctcacgcgccggcgccaaccaccaccaccaccatggtcaccacggcggccacggcttcgtggtgcgcgagaccagggtcgaagaggacatcaacacctgcaccggcgaggtccacgagcgcagggagagcttcctcgccagggctaactgagccgcccggcggccggcatccacgcccgttcgtgcttgcctgcgtgccttatgtatgtctgtggttgactggttgtgcagggtcatcgtacttggctatcgtacgtgcacgcactcagctcctgtacgaattacgacaataagctcgtgacctgaataaaacttcttcgtaatact

SEQ ID NO: 74 - DNA, 375 bp, Zea mays
  Clone ID: 700045148_FLI
caagagtggcctcaatggcattcaggttgaactccaggccacagatgcgagtgaaatcagcctcgatgagatcaaggatcgggcacgctaggcgcaccgccatcgcgagtttcatggtcacgcatcatggactcgcctactactgtggatttgtacgccattatagacttggtgctgcgaaagactgctttggtgatttgtgggtttgttgctgtgtaaaaagatcctcatggcttccagaagaccatgaaggtttggatctatcatgtaattccttgttatctgccaattatgtatggactatggacatgtgttgcgctgttcaactcactacaaataagtaatcgatatattccctacccatgaatcggtgac

SEQ ID NO: 75 - DNA, 551 bp, Zea mays
  Clone ID: 700045156_FLI
cgaccccatcatccagacgctgctccccatgtcgcccaagggcgagatctgcgacgtcaacggcgtctgcgtggacgccaccgaggacgagctcttccgcctcaccaccaaggaggggaagctcaccgtggagcgcgagaaggtgaagatcgagacgcagcccttctcccccgtggtgcagttcgagcaggaccccgtgcagatcctggacgcgctgctcccgctctacctcaacagccagatcctccgtgccctgcaggagtcgctcgccagcgagctcgccgcccggatgagcgccatgagcagcgccaccgacaacgccatcgagctccgcaagaacctctccatcgcctacaaccgacagcgccaggccaagatcaccggggagatcctcgagatcgtcgccggtgccgacgccctcgctggctgagcctgagtccccttggtggtgcggtgctcctgctatatataattctttttcctcattttctccactctgcctgtaattcctgataatagcacaaacgcaacggagttctgtgttccttgcg

SEQ ID NO: 76 - DNA, 509 bp, Zea mays
  Clone ID: 700045162_FLI
gcagctgctggagacggaccccgtcctgaacaaggtggggagcaagggcaaggccgccgccgccccggcgcccaagaaagccgctgaagagggcggcaacggcgggctcagcctcggcgggttcttctccaggcccaagaaagggtgaacgtacgtacgttatgtagctccgactccgagtgaggatcgttttgcgctgctcttgctttcttgtacgtaatccttggattggattggaatggacggctcgcatgttgtatatatatatggcacaaacgagagcagagcagagcaccagcgtataactaattccttcctttcagttgatctcgccctgtgttctgttctgcaacaagcacacaccccagccagcatcagtggttcgctgctggctgttgatcatcatcatcatcactagtaaatgtagcagttgtgtgtctctgtactgaagctcgtgtagcaccatggctcttggatgagagcttattattgtacttgctcttaccagc

SEQ ID NO: 77 - DNA, 1707 bp, Zea mays
  Clone ID: 700045215_FLI
caggccctctccgatactcttccttcctcggtccaccttttttttcccggccctctatctccttagctgccaagaacacgctgttcgatcgtctcgtgctagcgtggtagtctggaagcgtctctttttttttcttcttcctgttcgatccagttctacccgtccaatccaatccaagctcctcccttcaccccaaagggacgagagagagagagagaggtcctctatggccgggcctgctgtccaccctcgtcacggcagccggccggcgctctgaactcccgagccggctctccatcagccacgtcgcgcgccgcccaggagaaggagctctttaatctgtgctagcagcggtcccagagaatgcggcagatctcgtcgctgctgcagggcctggcccggtcactctcggtggggagggacagggacagggacagggaccggaaagggaacggcgcaggcgaccgcaagaccgccgtgccggcggtgctgcggacgtcgggcaccctgtggggcgacggctcggacacgttcgccgccgtctgctcgcggcgcggcgagaaaggcatcaaccaggactgctccatcgtctgggagggattcgggtgccaggagggcaccatcttctgcggcatcttcgacggccacggccagtggggccactacgtggccaaggcggtgcgcgactcgctgccgccgtcgctgctgtgccactggcaggaggcgctcgctctcgcgtcactcatcgacgacggcgagaagaagctcggcgactgccagttcgatctctggaaacggtcctacgtggccgcatgcgccgccgtggacgatgagctgcggcgcagccgccgcttggacgcggtccaaagtggctgcaccgcgctatccatcgtcaagcagggggacctcatgatcgtcgccaacgtcggcgactcccgggccgtgctgggcaccacgtccggcgatggcaccatcgtggccgtccagctcaccgtcgatctgaagcccaacctgccacaggagaaggagcgcatccggcggtgcaacggccaggtgtactgtctcgctgatgagcccggggtacaccgcgtgtggcagcccagccgagagtcgccggggctcgccatgtcgcgcgcgttcggcgactactgcgtcaaggactgtggcgtcatctccgcgccggaggtgacgcagaggaggatcggcagtagtgaccagttcgtcatactcgccaccgatggggtgtgggacgtgctctccaacgacgaggcggtacatatcgtggcggggacgccggaccgggcgaaggcggccaagcggctggtggagtgcgccgttcgcgcgtggaggcgcaagcggcgcgacatcgccgtcgacgactgctcggcgatctgtctcttcttccacccgccgccgccgccgtagacacgaaaacctgtaacgtgccgaagtccacgccaaggaggagggggcaacgaaatgcacatctcaagacagactacgattattgtgcccgtggcgttcgtagagtgcactgccgccgtccaccgttcagaacgtgcagtttgtcgcgtgagagcgacactccacgattaggaactgcagccggtgcacggccaaacaaaaagatctccggctttcacacgttgccagtcaagatgtacgagaacatcagagaaaaaggtgggaaagacgcattttgtcctc

SEQ ID NO: 78 - DNA, 2239 bp, Zea mays
  Clone ID: 700045236_FLI
caccacggcaccaccgagcagcacagcacagggcactgcccgattccacccctgcagcctctcgctgcccactttccatgtcactgcaccactgccgcgctgccacgacgcccgccatgcccgccaccggcctctcgtccgcgggcgcttccccgttccgcctgcccgcctccagctcctccgcccagggccacctccgtctctccccccctgctgccactgccagtgccaccgcctgccgccgccgcttgcttctccgctgcgccgcctcttctggcggtggcggcggcagcggctccgacccggtcctagaggagcagcggcgccgccaggccgagctcgccgcgcgcattgcgtccggcgagttcaccgtgcaaggccccgggtggattgcgcctctcgtggggaggctctccaagctgggcccgccgggggagctcgccgccgcgctgctcaccagggtagcgggcgctggcggcccggagatcccgcaggcagtggggtcgatcaacgcggtcgtgggccaggccttcttcgtgcccctgtacgacctcttcctcacctacggcggcatctttcgcctcaactttggccctaagtcgtttcttattgtctccgatccggctatcgctaagcacatcctgagggagaactccaaagcttattccaagggaattcttgctgagatattggagtttgtgatgggtacaggtttgatcccagctgatggggagatttggcgtgttcggaggcgcgctatcgtccctgcactgcatcagaagtatgtgactgcgatgattggtctctttggggaagcttcacaacggctctgcgagaaattggacaaggcagcagtggatggggaggacatggagatggagtcgctgttctctcgactcacgctggatgtcatcgggaaggcggtgttcaattatgattttgactcattatcttacgataacgggatagtcgaggcagtgtatgtaacactaagggaagcagagatgcgtagcacttctcctataccaacatgggaaatacccatttggaaggacatttccccacggcagaagaaggtcaacgaagctctcaagttgataaatagtactctcgatgaactaattgccatctgcaagagacttgtagagcaagaagatcttcagtttcatgaggaatacatgaacgagcaagacccaagtattcttcacttccttttggcatctggagatgatgtctccagcaagcaactccgtgatgatttgatgaccatgctcattgctggtcatgagacttcagcagctgtcttgacatggacattttatcttctatctaagtatccaaaagtaatggccaagctccaagatgaggctgatagtgttctaggtgatggtttgccaacaattgaggatgtgaagaaactaaagtacacgactcgggttattaatgaatcattgagactatatccacagccgccggttttaattcgtaggtcacttgaggacgatatcctgggagggtacccaattggccgaggagaagatatttttatttctgtctggaatcttcaccactgcccaaagcactgggatgatgcagaagttttcaatccagaaagatggcctttggatggaccaaatccaaacgagataaaccaaaatttcagttacttaccatttggtggcggaccaaggaaatgtgtgggtgacatgtttgctacttttgagactgtggtggcaacagcaatgcttgtcaagcgatttgactttcagatggctccaggagcacctccggttgacatgacaactggagcaacgattcacacgactgagggattaaaaatgactgttactcgaagaacaaggccaccagtaattccaaacctggagatgaaaattattaccgattcacaagaatccacactttctgccccatcgatggttgttagtgctgcttctgttgcttcaggagaagaccaagggggcatctcctgagagaacgagtatgttcttttcattccgcttggagttataattcaattgctcgtctcttcgaattatttccatgcagtatgtgcatttagtggtattttctcatgtatcttccaaaacattattgtaggcatatccatttatattgctctggaagtatttagctagtttacagcatttggttacgcaagcagtacaaaacagagatagtctcctggcgtgctacaacgaaaaactccaaacctttccgc

SEQ ID NO: 79 - DNA, 1806 bp, Zea mays
  Clone ID: 700045263_FLI
cgtcaattgatccatcagaggttgaatggtcatacacttacaacagaaaaaagctcccatctgagaatggtatcgattcacattggaacggtgtcaggaagcaacctatggtccctagtgactggtgggttgaggacctttgtgagctcgaagtggatttgtacaagcgtgtgatcatgaccatcaaggcaaagggaagcacaccagctgctgtcattggagaagcattgagggcctacgcataccgacggctgcttggctcccttgaagatgctgtgagcaatggagtcgattgcacaaaacgccgtgcagctcttgatgccattgtatttctgttgccagctgaggaaggctcggtgtcatgtggttttcttcttaagctgctaggggctgcatgtttgcttgaatctggggagtcccatcgcgttaacttgatcaagagaataggcacgcagttggatggtgcttcagttccagaccttcttataccgctaaatactaatgaagacaatatatccagcatagatctgatcatggcaatagtggaagagttcatgtcacggaatggtgatagtggtacggagaaatttcaagacgatgaaggaatcgtggacatcgagaagtcgacatctgtttccagcgcgtcaaagcttgcagttgcaaagctgatcgatggatatcttgccgagatcgccaaagatcccaaccttcctcttccaaagttgatcgcactcgccgaaatggtgtcttctctaccccggccaacgcatgacgggctctatcgtgccattgacatgtatctgaaggtatctctctgtgtctccaccgagtgctcccgttgtagggcgtttgaatatacttaataacagtgccttccatgctgacacaggagcaccccagcctatcaaagagcgagaagaagaaactgtgcgggctgatggactgcaagcagctgtcgcaggacgcgtgcatgcacgccgtgcagaacgagcgtctccccctacgcgtggtcgtgcaggttctcttcttcgagcaagtccgggcatcgtcgtcggttgcttctgcaaggagcgacgctaattcgacgtcggggctcccgtctgccgttcgctcgcttcttcccagagagaacggcaactccattggcagctccaggtcagccgcgacgacgatgacgacggaggaagaggagagtggggtcccgacgtcgagcgacatcaactctctgaggtcgatgaggctggccaacaacagcggtgggagcgagaggagcagcggcagcagtgacgtgaacaacaagagcagcgacgacaggagcgccgccgccacggggaaggcgaaggggacgatgctgatgccgaagaagatgctgagcaagctctggtccgggaaaacgaacgccggcgagagcagcagctcggacacgtcggatagccctgggtccgccaacccggaggaggcgaagtccacgcagtcgcggatcacatggcgctcggtatcctagtcgcgcgcgcgcggcgggggttcagcggggtcacaagctcacagccttagttttgttcttggtcttgattttgccttcgcctagcgagtacagcagtagcgatctcataacatatggagttactgctactggtttcacttgtcatgtcgccgatgacgttttctttttggcatgggattgcttgtagctggagtggagtaggtttggtcattggtgatgtttccagcgaagttccatgggatatttattatgtgacctttttttcatggtaggaatacaaagaaagtagtacagtccgttat

SEQ ID NO: 80 - DNA, 1645 bp, Zea mays
  Clone ID: 700045308_FLI
aaattctccctcgttgtcttaccgtgtcgttgttgccgggttttcttggcgagcgacggagccacagaaatggagtgcaatacgggcgcctaattttagcggcggggaggggagcgaagcctgggcagccactcgccggcctccaagaaaccgtcgccattttttcatccgagtgccgccgattttgatttcattattgtctgtcttcgtggggaaccaattcggttttgtttcggaagaagggagaggaggatgcagtgggcgggtctgagatcgcaggcgccggttcccacggcggcgtggacggggccgaggccaagaaccgcgaggtgcccgcagggtagattccccacagcgcgccgggcgctggtggcgtcggcagcggcctcggacgctaattcgagctcgaattcgccggggaaggacgaggagggggaggaggtggtgcgaagggagaaggaggagaaggcggtcgcgtcgcttctgatgagaagccagaagtacgccatgctaaagcagcagctcgccgtggccgcccaatttgaggattacaaggaagcagcgaggttgagggactcgctgaggtccttcgaggagaaggagcctgtgttgtgcctccgccggttgatgaagaaggccattgaggaggagaggtttgaggatgctgctaaatacagagatgaattaaagattttggctccacactccctcctcaaatgttctagtgatgcaactactttggggataagagttcaagtcaggagcgtctatattgaaagccggagccagccattgaaagggcaattcttttttgcttatagaattagaattacgaatagttctcagcgccctgttcagcttctcaaaaggcactggattgttacagatggaaatggaaggacagaaaacatttggggagttggagtagtgggagaacaacctgtcatattcccgaagactggttttgagtactcttctgcatgcccattgagcactccaaatgggagaatggaaggtgactttgagatgaagcacatcgacaaggctggatcatcaacattcaatgttgcaattgcgccattctctctgtcaattcttggtgacgataatgatgttctgctatgaactacactgaggacttgcttgggagcaaatggattgaagggaattaagggggctacaatcccttactattcaattttgaatagtaagggattttagctcacaatccccttctgcaaacaagccctgagatttaaactagacacacaaacacaaatatttattgtaagtgatgtaattgagcgcaaggttcaggtggaactactatggttgacttatggctggagccaagtgccctggtgcaaggtcaggtagagttctctgggatgttgaatctggaccatgcgagtatcaattgtgaggcacaataggacatcctaccaattgtacttctaaatgtacagcatggaacttagagcttgctacatgtattatacagtacctttttatttttcccatcacggtatcaccttagttatcgcggcctttgattatattgtatatcagctcagcaaaatatggtgttttttgttggaactgcaatgtaagatgtttgatatgaccgttggtgcttcaaatggac

SEQ ID NO: 81 - DNA, 982 bp, Zea mays
  Clone ID: 700045352_FLI
gatttaccctacagttcattaggattattgtcatgccgcaaaccgatgatctatgaatgtggtgaatcttgcaactgttctacaaattgccggaacagagtgacccaaaaagggcccaggctacattttgaggtcttcaggaccaccaatcgaggctggggtcttcgttgctgggaacctgttcgtgctggttcatttatatgtgagtatgctggtgaggtcattgatgaactcaaagttaatttgaatgacaccgaagatgattacatttttcaaactgtatgccctggtgagaagactttaaaatggaattgtggacctgaactattaggtgaagctagcacatatgtatcggctgatgaatttgagccactgcctatcaagataagtgcaaaaaacatgggaaatgtctcccgtttcatgaaccacagttgctcacccaatgtcttctggcaacctgttcaatatgatcatggagatgatggacacccacatataatgttctttgcactgaaacatattccacccatgacagaactgacttatgactatggtgttgctggagctgaatctagtggttcaggctctcgtagaacgaagaactgcatgtgtggatcacaaaactgccgtggactattttgatgggttaagatccttgctctttgtggttaatcatacaaaccactttcagctagatcctttcttagtctccggatgatatgagtatgactgatgattccaattgctgccatgtgtactgtgaagacagcaagttgttgtcaaactgtagaatttctgttgccctgcacggcatggtggccgttctcccaccatttgttcaaatatttatgggggtgtggattgatgtatttcttctgctaatcttgtccaccagctgcaccggtctgtgtaaacttgttatgatccctgtttgctctggacgcctggttgtttaaccgtgactccttggatctggtcatgt

SEQ ID NO: 82 - DNA, 993 bp, Zea mays
  Clone ID: 700045378_FLI
caaaccaagccggcgattctccgatcccaaccaggcaagcagtgtacgcagaaattgatgattcccccgctttgatctccgtacgtcctgtcatctcatcgatctgcttcgcatccacgcctgagcagactcatggtggcgttcatggcgagcagcggggccatgaaggcgtcgagcaggccaaccttcgtcacccctcgtagcttctttaactggggcaaaagcgcgagagaaaccgagacgccgccgccgcagctgcagttctcctaccacgacgtcgagccaccgttccccatgtcgctcgtggcaaaaacacacctcagagaccgtgagctcaggtgctgctacaaggccaccgtggacggcttcagtgctacggacttccaccggcggtgcgacttcaagggcccctgcgtcgtcgttggctacaccgacggtggcttccgtttcggcgggttcagcccggaggggtaccgaagcacggacgactactacgacacgctggacgcgttcctcttctactgggcggaatctacggaggtctcggcgccgcccgtggtgctgcccaaggtgggcgggagcggcgcggcgctgttcgactactcccgcggcgggccacagttcggcgccgacggcctgctcatcggcccgccgctcaccgccgtgatgggcgtgttcactggacccgactccagcgccggcgtcggcgacctccgcagcgctcgctcgcggcttggcctgtcgtacgcgaggcggccggacgggaaggagagcctgttcggcgacgagggcagggcccagctcgtggaggtgctcgtcttctgcaatccgcagatcgcgagcctgtactgactgctcattgttactagcttgcagctagagtctgtataaactattcattatcgcttaatttggagtctaaaacataccaataataacaatgtaaaattgtgggtacggttaattagttgattattaagttattgaaagatc

SEQ ID NO: 83 - DNA, 462 bp, Zea mays
  Clone ID: 700045409_FLI
gccgcagcaggaggaggacgcggacgccccgcccgtcctgacaccgctgctggggtcgccggacggcgcgcggccgtcgacgctggccaaccgttgcttcgccgtcgtgttcatggtcttcgtgccgctggtcatcgtcgtcttcgagcggagccaggccgacgtcgtggcctacgcgctctgcctcgccaacatcatcgtcatggtcgtctggctctcgccggacaccgggtcaacggtctcggccgccaagtcgctcctgcgtctcagcgacgacgaggatgaaggcagcgggggcagctccggcgcagaggacaagtgctgcgtctgcctcgccggcatgcgggaggaccaggcgcttcgggcgctgccgcggtgcggccacagcttccacgacaagtgcatcggcaagtggctcaaggcgcacccaacgtgccctgtgtgccgggccaccgccgtgcc

SEQ ID NO: 84 - DNA, 1016 bp, Zea mays
  Clone ID: 700045527_FLI
cgcatactgcatacacaacgcagagcatcagaagcagctgcgatctgatcgacatggctgccgccaccatggctatcacctcccgcgcgctcgtcggcaagccggcggctggcacgagggacgtcttcggcgagggccgcatcaccatgcgcaagaccgccgccaagcccaagccggcggcgtccggcagcccatggtacggtgccgaccgcgtcctgtacctgggcccgctgtccggctcgcccccgagctacctgaccggcgagttccccggcgactacgggtgggacaccgcggggctgtcggcggacccggagaccttcgccaagaaccgcgagctggaggtgatccactgccgctgggccatgctcggcgcgctcgggtgcgtgttcccggagctgctcgcccgcaacggcgtcaagttcggcgaggcggtgtggttcaaggcgggctcccagatcttcagcgagggcgggctcgactacctcggcaacccgagcctggtccacgcgcagagcatcctggccatctgggcgtgccaggtggtgctcatgggcgccgtcgaggggtaccgcgtcgccggcggcccgctcggggaggtggtcgacccgctgtaccctggcggcagcttcgacccgctcgggctcgccgacgacccggaggcgttcgccgagctcaaggtgaaggagatcaagaacggccgcctcgccatgttctccatgttcggcttcttcgtgcaggctatcgtcaccggcaagggccccctcgagaacctcgccgaccacatcgccgaccccgtcaacaacaacgcctgggcttacgccaccaacttcgtccccggcaagtgagcgagggcatgatgcttgcatgcgtgtaccgtagacgtaccgtattcctacgtactgcaggttgcaccagtatttgtgaagggagctgtgcgtgggagccagagattgtaccgctagtgtatttttgtatgcacgctgtggagctgatcaatgaaatatgctgtaaat

SEQ ID NO: 85 - DNA, 823 bp, Zea mays
  Clone ID: 700045540_FLI
accgctcttgcatttgccggtgcttttagctttgaggatggactgaagcttgtcaagctaagaggagaagctatgcaggatgcttcagatgctgccaatagtgcgatggttagtgtgattggtctggattcagaaaaggtgcaagaactatgtgatgctgctaatgacgaagtagatgaaaacgatagagttcaaatagcaaactttctgtgccctgggaattatgcagtttctggtggtgtaaaaggtattgaagtagtcgaagccaaagcaaagtccttcaaggccagaatgacggttcgcctagctgttgctggcgctttccatactagcttcatgcaaccagctgtttcaagattggaatctgcgttggctgccactgagattagaacacctagaattccggtcatctccaatgttgatgcgcagccccactcagatcctaacaccatcaagcagattttagctcagcaggtaacctctccggtgcaatgggaaaccactgttaagaatcttatgggcaaggggcttgagataagttatgaactcggacctggaaaggttatagcaggtattctcaagaggatcaacaaaggcactagcattgagaacatcggggcttaaacgtctgggatctgaagaactcttgatggaaccaagttacacagcagaggattgaaacatgccattattgtggaacgatgtttccactcagagttaccgttttttttaccttagtggttgaattttgatcttgatgtaaaattgacatgaaacacatggttaatgattttatgaacagtgtagttttcacagtttgaat

SEQ ID NO: 86 - DNA, 395 bp, Zea mays
  Clone ID: 700045543_FLI
cgagaagaagaagtaccccggcggcgccttcgacccgctcggcttctccagggaccccgccaagctcgaggagtacaagctcaaggagatcaagaacggccgcctcgccatgctggccttcgtcggcttctgcgtccagcagtcggcgtacccgggcaccggtccgctcgagaaccttgccgcccacctcgccgacccctggcacaacaacatcggagacatcatcatccctagatcgatctccccttgacaattatattggttgattattacgactaggcactaggcactgcctgcctgcgtgcaggagcagtacaacgacgacgacggcgagtcggcgacttccctcccgcccggaaagctctcgtaatctaaaggaaaaggaaattggtacc

SEQ ID NO: 87 - DNA, 674 bp, Zea mays
  Clone ID: 700045575_FLI
gccgcacccgcaccagcccgcgccgtggtcagaaggaggtccttcaccgtgcgcgcctctctccgcaaggccaccggcaccgccgccgtggcaatggctgccagcgccctgcttgccggcggtgccatggcccaggaggtgctgctgggcgcaggcgacggcgggctcgtcttcgagcccagccagttcaccgtcaaggccggcgacaccatcacattcaagaacaacgccggcttcccgcacaacgtcgtcttcgacgaagacgaggtgccgagcggcgtcgacgccaccaagatctcgcaggaggagtacctcaacgcgccaggcgagacctactccgtcaccctcaccgtgccgggaacctacggcttctactgcgagccgcatcaaggagccggaatggtcggcaagatcaccgtcaactaattaagctagctatcgatcgatatccattcatgtattagctgttgcttcctgctttgtactccgccgatctgtccatctctacatgttttcgtcttcacacaacaacctctgctacgactacgtatatatgcatgctactagctgattgattttaacgcgaccaggccgaccccgaaagctagcttggaccaagttttgtacccattaattctaccgatgcatctctcagtttagactcccataatcat

SEQ ID NO: 88 - DNA, 1007 bp, Zea mays
  Clone ID: 700045586_FLI
gtcttgccatgcttccaaatgccattacatccagcttgggtagtaaagtcaaactatcatggaaactcacgagcattacaaaatcagatgacaagggatatgttttggagtatgaaacgccagaaggggttgtttcggtgcaggctaaaagtgttatcatgactattccatcatatgttgctagcaacattttacgtccactttcaagcgatgctgcagatgctctatcaagattctattatccaccggttgctgctgtaactgtttcgtatccaaaggaagcaattagaaaagaatgcttaattgatggggaactccagggctttggccagttgcatccacgtagtcaaggagttgagacattaggaacaatatacagttcctcactctttccaaatcgtgctcctgacggtagggtgttacttctaaactacataggaggtgctacaaacacaggaattgtttccaagactgaaagtgagctggtcgaagcagttgaccgtgacctccgaaaaatgcttataaattctacagcagtggaccctttagtccttggtgtccgagtttggccacaagccatacctcagttcctggtaggacatcttgatcttctggaagccgcaaaagctgccctggaccgaggtggctacgatgggctgttcctaggagggaactatgttgcaggagttgccctgggcagatgcgttgagggcgcgtatgaaagtgcctcgcaaatatctgacttcttgaccaagtatgcctacaagtgatgaaagaagtggagcgctacttgttaattgtttatgttgcatagatgaggtgcctacgggaaaaaaaagctttaatagtattttttattcttattttgtaaattgcatttctgttcttttttctgtcattaattacttatattttagttctgtaggagattgttctgttcagtgcccttcaaaagaaattttatttttcattcttttatgagagctgtgccacttagattgccttgg

SEQ ID NO: 89 - DNA, 1011 bp, Zea mays
  Clone ID: 700045593_FLI
gcctggacggcctggcgtcccgcgaggccgcctactaccagcagggcgcgcggttcgccaagtggcgcaccgtcgtcagcatccctaacggcccctccgagctcgccgtcaaggaggccgcgtgggggctcgcacgctacgccgccatctcacaggacaacgggcttgtgccgatcgtggagccggagatcctgctggacggcgagcacggcatcgagcgcacgttcgaggtggcgcagaaggtgtgggccgaaaccttctacgccatggcggagaacaacgtcatgttcgagggcatcctgctgaagccgtccatggtgacgcccggcgcggaggccaaggacagggccaccccggagcaggtggccgcgtacaccctcaagctcctccaccgccggatccccccctccgtgcccgggatcatgttcctctccggcgggcagtcggaggtggaggcgacgcagaacctcaacgccatgaaccaggggcccaacccgtggcacgtgtccttctcctacgcgcgggcgctgcagaacacctgcctcaagacctggggcggccagccggacaaggtcaaggcggcgcaggacgcgctgctgtgcgcgccaaggccaactccctggcgcagctcggcaagtacacctccgacggcgaggccgccgaggccaaggagggaatgttcgtcaagaactacagctactaattaatcgcccggccatcacccgggataccgccgcccctccgagagatacgtgtgtactgatcatggttaagcacgtactccgatccattcccatcccatgaagccatgataatgatgatatgatccatggaccatgcatggtgctctggtcgatgccgtacgtgtgtccctgatacaatactattttagtactgatgctagtcatcatatatatcgatcgagctcgccactgcgaagtctgagataatgcatgtatgcttgacggcgagatctgaggaaaaataatttctatatatgcatgtttcgag

SEQ ID NO: 90 - DNA, 1478 bp, Zea mays
  Clone ID: 700045603_FLI
agtgaaataaagcctaaatagttgatataaaacaagaaagtaattacaaaatataaaaagtttttctatctacttggatacagatagcaaaaacattagttatatgtaggaaaaaatcatgtatctaaaaagacaaaaaacgtcttatctgaaggtcaaagcacgatatggtaggacacaatctctttattagtaagcatttgctggttaataattcgatttgattatggaagcctgcccttatccgaaagggtgatgctgctttattgtagtgttgtagtggcagccactcgctaccttccaggacaaggacctgcaataacgtctccctcgcatgctattgctgaccctctcaccgatttgtgccttggcagtggatcttctgggtcggccccttcatcggcgctgcgctggctgccatctaccaccaggtgatcatcagggcgatcccgttcaagagtaggtcttaaaggagccgatgctgctgcttcgagatgctgccggtcttgaaaggatggattcgtggctgtttcaaatgatcccctactatgttacgtgcagttccattccattcctctttcaaagttcggagctgcttttatccgaacccagacttgtaattcatctgtaccaattgtgtaatatgccgcgcctctgttatgtgcaattcaaaattatgagacagcgagtcaagctttaagagttcatccattcagccgctgctaccctcctcctgcaatgtggccaacccccctactgtgccacggccagcaagcagcggcgtctcggcacaagctacagcgccgtgacaacggctacgcagcgcaatagactctggccgctgaagcgatctgctctcaagttggggttggtgccggcgaaaaggacggcgatgagtcacccaccccacatccgcagcagcgtgcctgacagccagggtggaagactggtccttcccatcccgaattcccgatcccagcgcgatactacaaaaaaaccagcgcggcttacaccgtggctgagattgttgtttcttgtggcggaccgcgcagccagaggcccctttcagttccagctaccaccaccaaggaccatatgagattggtctggtcccccagccccggagcatccaaggtaggagtgaggagcgcaactcggcgaggtgcatcctcgggagggcaaggccacaccagccatgaccagacaggcagacaccaccacgaccctggcagcgatcgcgacctcggacacacgacaacagatcgccataaaccgcaaggaccagcccagcggggggctggaccatggcctgaaacttgtgagcagccgagggcatgccagtaactgcccccgatgcaaggtaacagcccagggcagaaatttcctgacgaatgccatcacccagacaggtaaacacttgactgcatatcacctaatctgtactacattttgcttccgccatcaagcagcaaaacccg

SEQ ID NO: 91 - DNA, 1128 bp, Zea mays
  Clone ID: 700045605_FLI
cacgactgcacgaggacgaaaaaaaaatatccggacatccggtcacggttgccattcttttcctgtaaccgaaccctgaagggtagcgtcatcatccagaccaccattaccagagtgctctgctctcgctggaggccgtggttcattcacgttcatggaggccgccgccattcccaccagtgccccggaaaccaggattgccgttgtcaccggcggcaacaaagggatcgggctagaggtgtgccggcagctggccggcgccggcgccaccgtcgtcgtcttaacagccagggacgagacgaggggtgcagccgctgcacaagagctcagagaatctgggctctccgatgtcatcttccatcagctggacatcaccgacgctgcgagcgtcagtcggctggctgagttcctcaaggctcgttttggaaagctagatatcctggtaaataatgccgcagttggtgctgttgagtacgtccaagatcctgctgacagttcaacgagcgaggaagagctgagtggcatggatatggtccaaaggcttcagtgcatgtttaagagagtccgggagacctacgacgctgcgacacaaggcatcaagacaaactactatggcataaagcatgtgatcgaagccttgctgcctctgcttcaagcttcctccgatgggaggatcgttaacgtctcctctgacttcggactgctaaggctgatcaacaacgaggagctaaggcaggagctaaacgacgtggagaagctcaccgaggagaggctggacgaggtgctggccgcgtacctgagagacttcgacgccggcgaggtgggggcgcgcgggtggccgatggacttctcggcctacaaggtggccaaggtggccatgaacgcgtacacgaggatcctagcgaggagccacccggggctgcgcgtcaactgcgcgcaccccggctacgtgagcaccgacatgaccgtccacaccggacctctcacgcccgagcaaggcgcggccaacgtcgtgaaggtggcgctgctgccggagggcggcccgaccggcgcgtacttcgcgttgggagaggaggcgtcctttgtgtgacgaaagcaccgtcgtcgttaagttcgtcgttgttcgcc

SEQ ID NO: 92 - DNA, 1379 bp, Zea mays
  Clone ID: 700045622_FLI
agagggaacctgaaggagctgctgattgcctgcgctagggcagtggaacgtaacaacagctacgccattgatctgatgatcccagagctgaggaagatggtttcggtgtccggcgagccgcttgagaggctgggagcctacatggtggaaggtcttgttgccaggctcgcggcctccggcagctcaatctacaaggctttgaagtgtaaggagcccaggagctctgatctcctctcctacatgcacttcctgtatgaggcctgcccctacttcaagttcggctacatgtcagccaacggcgcgatcgcggaggccatcaagggagaggacaggatccatatcatcgacttccacatcgcgcaaggggctcagtgggtctctctcctccaagcccttgcagccaggcctggcgggccaccgttcgtgagggtcaccggcattgatgattcagtctcagcttacgctcgaggcggcggtctggagttggttggcaggaggttgacacatattgctggcctctacaaggtgccctttcagttcgacgcagtcgctatctcaggcagtgaggtggaggaggagcatctaggcgtcgtcccaggcgaagccgtcgccgtcaacttcacccttgagctgcaccacatccccgacgagaccgtgagcacggcgaaccaccgggaccggatcctgaggctggtgaagggcctgtcgcccaaggtgctcacgctggtggagcaggagtccaacaccaacacggcccccttcgcgcagcggttcgcagagacgctggactactacacggccatcttcgagtccatcgacctggcgctgccgagggacgacagggagcggatcaacatcgagcagcactgcctggcccgggagatcgtgaacctggtggcctgcgagggcgaggagcgggtggagcggcacgaggtgttcggcaagtggaaggcgcggctgatgatggccgggttcagcccgtccccgctcagcgcgctggtgaacgccaccatcaagacgctgctgcagagctactcgccggactacaagctcgccgagagggacggcgtgctctacctcggctggaagaacaggcccctgatcgtctcatcggcatggcactagtgttgacttcagagaatgttgacctgatggagaatgtttcttgtaaccttcgaagtacctcttagtggtttagatatgtttggctggtcactggaactatctataggaagcctatggtgatagatactgagttgtagtagaacacatatagcctaaatgcctaatgctgtgatggcagtcactaccagcctagcctagaacaggttgatgatgtgtagtagtaagtttgggtatatgtttcagttaatcagttt

SEQ ID NO: 93 - DNA, 719 bp, Zea mays
  Clone ID: 700045655_FLI
ggaggacaaacttttcggttgggtgctggacgactgcggggattgctcagttgccgagggatgccttatggacacaaacaatgatcccatcgatgttgatgcacacatgtacaggtatcatctacatgttttacaatatatattttttaggagttacttttaaaaaatattagaaaaccccttctttgatattttcaatttttttggtggcttaaaaaaacaagaaagtaaattttacaaaccttagagatggtctaagtcgtccatgcatagccactacgatggctacggatgctttactcgctatactttgtgaaagcagagcaaaactatacgacgagaatcagagagcagtaggcatggtccacattcgtcaaagcgtgcataatcccaacatagcactaaacatgcagtcctatgctcctggtggctgcaaatccatggcaaaggatcttcttgagaggtaacatagacataacactgagcggatcctaactctcgcttcactttatgagattgttgatcttatgcttcttgttgattctaggttcttgctggcaagcggactgaatgggtttcttgacataagccaagtagagaagtttgtccagtagttcttatgcttattataggatcttagatttacctactctgtatatgtaacagctcagaacctagctaggagttcactactgttgcgagtgtacatctattacatt

SEQ ID NO: 94 - DNA, 509 bp, Zea mays
  Clone ID: 700045658_FLI
gaccggcacaatggccgtggacgggaggctgccggaggtcctcctcgttaggaaggtccagctccttgagcagcaggaccggccggtggaggccctggcggaccggcggctggacggcaagtttgaccgtagggagctcgtgcggctggctcggctcggcatggcgtgcacccggtcagacccggcggcgcggccgagcatgaggaagatcgcgagcattctggacggcaacgaagacgtgctggacaagctggagcagaggaaggagagcacggaggactggcagaggaggaacgcgaccaatcttgctctagtgaggagattccaggctcttggcatacactgaaaagtttgaaacagaggaaagtactagtgattcagcttttgttgttcttctgtatatagagaattttaatttcttctgtgagtttttgtggggatatggccaaaacttcctggtgtaaataatacttgctttaatttaggtttaatgttgagcagttacaact

SEQ ID NO: 95 - DNA, 1379 bp, Zea mays; identical to SEQ ID NO: 92
  Clone ID: 700045677_FLI

SEQ ID NO: 96 - DNA, 562 bp, Zea mays
  Clone ID: 700045759_FLI
cagttgagaagtatatggttccatttcaagaatctcgaccattacccgccgacttaatattgcggaaggttgtgatgcgtttgttgaaagagcgtgcagttcctcttgtggatgattggggaggatgcattggcatagttcaccgcgatgattgtaccaagctggacgcacctcttatttcaatgtctagagggccacctctgtgcgtacctacttcaaccaccgtggagcacgtcattgacctcctcctgagaaacaagtccgagatggtgatcgtggtgaagagtggtaacatgtacgaaggcagctacacatccagctcaagacccttgggcgttttctccctcgccatactatggagcttcaccggcgactactcgtcaggatcagatgatgtccccgacgcaggcatctcccgggcagcaaaacccaaaccagacgccgaggcctgcaaccacagctagtttggtgtttcttttgctcagcttatagcaactccgcgtcgtgttgccgggcaaactagtcatgtaatggtcctccagttggacaaggggtgcatgcg

SEQ ID NO: 97 - DNA, 1079 bp, Zea mays
  Clone ID: 700045814_FLI
gccatccccttttgctgcaaatctttctctgaattgtgggtctccgacaatggcggcgctcgctccatccaagattctgggcacccagctcaacttcgcgggctcctcccgctacgccaccgcagcgcccaccgcgggggctcagaagattgtctcccttttcagcaagaagcctgcccagaagcccaagcccgctgcggtatcgtcgtcttctccagacatcagcgacgagctcgccaagtggtatggtcctgacaggaggatctacctgccggatgggctgttggaccggtcggaggtgccggagtacctcaccggagaggtccctggagactatggctacgacccttttggcctgggcaagaagccagaggacttcgccaagtaccaggcctacgagctgatccatgccagatgggccatgctcggtgccgctggcgctgtcatcccagaggcctgcaacaagttcggcgctaactgtggccctgaggctgtctggttcaagaccggcgcgctgctcctggacggcaacaccctcaactacttcggcaacagcatccccatcaacctggtggtggccgtgatcgcggaggtcatcctcgtcggcggcgccgagtactaccggatcaccaacggactggaccttgaggacaagctgcaccccggtgggcccttcgaccccctgggcctggccagcgaccccgaccaggccgccatcctcaaggtgaaggagatcaagaacggccggctggccatgttctccatgttcgccttcttcatccaggcctacgtcaccggcgaaggccccgtggagaacctcgccaagcacctcagcgaccccttcggcaacaacctgctcaccgtcatctccggcgccgccgagaggacgcctagcctgtaaggacggacgccacgccgccgagcaatgccaagtcatgcgctgctgcatgccgtctttgattttaccgggataaaaagctgtatgtgagggtctgaagaatgtgcaatgcccacgcgtgtaaattatcgagagggggaacaaaccttttcattctgattgtgatatgactgctgcttcc

SEQ ID NO: 98 - DNA, 502 bp, Zea mays
  Clone ID: 700045827_FLI
ggatctcttgcaagaggttgacgcccttgagttcttcccagatcagggtgactctggtctccttcctggtattgaagagttagaatctctttcggatttcacagatatcggatgaacatagatgagcaaattattgttgatgggatgccctcctataccaagaggagacaagattgcctctggcaggagcccaaggatacaggttgaattgctcagccgtgcacagatgtgttgcaagcagcaagctatcatcatggctggctggagcaaagcactggcttggtgaggtcacattgatctgacaagctcggaggatgggtttgcactaatggcggcatttgggtaatttccatacatgtatgtatattggtagtctagaatcgtaggatgtagaaatgcctccctcatttgtgtttgagggtaggaccttgtaactcgaccacatggaaattttgttgagcaggtaccaacatagaagggaaaagaagaggccctcagcatc

SEQ ID NO: 99 - DNA, 1421 bp, Zea mays
  Clone ID: 700045841_FLI
caaaagtcattgcagacttgcaagcttccctcccctactatcaggcgaatcatatccatccacttactacgctgctaggctgctacgaacaaaatcctcctaattaagacgggcgtcgttggcttcaaatactggtctctcccctgtccaaaagtctctcgaatctccaccctggttctgcaccggttccagaattttctcccatttacagggtctccccgtttctgtccggcggttctgccgttccactgcttttgatttcggagtgtgaacttacatcttgctggataataaagattggattttaagcgatttgggggtgcttgcctgatctccccctgcgaggtactgccgggggattggatttcggggaagttttggtggtttgagattcggcttggccggagcaggaatgacgatcgacatgtccattcccgggagctccgggctgctgaacgctgcggggaagagggacatgaagttcttcagcaacccctacgtgcttgcgctcacgggcgctgcaggaatcggtggattcctctttggctacgatacaggtgtcatatctggagcccttctgtatatccgcgatgattttccagcggtcaaggacaattacttcttacaggaaacgattgttagcatggccttagtcggagctatgattggagctgctgggggtggttggatcaatgatgcatacggtcgcaagaagtctactcttcttgctgatttgatgtttgctcttggctcacttgtcatgtgtgctgctgctggtccttacattctaattatcggaaggctcctcgttggtttgggtgtgggtgttgcatcagtcacagcaccggtatacattgctgaagctgctccttcagaaatcaggggaggtttggtgtcaactaatgtactcatgattaccggtggccaattcttctcctatcttatcaatcttggctttactgaggtgcctggaacatggcgctggatgcttggtgttgctgctgttcctgccattatacagtttgtgctgatgctattcctgccagaatctccgcgttggctttactggaaggatgagaaggcaaaagctattgccgtccttgagaggatctatgaatccgaccgcttggaggaagaggtagagctgcttgctacatcctccatgcatgaattccagtccaacaataccggaagctatctggatgtcttcaagtcgaaagaattgaggctagctttctttgctggggctggccttcaggccttccagcaatttaccgggatcaacaccgtgatgtattacagccccacgatagtccagatggctggtttctcctccaacaggctggccttgctcctctccctgatcgtcgcggccatgaacgccgccggaaccatcgtcgggatctacctaatcgaccgtt

SEQ ID NO: 100 - DNA, 1465 bp, Zea mays
  Clone ID: 700045892_FLI
ctcaaggacttcagggagctcgtgtgttaaatgcttatgcaaggttccttgatgacgcccccgagcaagtgaagattgttagagtgtcatgtggagagtaccatacagcagctatatctgaaaatggggaggtgtatacttggggactgggaagcatggggcagcttgggcattgctccctccaatctggagataatgagctgatccctaggcgagttgtggcccttgatggtatagtagttggggacgtttcttgtggaggtgtccactcttgtgctgtaactgaagggggagctctatatgcctggggcggaggacatgtgggtcagctgggagtcgggcctcagggtggcttcttctcttgctcccttaatggatccgacatgctgctccgaaacatcccagtcctggtgataccctcaggtgttcgtcttgctacctgtgggcactcccacacacttgtgtctatgaaagatggccgcatatatgggtggggctataatagttacggtcaagcgacgaacgagaaatctacttatgcttggtttccctctccggtcgattggtgtgttggtgaagtgagacgactcgccgctggaggtggccattctgctgttctgactgatgcatgttcgctgaaagagctgtgcgaattcaagctcgcagagaccgtgaacctttcaaatgctcagctaatagaagatgttgcatcgcggactggtgcggatgccttggcacgcttgtgcgagaaagtaagggagcatttggataaggaaggagaatgtgaattcctggaaaagcaagtggcagaagaggtcaacactataggcagttaggccactagcaaaacagttcaagcagtctgaggctgaagccagtctgggattaaacagggagtcatctacaattgatagcttgacctcccagtaaagttactgattcggacattaattgttgtggtgatcatggaaaatatgtgactcgtcaattgattctgattggtctgtagacctccattggtggtgagcctctcagctgcatcggggaggcgcagaggctctatatgtgtcatgatcttgttccgaactgtcaggttgctgtaatgtagccaaatggaaacctttgtatccctggaacttgaaaggcatgtacctggtatctgcagccaaccaaagctgctttgcttcacttggggtcagtaaagaacttgttgatagctggcatgatctcgggggtcttgtcgtgcacaaagcttctgaggccatgcatggcgtaacgcctcccctcctcatggttctcaagcacgccggctgccctccctgccttgtttaccctgacttccgggttgccggtgatgttccggaagagctgaaacccgcagatgccaacggcaactcccatcgccgcgaacagcgggtacacctcgggtcggacccagcggctggccatcagactagactaggac

SEQ ID NO: 101 - DNA, 688 bp, Zea mays
  Clone ID: 700045979_FLI
cgtgattccgcatcccgttcgcgagcgcgacacacgctgacagctcacggctgaccttcccgacggcctccagctccatcttgattcttgaggcgaagccccggtgcgtaagagtctgccatggccagcgagaataaggtctttgggttcgaggaagtcgccaagcacaacgtcaccaaggactgctggatcatcatcgccggcaaggtgtatgacgtcactccgtttatggatgagcatcctggtggagacgaggttttgctagctgtaaccgggaaagatgctacagctgatttcgaagatattggccacagtgattccgcaagggacatgatggagaagtaccacatcgggcagatagatgcttcaacaatcccagcaaagcgtgctcatgtgcagccccagcaagcacccagccatgcagacaaggataatgacctccccatcaagatcctacagttccttgtgcccattatgatcctgggccttgcatttggtatacggcagtacaccaaatcagagtagtaactattcttagaggcttgcctttggagcctgtcttatggtaatggttcgaataaaaacagttcaataattgcgcattgtatttgtcaggtcgatgttgtctcattagtcacatgctactctgtattatggacatccatgttgaaatgtgcgcttttccccc

SEQ ID NO: 102 - DNA, 1429 bp, Zea mays
  Clone ID: 700046025_FLI
cccacggccatctccaccggatccttcctccacacctcctcaaccgccgcctccaagaccctagtaccgaaccccaacctcgtcccgctccggctcgtccgccacttcccggccatggccgccaccgccgcagacgagttcgtgaagggccgcgtcttccccaacggcgtcgccgtcatcacgctcgaccgacccaaggccctcaacgccatgaacctcgaaatggatgttagatacaaggcacttcttgatgaatgggaaacaaatccaagtgtcaagtgtattcttgtggaaagcagctcttctcgtgccttctcagcagggatggatattaagggggttgccgtggaaatacaaaaagacaaaaaaacaccacttgtgcaaaaggtattcacagtagagtactctttaatttgtaagatacatgagtatgcaaaaccttatatatgcttgatggatggagtgacaatgggatttggaattgggctatcagggcatggccgctaccgcattattacagagagaacactcctagccatgcctgaaaatggtattggcctgttcccagatgttggctttgcttacattggtgcaaaagcaccaggagggggtgcagttggagtttaccttgggattactggaaaaaggatatcatcacctgctgatgctatgttcataggccttggtactcactatgtaccttctgcaaatttgggttcactcaaggagtccctgctgagtgctaacttcaccaatgatcctcatagagacgttgagtcagttctgacaggatacaagaaagaaccagagtctgaaccacaactaaaaaagcttttgccatatatcatttcttctttcagtcctgataaatcagtggctgaatctgtggaagagctaaagaaatgtagccgaagtggtgatgctgcagtggcagaatgggccaatgaagctttagcaggaattgagaaaggcgctccattttctctttgtttaacacagaagcatttctctcaagttgcatcagcatatgggactagtgaacactatttatctaagctggctggtgttatgaaattggaatatcgcattgccttgaggtcgtcgattagaaacgattttgttgaaggtgtgcgtgctgttttagttgacaaggaccagaatccgaagtggaatccagccactctggaagaagtaaacatggccgaggtcgaatcagttttcgagccattaggggccgaggctgagttgagtgtgtgaaatatggcctgccacactcagttttcttatttgtgctgcaataataatgtatacaaaacagaaatgcgatgcccacagaaacaataaatgctgtgtcttcatgaactaactggagtggttccattttctcgaaaggggcgcgtgggaatctaaggtctgttgcttgctttcc

SEQ ID NO: 103 - DNA, 257 bp, Zea mays
  Clone ID: 700046037_FLI
cgatgcaaagactccatctgaagtttaggtactagcttgccatgaaatatatattcttctgtaagaacatcacttgcatgctctttttgtcatatctactccttctgttccaagtataggacgttttgacttttctagacagataacttttggtatgcatttagatatgcattatgtctggatacatagaaaaacaatatatctagaaaagccaaaacattttataatttgtaatagagggattatatgattacttc

SEQ ID NO: 104 - DNA, 1300 bp, Zea mays
  Clone ID: 700046058_FLI
gcagatctcttgccttggtgtacagtggaatgtaccttggatcagtcaccggcctgtctttgtcacctctgttgattagcagatttggctggccttctgtcttttatgcatttggatctcttggaaccgtttggtttgcactgtggcaaagcaaagcacacagctctccagatgatgatccggagctaagtaaagctgaaaagaggcatatactgggtggcagtgccttaaaggagcctgtcacttccataccatggaggctaattctatcaaaggctccagtgtgggctctcataatatcacatttttgccataactggggaacattcattcttctaacatggatgcccacatactacaatcaggttttgaagttcaatctaactgagtcggggcttctctgtgtcttgccatggctgacaatggctgtttttgcgaatattggtggatggattgctgatactctagttcagagaggggtctctgtaacaaacgttcgtaagatcatgcaatcgattggtttccttggaccagccttgttcttgacactgctgagcaaagttcggactccagccatggctgtgttatgtatggcatgcagtcagggtagcgatgctttttcacagtctggcctgtattcaaatcaccaagacataggaccacgttatgcgggggtacttctcggactgtcaaacactgctggcgttctggcaggagtttttggtactgctgccactggctacattcttcagaaaggttcttgggatagtgtgtttaaggtgtctgttgtgttgtacatagtaggaacggtggtttggaatgtcttttcaactggagagaaaattctcgaataagctgtggacattcctatatgccactatacggaactgtgtgattttgatgatgtcattttggcaaacaaaataaattttagaagagatacatctggaagaaaactccattttatgcaagaggtgtacctgaatctgatgtttgggctatcggaagaaccagatcaaattagggtactgtgtgaggtcaagaaggtacacttggaacttgggaaaattcttgtacacaaagcaaccgcaccaagggcacgtcagatttttgcagttgtttcttgagaagtccaggcttctgtcaagatcaccaatccacatctttttgttttaaaatgattgacagttaaatcgtgtatcaccttgcctttgcttaaggcgctacaggtactgccaaactaatgtatgtgcttttcttatcgaaaaacctaaatgtatgtgcttcagatatcttgaac

SEQ ID NO: 105 - DNA, 1105 bp, Zea mays
  Clone ID: 700046086_FLI
agagcagcgagccatcgacacgatcgcgagcgcaagcacgtacgttgtcggaagctcaagttagaagaagcaccagtgcctgatcgatggcggcccaggctctcctctccggccggcagctgctgggccgccccgtgcagtcggccgtctctaggtcgtcggcgaggaaggcgcccttcgtcgtcagggccagctccagccctccagccaagcaaggtgccgacaggcagctgtggttcgcgtccaagcagtccctctcctacctcgatggcacgctgcccggcgactatggcttcgacccgctgggcctctcggacccggagggcaccgggggcttcatcgagcccaagtggctggcctatggcgaggtgatcaacggccgctacgccatgctgggcgcggtgggcgccatcgccccggagatcttcggcaagatgggcatcatccccccggagaccgcgctgccgtggttcaagacgggcgtcatcccgcccgcgggcacctacaactactgggccgactcctacacgctcttcgtcttcaacatggcgctcatgggcttcgccgagcaccgccgcctccaggactggtacaacccgggctccatgggcaagcagtacttcctcggcctcgagaagttcctcgccggctccggcgacccgtcctaccccggcgggcccctcttcaacccgctcggcttcggcaagaccgagaaggagatgaatgagctcaagctcaaggagatcaagaacggcaggctcgccatgctcgccatcctcggttacttcatccaggggctcgtcaccggcgtcggcccgttccagaacctgctcgaccacctcgccgaccccgtcaacaacaacgtgctcaccagcctcaagttccactagaacgtggtgcatcagcatacctgctgctgccgccgccgccgccagttgtttgctgtggaaagctagatgcatgcgtgttgtaaaggaacctgaagcgttgcatcggtcatgattcatgcatggccagcctgctgcctgtaacaacaaactagtattgatcttattgagaccggaaactgtattgcacatggtaaatcaatgtacaattcctccct

SEQ ID NO: 106 - DNA, 624 bp, Zea mays
  Clone ID: 700046133_FLI
actttgagctctctggcctgcccccgttccagcaagatctgtactccgtatccatcatctccttgcttagtgggcactcaaagtgttgctcaaacaaatgatgattcatcgatagtggctgaggcgacagctctccaagtttcgtctgttcgctcgtggtggaaattccgctgagcgagcgagtgaatcctcctcttcctagccccggcgtgaggagcgccggcgatgtcgaccggcggcaggaagatgaggacggcgtgcgtgaccggaggaaacgggtatatcgcctcggcgctcatcaaggtgctgctggagaagggctacgccgtcaagacgacggtcaggaaccctgatgacatggagaagaacttcccacctcaaggacctgcaggcgctcgggtccttggaggtcttccgcgccgacctggacgaagacggcagcttcgacgacgccgtcgccggctgcgactacgccttcctggtcgccgctccggtgaacctccacacgaagaaccccgaggaagaaatgatcgagccggccgtcaggggaactctgaacgtgatgcggtcgtgcgtgaaggcgcgcacggtgaggcgcgtggtcctgacctcgtcggcggccgc

SEQ ID NO: 107 - DNA, 1431 bp, Zea mays
  Clone ID: 700046203_FLI
gcaagatcagggccaaggcggtcagggaggactggaggcagaaatccaagcccatccctcctggcgccgtctaccctgccaaggaccactgcaggatcttgagcgacaagtccacgggagaggccggaaggaaggcatggatgaaatgtactttggagtctatgaccaactcttgtatgccaggaagaccgaacctgttgaaggagcccagtggacgggaatagtgacaacaatcgctgtcgagatgctgaaagcaaacatggttgatgctgtgtgatcctgacgacaggcttgctccaagacctgttttggccaggacaccagacgaagtaattgcagccaaaggtgtgaagccaacattatcaccaaatctcaatacacttgccttagtcgaggcagctggtgtaaagcggcttcttttctgcggtgtgggctgtcaagtgcaagctttgagatctgtagaaaagtaccttggtttggaaaagctttatgtgcttggaacaaactgtgttgacaatggtacgcgtgaagggcttgataaattcttgaaagcggcaagcagtgagccagaaactgttatgcattatgaatttatgcaagactataaggtgcatctaaagcatttagatgggcacattgaagaggttccttatttttgcctgccagcaaacgacctggtagatgttattgcaccgtcatgctatagctgctttgactacacaaatggcttggcggatttagtggtggggtatatgggagtaccgaaatatgctggggtctccatgacacagcatcctcagtacattacagtcaggaacgatcgtggacaggagatgctgaacctggtagctggccttctggaaagcacacctacaattagcagtggctccaggcaaccgtttgttatggagacagtgaaagctgacgatgccgcaaaactggggaaaggcccttcgaaaccagctcctagattcgtcggcgacattctggccttcctgctgaacttggttggacccaagggtctggagttcgcacgctactctctggactatcacaccattcggaattatctgcatgttaggcgggcatggggaaagcaaagagctgagcagcacatcccggggtatgccaagaagatcgtggaggcctacgacaaagacggacggatcgaggcaatggttacgcagtcaggtgactgactcacaccattcacactctactagctggtagtatttgtatactagctggtagtatttgtactgcattgtagtaaagattaaggaatgtagaagaattgtttgtgatgtgacgtagtggcgatgtatacagtagaatgtataggctgcatggcagcagctcagatctgtatgtacatcctgcgcttgccagtttctagtttgcatttgcttttctgggcatgccttttgtttt

SEQ ID NO: 108 - DNA, 417 bp, Zea mays
  Clone ID: 700046209_FLI
agcgaagccgtggaagagacaggtcttatgattacagagagagaggatcagagcaccgaagcaatctctacagaaatgggagggattccgaaagaggtggacacagatacaggagtggtgatatgacaaacgaccgggggagaatgaggagcagatcacgttctccaacaaggcatggctatggaagatctggaagtccaaatcattagctgaatatttagatagttttattcacagttgggactcatgaggtagaccgttcccttctgctatttattactgtacaatgggttttattgaagtgtcgcacttgtttgagtctctgctctgctgtaacagctctgttggaaccctacagtcttcctttttacatgagaaaaaaaaaattctcaggtaggtatcaattttcattcccac

SEQ ID NO: 109 - DNA, 656 bp, Zea mays
  Clone ID: 700046458_FLI
gctgtacctcaagctcggcgcccgcggcgacgcgcggcgggtcctcgaggagcgtacaaggcggcgtccggcgagggaggacgacgcggcggtccaggccaagcggcgagaggcgtacactaaggtgcgggagctccacgcgcagatccgtgcggcagggtacgtgccggacacgcgctacgtgctccacgacatcgacgaggacgccaaggcccgcgcgctcatgtaccacagcgagcgcctggccatcgccttcgggctggtgagcacgccgcccgggacgccgctccgcgtcatgaagaacctccgcatctgcggcgactgccacaacgccgtcaagctcattgccaaggtcgccggccgcgagatcgtcgtcagggacaacaagcgcttccaccatttcaaggacggcgcctgctcctgcggagactactggtgaggaagccttcacagctagcacgcacaaaggttacattatccataaaatgtttgtaaattcgtaacacttgttagtggcgagagaaggatcaaagaattggttgagccaacttgtagaagcattggccagcaacatcaccgacttccaagtacgatttgtgcgctgcaactgcaaactgcaaatatgcaattgaatgatcgaacatggaaaaggacac

SEQ ID NO: 110 - DNA, 1272 bp, Zea mays
  Clone ID: 700047325_FLI
gccatttacaacgacaccaccatgtcgtctgtccaggaggagcttaataacacacaggacatgctccaaggttacgtggagctctacaattacagtctctcctacgtgaagaccatggcgatcgggtgcgcgatccagctaggcatccctagcgccatccaccgccgaggtggggcagcaacaatctcggacatcatcaccgagaccggcgtcgacccgtcgaagctcccgtatctccgacggctcatgcgcgtgcttaccgtctccagcatcttggccaccacaggcacagacgagactgagactgagagcgacgacagtactgtttacaagctcactccggcgtcccgcctcctcgtaagcggcgcgggggcaccgacctcgtgcgacatatcgccgatgctggaccttctgatgcgccccactacgtcggtcgccacctacttcagcctggaagagtggttcaaggacgcgggcgccaccgccacgctcttcgaggtggcgcacggcatgtccccgtggagcttgacgaagaacgacgcgctgtacaacaagaccttgaacgacgggtgcgcggcggacagcaacttcgccatggacacgctcctgagagagccccgggccgcgggtatattccgcgggctcggctcgctcgtggacgtcggcggcggccacggcgccgctgcgatggccatcgctagggccttcccgcacatccggtgcagcgtgttggacctcgagcaggtggtcagcggggcacctgatgatggcacggtgaagttcatcgccggcgacatgttcgagtctatcccggctgcagattgtgtcttgcttaagtatgttctgcattgctgggacgacgaaagcagcgtcaagatcctccggcagtgcaagagagcgatccctgcaagagacgccggagggaaagtggtgatcatgaacatggtggtcgggtacggttcgtcagataggtttgtcaaagagacgcaggtgatgtgcgacatgtggatgatgcggtacgttggggttgagcgggaggagcatgaatggaaaaggattttcctagaggctgggttcagcgattacagaatcacgccgacagcgctgggtttccaatcggtcatcgaggtcttcccctgaggaagaagcatatatatatatatatatatatatatatgatcacgctgtgtaggatgtgtcatgtgtgccctgtgcgtaaggaaaaatatataccattattaataagttattaataagacagacatgatgatg

SEQ ID NO: 111 - DNA, 661 bp, Zea mays
  Clone ID: 700047339_FLI
caaaatcaagaaacgtcgccatggttcaggcagtgaaactgaaggccaggaaggagggatattggctgcaggaactgacaaggagcgatcactctctgctgaagacgcagtttgctgcatctgtcttgcaaaatatgcgcacaatgatgagctccgtgaacttccatgtgcacactgtttccacaaggactgtgttgataaatggctcaagataaatgcactttgccctctgtgcaaatctgagatagtgagctcgtctggtacttctgatgcccgccaatcagaccagaacaccgttcctgtgcaggagatcgaaatgcattaggttggtctgttcccgcagcttatcacataaggatacatctgatttgtggctctcaatcttcatgtataaagttggagattgatgtatggattgtagagacgcgtaggtttttttttgtatttaacactgctatcttggagaagttacagctattctcgctgtcacccaactatggcaagccaatactacccaggttttcccccatagcgtgggctgcaccttatgttctgctcttgatggcattgcatgacttctttcgagtttctagagcgaaataggcaggcgagtttctttaagcgtgtatgtggacgtgtaaagtaacgttttgcattgtag

SEQ ID NO: 112 - DNA, 415 bp, Zea mays
  Clone ID: 700047370_FLI
gcagcggaaatcttattaccaaattttacatgttacatcaagttttacaatgtacatgatcggagtgattacaaaagtgattcaaagaaataactttgaaacgttataaattgtttataagttgaaatatatgctagcttaagtgaccatcctcaataagaagtatagaagaagtacatagacttatagaaggttgtgcccaccggcacttaacaccatcatcagcagcacaaaactataacctggataacactaggttagtgtttgttaggggatgtccacttgacgatcatccttgccctagcacttgatcaggcaggtccgttcatcagcatcaccatgcggaatagcccgcgcttggggtcaacttgggtcatctttcgcatcacgcgattatttaacataccagtaattt

SEQ ID NO: 113 - DNA, 953 bp, Zea mays
  Clone ID: 700047407_FLI
ttggagtttcttttgtgtggatactagatgtgcatgaggagtttaggttgaaatgccaattatgtgtagagtgctaagttagtattttgaatattttgcagggaagtggtgtcgaggttactgtgatgatttagttgtttgagtgaatatgtatgtgatggatgctttgcctactaactcacaattgtgatgtcttagctattgtatgattcaagtcatttggacatggtggtttagaaagtcaatagattgcttctatccatattttattctaggtgtctgttagtgacaaacctaaggttattagtttttcgatgaatgcttaatcctaggagaatatagaacccaagtaaaacatgttactagatgtttggttttggtccatttgacttaaaggtcatgtttgtgtaaagtcaaaagcatctaagtaaagttgaaatgtcttgctttaagtgcttaatctacttcgagtagcattatctagctcgtgctattcatactcgtgctcattcatgtgcatcttgcatatcacataggtacgttcattgatcacgtaatgtggaggacaacaactggaataatctcaagatgggactgatgaatgaacccaaagctaaatgatctgatcgtgctggaatgggaggtgctcgccaagcgagtatcatctaacaacactgacttagtgtttatcccaggttgaaattttgttctgttgtggatggtgctaagtgccggtgggctcggccttcttatataagtatatcccatctttagcttctttattgaggattgtcacttaagttagcatgtattttaaaaactataaatattttatacattttaaattataattcttttgaatcactttcttttgtaatcactccgataattgtataatgtaaacttattgtaacatgtaatcattttgcaataaagaatttatttccgctgcc

SEQ ID NO: 114 - DNA, 1121 bp, Zea mays
  Clone ID: 700047469_FLI
gtggaatttcatttgtcggtaaaccgattgtttagtttgttttgtccttaaacacaccttgtatcacaaagatgggcaagggggaccgttcttcgtggaaggccacttattttatgaaattggcccaatatttcactgattatccaaaatgttttttggtatgtgtggataatgtcggctctaagcaaatgcaggaagttcgtcgctctcttcgtggtgatgctcttattctgatgggtaaaaataccatgatgcgtaaagctatcaagggagctttggaaaataatcctgctttggaaaaaattttgccacatattcgcggcaatgttggattcgtttttactcgggaagatttggtagaaatccgcgatcgtattttggacaataaggttcaagctccagctcgtgcaggtgctattgctcctttggatgtaaaaattcaaccacaaaataccggtcttggtccagaaaaaacttctttcttccaagctttgcaaattccaaccaagatcgccaagggtaccattgaaattttgaacgaagtacatttgattaagaaagacgataaagttggtgcttctgaagctaccttgttgaacatgttgaacgtttcaccatttacttatggcttgaaaattttgcaagtttacgattccggtactattttcagtccacaaattttggatatcactccagaagatttgcgcgccaaattcttggctggtgttcgcaacatcagctcagtttgtttggctattggctatccaactgtggcctctgtaccacatagcattgtcaacggagtgaagaatttgattgctattgcagttgaaactgaaattacctttaaagaagccgaaatggccaaggaatacttgaaggatccatctaaatttgctgctgcagcccctgttgcttcagctactccagctgcatcttcagctgctgctccagctgttgaagaagaagaggaagaagatgatgatatgggattcggtctttttgactaatttcatttctaaatttatacattcagttaacgatgcttaatgttttcttctattttaacattaatttaataaaaactagttatgatttatcatatctaaacatttatttct

SEQ ID NO: 115 - DNA, 899 bp, Zea mays
  Clone ID: 700047470_FLI
tgtttacttgcttggagattatttttgtcagataaagagttcaacctagaccaccctgctgccaaccctctggcgcctggcagaggaggccctccactgaagtgcatgccgccgaccttaacggttattgccgagcatgactggatgagggatcgagcaattgcttactctgaggaactccgcaaggttaatgttgactcgccggttcttgactacaaggatacagttcacgagtttgcaaccctggacgtattcctaaaaacaccacaggcgcaggcctgtgccgaggacattgccatatggatgaagaaatatatatccctcagagggcatgagttctcatattagttgtagcaaaaaccatgcattgtgaaataggccctttgcagggaagcgtcaatgtgttcttttcaactggtggaaagagggatgttggattgcagtcgggtaaaccagctagcttaatgctgagtactgagtcctttaggccctgttcggtttcaccggaatagaccaggatttattccagctcatcaaaatctatataaattagagaagtaatccggctaggaatcaatccgaggctcaaatccataacaaccgaacagagccttagtgatttttgtggaagaatgtagtgtgcaaagttgtagactgtaatcaaaagatactcttccccttgtagagcttaattctttcattccttttgtaccctttgtgtattttggaattactggtgctgggggttaccattttttgagaagaaatagcaatctcagtggccatacttgtggagcactgagctccacacaacgacatgtaacctgatcgttcattttgttccgcgtagcgtatctgcttatatcagcatgcatcctttttgttgaacattgtatttt

SEQ ID NO: 116 - DNA, 1688 bp, Zea mays
  Clone ID: 700047484_FLI
ctccccgtcccagatcccatcccgcggcagccggtcagtccgatccatctccagtacccagcccgtcacccgccttccccgttcgctctcgtcggcgcgcgatggagggtctcatcaaggggttggtccacgtggccatcgacgccgtggaggacgccgtgagggagagggaccacggccgcgccgacgacgacgaggtgccgaggaggagggcggcccaaagctccgatccagatgacgacggggaggaggaacgcgacgaacgatcgcggtcgacgtgggccgaggtcgtctccgagcagaagggcagcgatccggacgagcgccgggaccatcgaagctcggggcgggacaatcgccatgagaggagggatgacgagggttggaaaagggccgatggtcggaaccagcagcagcaccacgcaggccggcagaaccagtgcgagggggaggaaaggtgggatggcagtggcagccggcggcgtcagcaacagcagcaggcacaaggatacgggaatcagcatcaggaagaagaaaggataaacgatggaggctggcagaccgtcggtgagaaaaagcgccatggaagaccacagcagtctgaagcatggaatggatacagaaagccaccatcagaacaaaagtactctgaggatgtcggtcatatccaccaaggactcaatttcgagcccaccagggaggagctgaatagcttatcgaaagcgtgtagccgactttgggagctcgatatgaaccgtattgttcctggtaaggactacataatcgactgtggcaaggggaagaaagtttatcagaagggtgatatggcatctgaaagcttgttcagctggctaggcgacgatgtgctaagaaaacccacctactcacgtttctgcgcacttctggataactacaacccccaccaggggtacaaagaagttgttacccagcaggataagcacgaagaaatagctttcgttgaagagatcgctagaacagcgccaattaagtacttgcaccggtacttagtgcagaagggggctgtgcctcaggactacgaggacttcaagagaatgctgacatccctatggtttgatttgtatggaagaggtggcaactctagctgctcttctgcctttgagcatgtgtttgttggtgagatcaaaggacggggacaaggggagagtgaggtatcaggcttccataactggattcagttttacctggaagaagccaagggaaatgtggattaccaaggttatatatttccaaggcgccgtggtgaatcgcctgattcagagatacagctgctgactgttcagtttgagtggcatggcgtgctgaaatcggtatccagcacgttgattggcgtcagtcctgagtttgaggttgcactctacacgttgtgcttttttgttggaggggaagacaaccgcgtcgatattggcccgtatagtgtgaacgtcaagtgctaccgattggggaacaacaaaattggatcagcctttcccattgtagagaactgattatctggtgctatgcttctgcaggtttccaaatattcactttcttcgtttcataatcaattacgtgaagttaacaatgtactattttacttgtgcatgaaaaggtaccatactgttcaatttgttgctgccatctgcaatagtattgctacttgcactgct

SEQ ID NO: 117 - DNA, 939 bp, Zea mays
  Clone ID: 700047520_FLI
cttgactaggttattgctgatcacttgtcagctgaagaggttgaggacataaaggatatgttcaaggtgatggatactgataatgatggcatagtttcttatgaagagttaaagagtgggattgcaaaatttggttctcatcttgcagaatcagaagtgcaaatgcttattgaagctgtggatacaaatggtagaggagcactagattatggtgaatttttggccgtctcacttcatttacaaaggatggcaaacgatgagcaccttcggcgggccttcctatttttcgacaaggatggcaatggtttcattgagcccgaggagcttcaggaagccctgatggaggacgggggagctgataccatggacgtggtcaatgacatattgcaagaagttgacacagataaggatggtaaaattagctacgaagaatttgtagcgatgatgaagactggaacagattggaggaaggcgtcgcggcattattcaagagggcgcttcaatagccttagcataaagcttataaaagatgggtctgtaaaactgggtagcgagtgaggttgtagcttgctgccgatgctcttctccacgcattgtagtctgcctctcgggcccgctaagcagaaacccccttccgtttgctaatgattattttgtctgggatttaggtagttggagcctccctgattggtttactcgtgtaattagtagcccttttcagtatcgctgaggagcctgcctccgtctgtctgctcatctcctccggtgtacccgtcgctcaaatggaagtgttgtaaaatgttttggtgttgacctcaaatgcaatttgctggtttcgtgtactgacacccaagattcatttgcgcctataaggctaactgtgaaaatttacgtcatttgatgaggaaatgatgaagcgctagctgatttgtcttgggt

SEQ ID NO: 118 - DNA, 799 bp, Zea mays
  Clone ID: 700047524_FLI
ctcccctgttcggttttaggagacctgcgccgctcctccggccacgcgagcacgccgaaatggtcgcccacaggttccatcagtaccaggtggtgggtcgcgcgctgccgaccccgaccgatgagcaccccaagatctaccgcatgaagctctgggccactaacgaggttcgcgccaagtcgaagttctggtacttcctgagaaagctgaagaaggtgaagaagagcaatggccagatgctcgccatcaacgagatcttcgagcgcaaccctaccaccatcaagaactacggcatctggctgcggtaccagagcaggacggggtaccacaacatgtacaaggagtaccgcgacacgaccctgaacggcgccgtggagcagatgtacaacgagatggcctcgcgccaccgcgtgaggtccccctgcatccagatcatcaagactgcgacggtccacttcaagctgtgcaagagggacaacacgaagcagttccacaactcggcgatcaagttcccgctcgtgtaccgcaaggtgaggccgcccaccaggaagctcaggaccaccttcaaggcgtccaggcccaacctgttcatgtgatgggcctcggcgggcgggctgtcgcgcacctctgttttgtgtcttagtgtccagagagataaaggtttttgcctctgcaagatttgctgccccgtggactgagcaattcgatgattttttggatgatgtattgcaaacccttgacttttgtcctactagttatgagcaggctgctctttacttgccctgtctcgcattgcctg

SEQ ID NO: 119 - DNA, 1515 bp, Zea mays
  Clone ID: 700047552_FLI
gtctctctctgtctagcggccgagtttaacagttaaaccctagctcaccgtcgtgctcgcctccccgcgcctgctccggtgctcccttcaggcactgacagttcgccgccgcggcggcgctttcgagcccacgcggaagcgcacctagtgccatggcgaagaagcggaagcacaccgacgcccaggcagagacggccggcgcagagaagccagacgactccgcaccggcgcgcccggagcgcacgctcttcggcttcaaggatccggcccccgacgccgtgcctgactccgcggcctccagggccgcggtggcgccgtttaggaacagggagaaggtactcatcacctgctcccgccgcatcacgtacaggtatcgtcatctgatgcaggacgtgttgtcgatgctcccgcacgcgaagaaggacagcaaggtcgagtcgaagcagagcaaggggaacgctctcaacgagatgctcgagctcaggagctgctccagttgtctcttcttcgagtgccgaaaacagaaggatctttacctttggatggtgaagtctcctggaggaccatcagtgaaatttctagttaatgctgttcacaccatggaggagttgaagcttacgggtaaccatctgaaagggtcacggccacttcttacattttctacaaattttgatgagcaacctcattggaagcttgtgaaggaaattataactcatatatttgctactcctaaagatcaccgtaaagcaaaacctttccatgaccatgtatttgtcttctccattgtggatggccatgtttggtttcgaaactaccagatttctgttccccacaatgagattgataaagttgataaaggtggtatggataaaatgacacttattgaggttggccccaggttctgtttgaatccaatcaaaatatttggtggtagttttggtggtcctacatggtatgagaacccatactacatttcccccaatcagatccgtgcactagagaagaggcagaaggcaggcaaatatgccaagaaggtgaaggccaaggtgaggaggaagatgcacgagatggagaacacgctggagcctgatgagtttgctgagctctggaaaggggagtaggctttgatcgaccctgtcaatgtcgtgaagcacccgcaactcctgtcagcaagcgcagattttgtttacctgtgtggcagtgtctatgttgtggaagttttgtatgacaaggcctacgtttattttacataaaatcggattttagtgataacttatgcccatatgacattctctcttgtttgcttctagtggatgtagtgccaagtgttatatcacttatgtgattggtagctgagaatcatggggaagcgcgatcacagttcaaacctcaagatatcaatgtgatagccatagccgtgttccatatgtatactatgtacttcatttcagcaatggttttgtaaggaaaatagatcgagcttcatttaaagtaaagttttagtgtttgatgagc

SEQ ID NO: 120 - DNA, 783 bp, Zea mays
  Clone ID: 700047582_FLI
ggcttttctgggcaagctgctggacggcgagaagcacgaggtcgcgttcacggtgaccaacgccatggacacgtggttcgtcgacgccaacctccacctctggctggaccccaggggcgcagccacggcggcgggcattgtgagctacgacgcgccgccgctggacacggccaccgcgactctgcccgatggccccgacaacgggctctactacacgacagcgttccgacacgtctccgcctccgggtgggtgcacacgccgtcgtacggcaaggtcacggcgacgtggacgcaaaggttgggctacgagaacactatcaacttccgcgacagctttttccagccggaggtgaaccagaccacggacgcgtactccgccgcccacgtcgcggaccacgccggcgtgctgtacgcgcaggaggcgcagcagagcttcacgctgtacaagttcgtgggagtggtgaaccagaccgacatcgactcgtacaccgcggcgacgaaggtgcagctcgggttcagcgacgaccgcgtcgccgccggccggtcggggttctgggcccggtcgctgagcaactcgcaggagtgcgcccgggacgtggacgtcgaggacggggaagccgtccgggagtcgtgggccgcgcgccagacgtacaggtatgaggcctccgacgcatgcttcttccggaacgtgaccagccgaggcaacaacgtggtgtccgatcactccgacgagacctgcgtgaaggaatcgccagccgccgccggtggcattgcagagcgggc

SEQ ID NO: 121 - DNA, 1064 bp, Zea mays
  Clone ID: 700047591_FLI
gttcattgcccacttcacctcctacttctgcaacaagaagttaccttgagatgtctaaacagtggaaggcctcacccttgccaactgaacctgttgaactttttattgggatcctgtcatctgctaaccatttcgccgagcgtatggcagttcggaaatcatggatgatttctaccaggagatcatctgatgttgttgcgcgcttctttgttgctctgaatggaagaaacgaggtcaatgaagagctgaagaaggaagcagattactttggggacattgttatagttccattcatggataactatgaccttgttattctaaaaactatcgccatcgttgagtatggggtgatggttgttcctgcaaagcacataatgaaatgtgacgatgatacgtttgtcagaattgaatctgtattggatcaagtaaacaaggtcccacgtggaaagagcatttatatgggaaatataaactactaccacagacccttaagatctgggaaatggtctgtcacatatgaggaatggccagacgaagtgtatcctccttatgctaatgggcctggctatgtcatttcatcggatattgctcaatatattttatccgagtttgataataagacattaagattattcaagatggaagatgttagtatgggcacgtgggttgagaagttccatacgactcgtcagcctgtagagtatttgcatgatgtcaggttctaccaacctggttgctttgatggttatttcaccgcacactaccagtcaccacaacacatgatctgtctgtggagaaagttgcaagctgggagcgctcaatgctgcaacgtaagatgacagtggacagcaccgggataagtataacggagaactcactaatcatcgagacataacacagaggatactgcacttgtactgtctgctggaccttgcgaccattcgttcattctttggtcagtagttgattcagctgctgatgctaacactggagatccatgttcttagggtactgtctatcatatttacaagagaaattcattgttttcgttcatctgagtcctg

SEQ ID NO: 122 - DNA, 1002 bp, Zea mays
  Clone ID: 700047678_FLI
gcgacgcccacctcgcgcgccagctcctggagctctgccacgccgtgctcgacatgtggcgggcgatgcggcagcaccacgaggcgcagggcctgctcgcgcagcagctgcgcgggctgagcagccgcacgtccatggaccccacgagcgagatccaccaccgggccacgcgggcgctcgaggccgccatgaacgcctggtccgcggccatggcgcacatggcgaagcaccagcgcgactacgtccacgccgtccacggctggctcaagctgacgctgacgccggtcaacggcgcggccgacgccgaggcctctcccgtggcggcggagctcaccgcgttcgtcgaccggtgggggaaggtgctcgaccgcgtgcactgcgtggacgtgctcaagtcgatcaagagcttcgcgggcgcggtccgcgccatccacgcgctccagagcgacgagctgcgggtggcgcggcgcgtgaggcagtactcccgcgagctggaccgcaagtcccggatgctgcggcaggtcgagaagagctactacgactcgtacctgcccgggggcatgtcggtgtggcactgggggaggcaggcgcacgatgcgggcaacgaggtggcgcagcgcagggacgagatcgcggcttgccggaagatggtggaggacgagatgcggaggcatgccaaggccatagacgccacgaggacggccacggtcacggccgtgcaggggaagctgcctgccgtgttccagtcgatggccgcgttctcggcgtcgcttgcgaactcgctggaggccgcgtacagggttccacagcagaacaacatgcaggagtagccgctcgttcttccttgcgtttgcaatttgtttttcttgttttcaggacctatacatacaatacagaatacaaatagagaacgtagaataaggcacaagacaacattatcgacttatcgtagtgtttttggctttgttgttagccattgtaaatgaatacaaaactgcatac

SEQ ID NO: 123 - DNA, 1994 bp, Zea mays
  Clone ID: 700047686_FLI
agaaaaaagaactttcaccatcctccctatcaatacaagattcatctacacaaattataatatactccgtgcgaaggaaagatcaaattagagattcattcgatcaattctgattgtttccttccattccaaaccaccttcaattctgatttctgcgggtgtgggatatcgtccccccttgccattccaaatcctcctctgcaattttctcatggcagctgacgtttccatcccaactcgatccgcgtcaaccgcccgctaattcctcctagttctagtcccctctctcctgcgccgactcatctttttcctcgtgtcactcccctgctgctgctgctgccgggaagatcaaatcccgtcaaaaggctccaaaggatcagagttctgtcaagatggcatgcccaagaggaaggacaccatttcccctttgtttctttctgatgatttgcctcatggctcagctgggagcttccaatgttgtactcatggcgaacaacactaccttgtcgttggatgatgtcgaggcaacttttactccagcagtggaaggttcaggtgtaagtggcgttctttatgctgtggaacctaaggatgcatgcagtccattgagagcgaaagcgattcaaggctctgtctcaccttttgcgttgattataagaggcggttgccaatttgatgacaaaattagaaatgcacagaatgctggattcaaggctgctgtagtatataataatgaagataatgacatccttgtttcaatggctggaagctcgcttggtgtccagatatatgcagtgttcatctctaaggcatcaggggaggagctgaagaaatattcaggccaaactgatgcagagttatggataataccaacatatgagaactcagcttggccaatcatggcaatttcattcgtatcactgcttgctatgtctgctatcctagttgcatgtttctttgcgaggagacaccagatcagacgggacagggcaagacttccccgagctcaggagtcccatggaatgagcagtcaattagttaaggcaataccaagccttattttcacaaaagtgcaagaagacaactgtacatcagcaacatgcgccatttgcttggaagactacagtgttggagaaaagataagagtgctaccttgtcgacacaagttccatgcggcttgtgtggacctatggctcacctcatggagaacattctgccctgtatgcaagcgggacgcaagtgctggaacgtcagacccccctgtatcagagtctacccctttgctttcatcatccgccacacgcttgccggaatcaactgtgttggcttccttgcggtctacagcagcagcgtctccccccaggacgatcagccggcatcctttgttgcggtcaatatcccgcaattactctgtttcaggttccagtatccttcgcacccccgactctaggtttgatgcaaactcatctatctgcacaagtggaagcaacttggaccttgcaaatgtaccatccccatggtctggcacttggcaccgtgcgtctgctcactctttgtgcaggggctacttgtccccaccgatcggcatcaggaatacctcagcacatgtctcgcgttctgccaatggatctcccagtcgttacgtaggctcatcacgcatgtcccatggatcttcagggcagcagcatcctcacctgaggcactgcacattgtcaggcccgagcctgttcaccatggtgccccagtcaccgcaacagaaccagttgcagcatggtggatactcggaaacaaatctgtcggctgccgcatcggctcaatcattccgtcagctctacctgcagcattgccctgattctgacacgtcgtctcagtcacttccagggtgctgatctcttgctgcaatattcactgattcttgcgcccatgagaaatcttgcctggtgctgaattgacatgtggattttgagctcgtcagcatagttcaccatgatgat

SEQ ID NO: 124 - DNA, 868 bp, Zea mays
  Clone ID: 700047731_FLI
ggaccggccatcaccacccaacgacaatcaagatggtcaatctgcgaactcagaagcgcctggcctcagcggtcatcggctgtggcaagcgcaagatctggctcgaccccaacgagcagagcgagatctccaacgccaactctcgccagaccatccgaaagcttatctccgatggcctcatcattcgaaagcccgtcacccagcactcacgatcgcgcgctcgcgagctgaacctcgcccgacgagagggccgacaccgtggctatggtaagcgtaagggtaccgccgatgcccgtatgcctagccaggtcctctggatgcgccgcctccgagtcctccgccgtctcttggtcaagtaccgtgccagtggcaagatcgataagcacctctaccacgagctgtaccatagcagcaagggtaacgctttcaagcacaagcgtgccctcgtcgagcacattcaccgtgccaaggctgagaaggcccgtgagactgcccttcaggaggagatggatgccaagcgtgcgaagaacaaggctgcccgcgagcgcaagcaggagcgtgcggtggcgaagcgaaatgctctccttgccgaggagtaagattaaacctagtggacaatgacaacatttcggtcttgagaggaggctgcattcggagtctacgggttgggtctctttttatgcccttctggtttctacacttgtaccggcgggggttcaggcatgtagcattgaaaaaaaatggaatcgatgatgctcggatgcttggatgtttcaccatttacgaccttctcgtgagcacttgttccgctcatcacgacttaagtaccaccagcgttttaaaaaataatgtgcgcggtctggcttat

SEQ ID NO: 125 - DNA, 1731 bp, Zea mays
  Clone ID: 700047754_FLI
attgggcctctttctagagtctggcaagtcatacactttgtgcctggttgaggcttggtctgctgaatctatgagcaggagaagcaatgcatggggtagaaaagttgaggcaatagatgaaagtgatgacacctgtggtttctgtggagatggtggtgaattactttgctgtgacaattgcccatcgacatatcatcaagcttgcttgtctgctaaggagcttccagaaggtagttggtactgccataattgcacttgtcaggtttgtggggggccatttagtgaaaaggaggtttcaacattctcggcgattttcaaatgtttccaatgcggagatgcataccatgacacttgcattgaacaagagaagctacctcttgaggatcaaatatctcagacatggttttgtgggaaatactgtaaagagatattcatagggctgcgtagtcatgtcgggacagataatattcttgacagtgacctttcatggtccatactgagatgcaacaatgacgggcagaagctacattctgttcagaagattgcctgtttggcagaatgtaatatgaaattagcagtggctcttactctattggaggaatgtttcattcgtatggtggatcctagaactggtgtggacatgataccccatgttttatacaacaagggatcaaactttgctcgtgtggattatcagggattctatactgtaatcctggagaaaggtgatgaaatattatgtgtggcttctatcagagtacatggaactaaagccgctgagcttccttttattgctacttctgtagactttcgacggcaaggaatgtgccgaattctaatgagcatcattgaaaagatgctctgttcatttaatgttaagatgttggtcctttctgccatcccagagttggttagcacatgggtgtcaggatttggcttcaaacctatcgaagatgctgaaaggaaacaacttcataatgtaaacttgatgttgtttcctggaacatccttactaacaaagagattggatggatttattatggccacaaaaccaggcgaggaaaaggatatacatgaagtttctggagtgcctaatcttaagcgtatgcctaatgggaaagcaaatgagcatttcaaactccatgaccttgatttgtccgggacagagtttaaagctgaggtttccgtgaatggtccattcagaacactgaaacatgaatgtggttcagcagcatggtttcagtctactaagttagctgttggggaagtgtgatattcttacacaaattatctgggctcatgctctgcatcgatactagctgctttgtgttggccaatttcgtcttcccacttcatggctcaaattaatttgcagcagcaaaatcattcgaacacttgctgctgcatgaactcatccttttcaagtaaagttctcacaagactactgggaaatggttgggatgacgcaggcatccatgaatttgggttgagcaaagttgaagaaaccacagattggtgtggtctgttctgcatcgagaaaatggaaattataactgtctctcctgggtgaagtgctctcctgagactgggtaaagtacgcaacacctgagttgatattgcttgcacgttgaaccaaggaggatgtatttgcactccaacgtccaaagtgtaacgcattcggccccttttcaaagtaagccatgataggaattaatctaagctgtttggtat

SEQ ID NO: 126 - DNA, 1510 bp, Zea mays
  Clone ID: 700047845_FLI
caaaattggaggcttgagtggaagcttctaggaatttcatcacgtaagtcattagctgatgctgctgtactggctcttgagaagaatcttacagaacagaactatcttcttgccaaatgtaagttgttgaatctcccctgcataatagatgccctaaatgacctatttggttatgaaatcaatgaatatgtactaagtacaagtcagatgtggtttcagtacatgacatgcaccccactacggagggataaatacaaagaaatactgtcacggctgcaaataaaccgaccttcttttggttcgcagagatggtacttaattttccactcattggaagctgctttgcagtttaacaatgagctgccagaccctcaacagatagactccagatattatccagctaagccatcttttgcacagctaaaagcagcagagaacttctgtgatcttgtaagggcgatttaccatgcagtaaaagtagtttccagaacttgcaatggggccttgaattcacaatttcacgcagtttggaacttgaagatggctctgctccgttcatctacaaaggaagacatcgaccaagtttttaatattgaacaaatgaagctgaaatttgaccagctttggaggaaatggtacctatggctgtcgttagctgttgttctagatcccagatataaattcaggtttcttcttgtttgctttaaggaagcctttggtagtcatgccaaaaggtacatctttgaagtgcgaggaaagctgtacgagctctttcttcagtactcttgtcatgttgatcaacaaaatagtgacagctttgatcagagaaccaatgatttacagttggatacacatgatagcacaccagtacatgccgcaagtcaaaatttcattgagcaagcagcacatgaggaactgggagaagtcattagataccttgaagcagagcttattcctcaaaatgccaattttgatattttgaaatggtggaaggaaaatgcttcgacatatccagctcttgccaggctggcttgcgacatcttagcaattcctggatctgcggtctctgctgaatctgcatttgatgaaactgatgaacgggtgggacttttcaatctgaagctgagtcctgaattagttgaggccctcgtttgcacccaggattggatcaaatcttcagaaataatttctgacgaagttgatggaaatataaacatgcctgcctaatgcacagcaagctccctcggccgtttcattggttcaataaaaaaatgaagagagccctttagaccttctcagtataatgcgtgacggagtctaattggcaatgctttgtaataacttgttttgttgtgctattcagcgtgcaaaaatatgaacaatattagtcttttattaagtcaattgtgcagtacatggctgaaatatggaatgtgtactatgtgatgactatgtgaatggctgaaatatattaaaaaaaaacttcaaaacccaataattgtttttgctg

SEQ ID NO: 127 - DNA, 890 bp, Zea mays
  Clone ID: 700047847_FLI
cattataatatgttaaacaaagctaatatattagtctccttgtaggttacaacatggtttatcgttctcttgctttgataaatgatggcattttattgtttattacaaaaacagtatgcctcatctgtctttatctacaactgtgctggcagtctgttttgaccttttctaacaatcaaagttctccagggctcaagaacagcaacttggacgcatgtgtacttggagctctcgaggttcttgccactggtgttacaatcacgttcttggacagagctggccggagaatcctccttattatatcttcttgtgggatgaccctaagccttcttgcggttgctgttgtattttacatcaaggataatatttcacatgattctgacatgcataacatcttaagtatggtgtcgttggttggtgtcgtggcttatgtcattgccttctgcttcggcatgggtgccattccatggatcattatgtctgagatccttccggttagcatcaagagtgtggcaggaagctttgcgaccctagccaactggttgacatcctttgggataacaatgacagcaaatttgctcttgagctggagtgctgcaggcacatttgcctcctacatggtcgtgagtgcgttcactctaatgttcgtcatcctctgggtgccagagacgaagggaagaacccttgaggagatacagtggtccttccagtagtgagctgcagcagcattcatcagtaaatgcagtcatcagcaaggtctggtctgagctgctgtatgtggtgtggcggcatttcttcttctttttgtactgcaatctcttctgtggcatcatttggtgtgtaagtttcctgcatgacattgatagtagggattaacttgcatttgtgac

SEQ ID NO: 128 - DNA, 1407 bp, Zea mays
  Clone ID: 700047850_FLI
gctgtttcaagaagaacaactctatagaattgaccactatttaggaaaagagcttgtccaaaacttgcttgtgcttcgttttgcaaaccgcttatttttgcctctctggaaccgtgataacatagctaacgtacagatcgtatttaaggaggactttggaactgaaggacgtggaggatattttgatcaatatggtatcattcgtgatatcattcagaaccacttgttgcaggtaaatatatcttatgaacttcttttgtcgttggtttatgagtgattttccaaacacgtactttttgacttgaatctagactctagaggagtacttgtttagggtggggattgggtacagtccaatataatgcatgattatttggtaatatgattaatactttgtttcatcaccaatctagtgctaatcttctgagcagacacagcagatacctgtaattacattcctcatatatatagcaatgttttgttctggagagagctctggtatgactgtcgctctgattttgcaggtcttctgtttggtggctatggaaaagcctgtctctcttaaacccgagcacattagagatgaaaaagtcaaggttctgcaatcggtggagcctataaagcatgaagaggtagtcatcggacaatatgatggctacaaggatgaccctactgtgccagatgactccaacactcctacttttgcatctgttgtactgagggtacacaacgaaagatgggagggggttccattcatcctcaaggctggcaaagcactaaattcgaggaaagcagagatacgtgtacagttcaaggatgcacctggtgacatttttagatgcaagaaacaaggcaggaatgagtttgtcatacgcctgcagccatcagaagccatgtacatgaaactaacggtcaaaaaacccggactggaaatggcaaccgaacaaagcgaactggatctatcgtatgggatgcggtacaatggcgtcaaaatcccagaagcatacgagcgtctcatcttggatacgataagaggagaccagcagcacttcgttcgccgagatgagctgagggccgcatgggaaatcttcactcctttgcttcacgacatcgatggtggcaagctcaggtccgttccgtacaagccgggaacccgaggaccgcaggaagccgacgagttgagcaggaggatggggtatgtgcagacccatgggtatgtatgggttccgccgaccctttctaaggtttagctgtttgattatcagctgccgtgtaaccacagaatgacagaacgcggggaagatccctttgtaatacgtgggtcgtgtaataagagaaacttctgcttgttgtgagagtgaccctttacggtattggaataaaaaaagaatgtgatgttattatctc

SEQ ID NO: 129 - DNA, 804 bp, Zea mays
  Clone ID: 700047859_FLI
ggacggggcaccactgcctgtcgccctcaagaacccccaccatccccaccgccagcagatcgattcgcgaaagagacgaccgccgccgcatcggaccgtgcccgagccccccttctcctcgctgactcggctcccctcctccgccgtcgccggaggcgaagcaagtggggaccacagaagcattagctgggtgaacccactcaaagggggcagggaattgtgtgctagtttgaatggctgctacaaagcttcaggccctttggaaccacccggctggccccaaaaccattcatttctgggcgccaacattcaaatggggcatcagcattgccaacatagccgactttgctaaaccacctgaaaagatatcttaccctcagcaagttgctgttgcatgcactggactcatttggtcaaggtacagcttggttatcacaccgagaaactggaaccttttcagtgttaacgttgcaatggcgggtacaggcctgtatcagctttcacggaagatcaggcaagattacttatccgatgagaaagatgctgcttcacaactggaagcatagataatgacaacaggcaaagaataacggattggaaagcctgcatcctaggagtctactcttgattttttttttctgggcaagcaaagaataacggatgggtcatgtttgttttcctgttattctgaaatcgtgagcaggctaatgtgaaaatcttccgccaaaaaagaaaaccaatgaagtgatgttttgagcattttttttgtgggaacaagtcatgaaagtacatggtttatctgtt

SEQ ID NO: 130 - DNA, 888 bp, Zea mays
  Clone ID: 700047874_FLI
ggcaaacagttctgaggtgtgagcaatggcggccggccagtttgcagcagcaggagtcctcaccggccttctcgctctcgcaacacttgcaagctgcaacactgatggcgacatactgtacaagcagaggctagcatgggaggatccaaacaacgtgctgcagagctgggatccaaccctcgccaatccctgcacgtggtttcatgttacctgcaacctgaacaactccgtcgtccgtgtggatttgggaaaggcaggcatctccggccccctgcttccagatcttggagcacttgagagcctccagtacatggagctgttcggcaacagcctgaacggttcgattccgtcaacgctgggcaacctgactgatctcatcagcttggatctctgggacaacctgcttaccggcccaatcccaactacgcttggttccatcagcacgctgcgatatctgaggttgtacgagaacaacctgacagggcctataccaccatcgtttggcaatctgactagccttctggaactgaagctccacaggaattcgttgagcggttcgattccggcctcccttggcgacatcaaatcgttgcagttcttgaaattgaacgagaatatgctgaccggcacggttccattggaagtcctctcccttgtcgttgttggcaacctgaccgagctaaatattgcaagaaacaaccttgatggcactgtgagatcatccggacttagagtgactgcggttatccaggacatgaggattgcatgatggcttgaagagtcctggatcaaggctttgttttaatttgcttcatgttttaatttgcttcatgtagacactgcaaataaatgaataattgcaatgggatacattggcctagattattc

SEQ ID NO: 131 - DNA, 816 bp, Zea mays
  Clone ID: 700047887_FLI
ctacatcgttagtggccagagagtaaacgcggagctgatagagtaccagatcctgtgctgccgagcacactcttctggacagtggcttcggctgctgctccacccgaaatggaagtccggcagggacagggacgaggagctgcaaggcttcgccgtggatcggcccgagcctctggtgcacttcgcactgtcctccggtagctactcggatccagtggtgcggctctacagccccaagagcctgttccagcagctggaggcggcgaaggaggagcacatccgcgccaacgtcgccgtcggcgtgcgcgggcgggggcagcgcaagatcatcctccccagggccctggagctgtacgcgagggacgccgggctgggtgcgcaggaggtggtggccgcggtcgcgtgccacctgcccgacggcctccgggacgccgtgcgccggagcccgccggccgggcgggcgcgcggcggcgtggagtggaagccccacaacctggcgttccggtacctgctggccaaggagctggtcggcgggtcgcccgcgtgcgggcggcagcaacttaagaaatgcggccccccgatcggtgcgccgctgcgtgctgatcggtgatccgtcagcagatcgccgtgggtccgtggccgtgccgagccgagcccgaggtgcggtgcgggggtatcagggtctgtatgtacagagggagatggacaggaagatgatctgaatagtgtgcgctctgctgtagctagtttggatcattctgattggatgggattgaaatgaatatgagtgtatcctaacttgccctcaatcccatg

SEQ ID NO: 132 - DNA, 1776 bp, Zea mays
  Clone ID: 700047895_FLI
agaaaatccgcaattttattgtcgtcctcgcccgctttctctgaccgaccggaaaggcgctgcccaaacaaacgcggaggaagaagggaactcgccgcctagggttccgccgccgcctactcttccgccgatcaaggagcgggaatcattgcgcgatgccgcagtcggtgctggtggaacgcgcgacgagcgagtcgctcatcggccctgactggtctctcaaccttgagatctgcgacatcctcaaccacgacccctcgcaagccaaagatgtagtgaagactatcaagaaacggattgcacacaagaactcaaaggtccagcttcttgcattaacgttgctggagaccttgattaaaaattgtggtgattttgttcatatgcaagttgctgagaaggatatgcttcatgaaatggtgaagatagctaagaagaagcctgactatcacgtcaaagagaagatattaattctgatagacacttggcaagaagcttttggtggtgcccgtgcaagatatccccagtattacgcagcatatcaagagatgctgcgtgctggagctgtatttcctcaaaggccggagagtactgtgccaatctatactcctccacagacacagcctctacggaactatccgcctcctgcattgcgtaacactgattatcgacatgatgtgcctgaatcctcttctgcaccagaagtgcctgcattaagcttgacagaaattcagaatgcacgtggggtcatggatgttctttcagagatgttaaatgctatcgatcctggtaacagagaggattgtatgttgacatgttccagattgttcaactggaccatacagttccagaagttctagtcatccctggatttctaaatagtactcaacatgcagggtctaaggcaggaggtcattgtggaccttgtggaccaatgtcgttcatacaagcaaagagtggtgcagcttgtcaactcaacatcgtcaaggtgaacaaagcaacgaccttccactaccaccctgggaagctctgcctgcagaaactgagcaattagaagctgaccatcctggtgggttgtcagctctgccacaatttggagttagtcaaccccagccagtccaaattacacattctgggcagcaagtgttaccatcgcaattaatgccaactggacaaccgggagggcagttccagcctagatttggggctcaacaaccatatgctacagaaaatacgcagtatggaggaatgtatccgccagtgcaaggcaaccaaccaacgggtatttatccccagcaaatggctggagatgtctaccagcaacagatgtttggtggccagatgataggttatggctatggtccgcagcctggaggctactacgtgccgaacgccgcatatgcatatgccggtgcaaatgatctttctcagaggatgaatggcctctcgatgcaaggcaacagtctgtatggcacacccgcgtcgtcttccctccagcagcgtaacaggccaagcagacctgaagattcgctctttagtgatcttgttagcatcgccaaaacaaagccttgtaaaactgcttccaacaaggctggtaacttgtaaacatgagtttctgctcatagtatataaaattcttgaaatttttttcctattggaaagtagtgggcgagatttgtatatcctgatattgataaagatgtttacatcttttcaagaaattatattttgtttacaagtattctgtaccattaatgtcttatgtatatacataggagc

SEQ ID NO: 133 - DNA, 1071 bp, Zea mays
  Clone ID: 700047909_FLI
caacaacacactccaatcgtcgctagccggccagtactgtccgtcacatacacacacactgacaccaccatccacaagaatctctccacgctacagccgctacatactgcagctgcaagctagcgaggcaagtgtgtaacaactaagatgaagggcaaggcgtcgaggttcctgaagcagatggtgtcgaccatcgtggcggtagtcaaggccaagtccacggcggtgccgcgtcaagaccagcgccctcaagacgcgcctcctcatcttcggcatcctccgcaacaagaagctgctcgtcaccgccatcaaccacaagatccacgccatcatggggcagcagcaggaagcagcagacaacggcgccggcaagcagcagcgcgacagcagcgacgaagacggcggcggcggcggcggcaggaataaggccatcgtgctctacaagccccccagctacagcttctccgcggagctgggcgcccacgaggcggagccgccgccgcaggaggaggaggaggaggacagcgacgactacctcacccactcgctgttcgccgacgaggacgacgagctggtcaacgcgccgggctcggtcatcgacgtcatgcgcgacgccagggcgcgggaggccggcgacggcaacgccgccgagttcagcctcgaggacgagatcgaccacgtcgccgacgtcttcatccgccgcatccaccgccagctcaagctgcagaagctcgactccttcaagcgcttctgcgagatgctcgagaggagcaccgcctgacgcccatggccaccgcatcgtgcatgcatcttcattcacatccatcgtccatccgtgctgccaagtgccaactaatgaattaaccagcaacacttaattaagaggtagtgtgcatggtgaaacaaaaattattaacatggcttctagctgctactgctactgctactagcaatttttgcctctctggtctggtctgccaaggctaccgctgctgtatgaataacttggagatcgaccgaaaaattacatgcatgtaagtagaaggggttaataaaggtggtatgcagacg

SEQ ID NO: 134 - DNA, 1350 bp, Zea mays
  Clone ID: 700047920_FLI
cgcccctcccttcccgcctcctccgcgcagatcgccaggcgaggaaccagaccgcagggcaggatgcagtacaagaacctggggcggtcgggcctccgcgtcagccagctctcgtacggcgcgtgggtcaccttcgggaaccagctggacgtgaaggaggccaaggtgctactgcaggcgtgccgggacgctggcgtcaacttcttcgacaacgccgaggtgtacgccaacgggcgcgccgaggagatcatgggccaggccatccgggacctgggctggcgccgctccgacgtcgtcatctccaccaagctcttctggggcggccagggccccaacgacaagggcctctcccggaagcacgtcgtcgagggcctccgcggctcgctccgccgcctcgccctggactacgtcgacgtcgtctactgccaccgccccgacgcgtccacgcccgtcgaggagacggtgcgcgccatgaactgggtcatcgaccagggctgggccttctactggggcacctccgagtggtccgcgcagcagatcaccgaggcctgggccgtcgccaaccgactcgacctcgtcggacccatcgtcgagcagcccgagtacaacctcttctccagacacaaggttgagtctgagttcttgccactttacagcacctatggcattggtttgactacatggagtcctctggcttcaggagtactatctggaaaatatggcaaaggggacatacctgctgatagcaggtttgccctagacaattacaagaacctggcgaacaggtccctggttgacgacacgcttcgaaaagtgaatgggctaaaacctatcgccgctgaacttggcgtttcgttagctcagctctcgattgcttggtgcgcgtcgaaccccaatgtgtcgtctgtgatcactggagccaccaaagaaagccagattgtggagaacatgaaggccctagatgtcatcccactgctgacgccggaggtcgtcgacaggatcgaggcggtggtccaaagcaagcccaaacgcaacgtcgagtcatacaggtgaaaattcggtgttcatccgacggagttcaggcctcctccacgaaacttcatccatgatccgtgtgtattctgggcgtggtgctgtgttcacaaacacaagtctgtcagtcctgtgttgtgtattctgctttccgatacagattttggaccaattcaatcctgcattgtgttgcttgcgagcagaaagatttgttggatgaccatgatcctttctggtcgtgctgcaagatttctggagcgtgagatcctctgctgtatcactgtatcagcagctcatgctgttggctgttgcttgcag

SEQ ID NO: 135 - DNA, 1088 bp, Zea mays
  Clone ID: 700047922_FLI
atcaagctaggcaggcctggtcccgaagaacacccttctctggtcgtcgcatcgcagggcagctagctaggtagctaacatccgccatggcgcgcgggggagacggcctgcaggtgctgagcgcgctggacgcggcgaagacgcagtggtaccacttcacggccatcatcgtcgccggcatgggcttcttcacggacgcctacgacctcttctgcatctccctcgtcaccaagctgctgggccgcatctactacacggacaccagcaaggacagccccgggtcgctgccgcccaacgtcgcggcggcggtcaacggcgtggccttctgcggcacgctggcggggcagctcttcttcggctggctgggcgacaagctggggcgcaagagcgtgtacgggatgacgctcatggtcatggtcatctgctccgtcgcgtcgggcctctcgttcggccacacccccacgggggtcatggccacgctctgcttcttccgcttctggctcggcttcggcatcggcggcgactaccctctgtcggccaccatcatgtccgagtacgccaacaagaggacccgcggcgccttcatcgccgccgtcttcgccatgcagggcttcggcatcctcgccggcggcatcgtcacgctcgtcatctccgccgccttccgcgcggcgtacccgtccccggcgtacagggacgaccacttcacctccaccgtgccgcaggccgacttcgtgtggcgggtcatcctcatgctcggcgccgcgccggcgctgctcacctactactggcggatgaagatgcccgagacggcgcggtacacggcgctggtggccaagaacgccaagcaggccgcggccgacatgtccaaggtgcaaaccgcggcggcggctacggcaacaacgacgggaactggaggaactgagcggtggggtccgctgaggcctagttatcttgttcgcttctgctaccgtgttcaccctagtctagagggggtttatcttcgtctgtggtcgtctcgtgtccgtatgtttcgtttcgtgttcgttgttgttgttgcccatctgtgtttttgaccgcaagctcgctcc

SEQ ID NO: 136 - DNA, 657 bp, Zea mays
  Clone ID: 700047958_FLI
cacatcgacccttaccagggcgacaaggcgtcggccctgctcgtggacttcttcgacaagtgccagcgtatcgaggagaagtacacctggaagctgtactcggagaggctgatgaccctcaccggcgtgtacgggttctggaagtacgtgtccaacctggagaggcgcgagacccggcggtacctggagatgctgtacgcgctcaagtaccgcaccatggcgagcaccgtgccgctggccgtggagggagagccctccagcaagtgatgcgtgacggcggccacagacctgatcgatcgatgagcgagagggagcactcggagtgtcgtgtcttttcccttgccatttctttctttcttctttttccttcccggaggcgaaaaaaaaagagtctgcttttgctaggcggcgggcgttcgttgctgctctttgcttcaagagttaaatttacctaccttgtcaaggtcttgttccatcattgatccgggtgtcgcttttagtagtctgatggactgttagtagtttgcgttgcgtcggttgagagggaacggtggtggtggtggtgtgtgtgcagtcgggtgtggtgctccctttgtttcctggatgggatgttgctccttgaataataatcgtagtggccttggagcccttttcctg

SEQ ID NO: 137 - DNA, 1500 bp, Zea mays
  Clone ID: 700047967_FLI
ccagctttgctttgtagttgtagcgctagcagcttaactggtctgagctgaggctagctagtcgtgcaggaagaggaaggaatataatggctgagcgggaggtcgtcgaaggcgggacgacgacgggaggcgggctgtggcggaggtatgcgccgcacgtccagatggtgctggcgcagctgtgctacacgctcatgtacttcatcaccgaggccgccttcaaccagggtctcaacccctacgtctacatcacctaccgccatctgctcgtcgccgtcctcatctggcccttcgcatactacctggagaaggggctgaggcctaaaatgacgctcatgctgttcgtggagatattcgtgctctcccttctcggggtgagcttaactctgaacatgtacttcacgagcctgaagtacacgtccccaacgttcgtcacttccgtggtgaacaccatcgcctcgatgacgttcgtcatcgccatcatcctcaggatggagatcgtggacgtgaagagcctacgcggggtcgccaaggtcgcagggaccgtggtgtcgttcgccggggtgaccaccatgactctgtacaaaggagcggccatcacgagcctctggaagtcgcctgttcagatcgccggcagcggcagcggcggcggaggcgtcgcccacgacagctgggtgaaagggtcagtcctcgcagtggccagctgcgtgtgctggtccatctggtacatcatgcaggcgtcgtctctgaagaggtaccccgcccagctctcgctgacggcgtggatgtgcacggtcgggggcatccagtcgaccgtgttcacgctgttcatgcagcacgagccggaggaatggcgcatcggcttcggcgtcaagttctggagcatcgtctactctggcctcgcctgcaacggcttcacggtgttcgtgcagctctggtgcaccgagaagaaaggccccgtcttcgtcaccatgttcaaccccctctccaccatcatggtcgccatcctggcctacttcatcttcggcgaaaacctatacgtcgggagcatcgtcggaggcggggttgtgattctgggcctctacatgctgctgtgggggaaggagaaagaccaggagcggggcacgggcaaagagcgggaacagctcgagacggactgcgagaagcaggcgaagaaggtcagcgactgtgtctacgaagcgcccaagacgacgaagtgactgccgccggccatgagcggcagacggctcaatcaagcgccatgccgtgctccagttcggttctatatttgtgatgtacagagtcaccgatccggtctcgcctcatcagctatgtatatatatgcacatgcaatgcggcaacagacagacgtctggctcagtctgtgaaaccgtgaacctgccctgaagctggagttttttggaaccgtaatatcaccaacactgggcttctgaaaatcggtatcccgaacaacgcaattggaattttagtattataatc

SEQ ID NO: 138 - DNA, 3388 bp, Zea mays
  Clone ID: 700047972_FLI
cgtgcacgtctcgtcatcgccctactcgctcgccccatcccggagtctccccggctcccaaaccctagcgcctcccggacctcgtgagggaggcggcgatgttcttctccggtgacccatcggcgcggcggcgggtcgacctcggcgggcggagcagcaaggagcgggaccgcaaggtgctgctcgagcagacgcgcgaggagcggcgccggcgccagggcctccgcctccagaacacctccgccacgaagatccagaaattcttcagagggaagaaggctttggaattggcccgctcagaggttcggaagaatttttgctcaacttttggggagcattgcgagaggatagagtggaacatctttggcactaattctgactttcttcggcaattactgttcttcttcaatgcaaatgaagacaatgacatcgctatactttgtcatgtctgcaatttgctgctgcaatatgttaaacaaggcggagatgttgtaactctcttcactggtgtgaatggctcctcgctgcaacctcttgttgctcaccgagtaaaaaatttgccctcatctgtgtgcaagcagtctatcaaaagaggcatgattggggcagccaacttttaacaacacctggaaccacatcagtgccttctgtgtcattactggaaactgtaggttgcttgataaatccaaaatttctttggaactgcaaagtagttggttatcttcagcagagaaagatctattgcttatttcgtggcattatcgtatctgtaccgcaaaatgtcagaaattctggtcattttgatagtgcatctgtgctggagcaagtgcttatgcttgttgcttcgcatgttggccatcatccctgttgttgtctgaaagtggatccaagatggagtttctcgtctcagcttctgtccatcccttttctatggcatcgtttaccacaactcaagaaggttttctccgttaacgggctcaacaaatattatatccatcaaatagcttgccttttgcccagtcttgttgatgtccttccaaacgatatatcagctaatcatccaggatatgcgtgcgtccttgcaaatgttcttgaagctgcaacctggattttgtctgatgcaaagttagcttctgattcagcggctgacatcattgctgtttgtacctcgttgttggatacgttgccagcagtcacaacacctactgaaagggcagatgacgatgatgagatgcccatggatgtcaatattaaaattaatcttgatgttgatttggaaagacagataactgcagcaattgattcaaagctacttcaacatttggtgaatgccctcttcagaggtacattaagcacaaatgattctgatctgtctggaccatcagatgctgaagttgatgctgtaggatctatttgtgcttttcttcatgttacgttcaatacatttcctctagagcgaattatgactgtcctggcataccggactgaaattgttcctgcactatggaagttcataaaacgttgccatgcaagccgaagatggccattttttttgaagtttgcatcttcattacctgctgattctcctggttggctccttcccatgtctgtatcctgtcccatatacaagcacatgttgaagatcattgataccggggagttctatgaacaggagaaacccctttcccttaaagatttgaagtccttggttctcattttaaaacaggcattatggcaacttctgtgggttattccatcctcttctactcagaaagtgtcacccaacccttcaggccttaaaaagttgtcagtggagaatgtcaagactagagctagggttgggttatctgaacttctcacacagttgcaagactggaacagccgactaccattcactgctgcaagtgatttctattctcaagaagctacgagcgaaaattttgtgtctcaagtatggatgcctatgcttttttggattaatagaaatgtctttcatcttctatgactatgcatatgtttttcaggcaatacttggtaatactcgagcatcagagatcataaagcttgctccttttttggctccatttaccagtcgagtcaaaatattcacttcccaattaacgtgttctagacaatcaacatcacattctgcattgacaagacagcggttcaaaataagaagaagtcgacttttggaagatgcttttgatcagctaagtttgctttctgaagaagatctcaaaggaccgattcgagtttcatttattaatgaacatggtgaggaagaggttggaattgatggtggtggaattttcaaggatttcatggaaaatattactcgagcggcttttgatgtgcagtacggtctcttcaaggagactgctgatcatcttttgtacccaaacccaggatcaggattggttcatgaactacatctgcaatatttccattttcttggaagtctacttgggaaggcaatgtatgaaggcatacttgttgacttgccgtttgcaacgttcttcttgagcaagttgaaacaaaagtacaattttttaaatgatcttccttcattggatccagaattgtatcggcatcttctatttttaaagcattataatggtgatatctcagagttggaactatattttgttattgtaaataatgaatatggtgaacaatgtgaagaagaacttctccctggtgggaggcacatgcgtgtaacaaatgataatgttattacttttatccatcttgtcgccaatcatcggttaaactaccagatccgtgcacaaagtacacacttcttgagaggttttcagcagcttataccaaaagattggattgatatgttcaatgaacatgaaattcaggttcttatatctggatctttagaaagcttggatattgatgacctgcggtcgaacaccaactattctgcaggatatcatccggaccatgagcttattgagatgttttgggaggtcttgaagagcttaagttcggacaaccagaaaaagtttctcaagtttgttactggatgttctcgtggccccctccttggatttcagtatctcgaaccaaaattctgcattcagagagctggtgttccagggctggaggagcatgcagaccgcttgcctacatcagctacctgcatgaaccttctgaagcttccaccctataaaagcaaggagcagatgcaaaccaaactattgtatgcgataaactcagaagctggttttgatctaagttgatcatgttcgggattcagtatttgtgcagtgtagatagttgttagagaacagcttaaaggcacccagagccaaaccaccaaccctcggcctcattcgaagccccatgaggccacgaaggaaaaaagaaaagaaag

SEQ ID NO: 139 - DNA, 1511 bp, Zea mays
  Clone ID: 700048043_FLI
cagaccctcatcaccaactcccctccatctcgctcccggtcctcactctcctctccgcctcctccctcctctccctttcgaaaccccatcttcgttggcgtagggctcgggggttggagtttgggctcgggggttagagtttggaggaagcattcgtgaagactctgtggcgacttctccagatcggcagatccgtctttctgggcgatttggagcgaagcccccaagtagtttgttacagaaagcagcggcttttgcgtcgctcctgcgtcagtgtacctgttgcgttcgtcgttcctggccccggccttcggatcatatatatccagctaggaaaaggggcactttgcatttattctttggccccttcggagatcgccctcgtcaagatttggtgggaacccaattcgctgggattccctgtggaaaggcgccgctttggttcctgtttccccacagctcccaactctctatatctcaatctcttgttcatctaccgtttcttgctttgacgcaaaccagatcaatctgtggccgttgtttccatcggagctgttgaggtttgtcttcttctcggccgaagacatggcggcggcgaacggagctgccggtgcggtgctgttcagcgaggaggacctgagggaggtgagtggggtgcgctggggagaggacttcgtggaggtgacgtgcggatgcaccagccaccgctacggcgacgccgtcggccgcctccgcgtctttgcgtcaggcgacctggagatcaactgcgagtgcacgcccggctgccgcgaagacaagatgacacctgctgcctttgagaagcactccggaaaggagacagctggaaagtggaggaacaccgtctgggtaatggtccagggggaaaaagtgccactgtcaaagacggctctgctcaaatactactacctggcgcacaagtcaggcaacggttctcacaagggccgtaacggacgtccgtcccaccgcgacgagttcatctgctgcgcaggatgtggcaaggagaggaggtttcggctccggtcaaaggaagagtgccgtgtttaccatgacgctcttgccaaagctagctggacgtgtgcggatttgacaactgatagggtcacctgtgacgacgaggaggagcgtgcaagccgcaaggtcctgcggggctgctcccgcgcgccgtcctgcacgggctgcatgaagtgcgtgtgcttcggctgcgagacctgccgcttcaaggactgcgactgccagacctgcgttgacttctaccgcaactccaaggaataataaaaacacaaggatccaacgccattggttccagcaggagtgctctcaacaacaatgccgatgactgtagggcaggccgctattctattctattctaaacaattccattcgcctaccattctccatggctggctggtgctatagtatccgtcgagcagcgatggacgccggccgattttgctacagtgcagtctaccaatggttcccgacttcccgtt

SEQ ID NO: 140 - DNA, 694 bp, Zea mays
  Clone ID: 700048050_FLI
ccgacatcgtcccttcgtccccacgagcaaccgataatccgccggcgttgagatgttggtttatcaggatctcctatctggcgacgagctcctgtcggattcattcacctacaaggagctcgagaacggcgtcctgtgggaggtcgagggaaagtgggtcacccaaggtcctgttgatgtggacattggtgccaatccatccgccgagggtggtgaggacgaaagcgttgatgacacagctgtgaaggtggttgatattgttgacacattccgtctacaggagcaacctccttttgacaagaaatcatttgtgtcttacatcaaaaaatacatcaagaatctcactgctgtgttggagccagagaaagcggatgagttcaaaaagggtgtcgagggtgcaaccaagtttctccttagcaagctgaaggacctccaattttttgttggtgagtccatgaaggatgatgcgtctgtggtattcgcctattacaaggatggtgccactaatccgacattcctctatttctctcatggtcttaaggagatcaagtgctaggcgtgcggcgaaattagttacccatgttgggtactatctatgtactattattatatccaaaactatagttgtcctggctgaattgaactcaaaagggtttgtttgagaaaaaattgtcccaagattggattgcttgtt

SEQ ID NO: 141 - DNA, 762 bp, Zea mays
  Clone ID: 700048064_FLI
gttgagtgcggaaattccacgaacgtgagctcaacatggagccggcgacccctccggcacccgccgccggcgtcacggctaccgtcgacctctcctcagtcgcagccgacctcggtggggcgcacctcctgccctgcggcatcaggcagaacggcggcgcccccgtatccgactacttcaagcctagggacacaggtgtggaggtggagggggtgaagatggaagaggccttctttcgtgggaggaaactgcagggcactaccctagctctcccggatggctaccgaggttatgtattggagaagagtcgcggacagaattcagatgctgaagtcagcaattttacatcccgagctgaattccagagcataacctactggaatcacgatacagcgccatcagcagaggattccctcccgaggtgcttccattggcttaccgtcgctaatgcgatgcatagagcagtgactgctgaagacctgactaacatggcagcaatgcagaatcaggacaagtagattcgttctataacgaagccatgcaatttcgatttggtgaaccatctcgacaaaggatcttgtaacaaccaacatgttatttgaacgcatccagtaggtaatgtttaggctttggggtaagatgcttcaggagatccttgttcagtagcatctgaaaatgtctgggtaatttagattgggacctgtatcagactatcagttatctccaatattgtgaaagagtgccggtgttgcctttgtgttc

SEQ ID NO: 142 - DNA, 757 bp, Zea mays
  Clone ID: 700048191_FLI
cgacgatgcgctcgccggacggcaagaagctggacatgctagcggaggaggacctcggcagcatgccctacctcaaggcgaccatcaaggagacgctgcgcctgcacccgccggcgccgttcctcctcccgcactactccaccgccgactccgagatcgacggctacttcgtcccagccgggacgcgcgtcctcgtcaacgcctgggcgctcgggagggaccgcacgacgtgggagaagccggaggagttcatgccggagcggttcgtgcaggaaccgggcgccgtggacgtccacatgaagggcaaggacctcaggttcatcccgttcggctccggccggaggatctgccccgggatgaacttcggattcgcgaccatggagatcatgctggccaatctcatgtaccattttgattgggaggttccgggctctgcagcaggggtgtccatggacgagtcctttgggctgacgcttcgccggaaggagaagcttctccttgttccaaggattgcttcctgataatcctacatctgtaaaacttgtgtcttgctagctgtaccgggaacaagattaaataatgcaaggaataaagtgactctgttcttcgtcagtaactatatattgtaggagtcctgatgatgaataatgggatgtcgtgatttgttgcaactagtattattggtgatatttctatgtaaaaagtggtgtagcgatgtatgtaaaatattatatttgtcagatctttttataccaat

SEQ ID NO: 143 - DNA, 807 bp, Zea mays
  Clone ID: 700048221_FLI
ggctctcgatcgccttggtatatcctcctccgaccgggctccggcaatccgccatggctgccgccagctccgtccacggcttcaccgtcaaggacgcaagcggcgaagacgtgcacctgagcaccttcaagggcaaggttctcctcatcgtcaacgtcgcatcacagtgtggcctgaccaactccaactacacggagcttgcccagctacacgagatgtacaaggaccaggatttcgagatccttgcgttcccgtgcaaccagttcggcgggcaggagcccggcacgagcgaggagatcgtccagctcgtctgcgctcgcttcaaggccaagtacccgattcttcacaaggtcgatgtgaacggcgaggacgctgcgcccatctacaagtttctgaaatccagcaagaccggccccatgggcgaagacatcaagtggaacttcgccaagttcttggtggacagacaggggcatgtcgccgagcggtatgctccgaccacctacccactcagcatccagaaggacatcaagaagctgctcggcgggagctattgaattgaatatccggagacaatagatagatgcatgcactgccacttgaaacgcctgaaataagcttgctatgtttctaccagatagttttgataaataacatggtcgtcgcctcgtctttcttgtagtactagtttgtaaactaattagcatgcatcagaatcggttgaaattaaataagcttgtaaactgtaaccgtgcatggctccttccttcttccgaattatatattgggatagcaatctatttctcccac

SEQ ID NO: 144 - DNA, 1720 bp, Zea mays
  Clone ID: 700048277_FLI
ctctctctcttctctctctctctctacggattgcctcacgcatctcgcgtgcaattcaagcgaaactttctgaatatcaaagtggcatagagctccacttttatggccatccctatgaaggcctctccgggttcctgatatagatgtttccttgttctgaacatgaaaagttctcaggtactccgccgttgatgaactgcctccacacctgcagcgacaagaagacgctgaagaagtggtttttcatcgacaagacagtaggctaaatccagtcccagagaacaaattgaagcaccactccccaccgcacagcagcacagctcttctcttcaccgatcccgatggatatgggcagcggctcgtcacctgtcatcaccgatccgatatcgataagcccaccgctgctgggaggcttgacgtcgaacctgatgccgttctcggtcatgtccggaggctgctcctccagtcctagcatgagcaacagcagcaggcgtaaaatcgaggaggtccttgtcaatggcctgctagacgcgatgaaatcgtcgtcgcctcgcaagaagcacaacctcgccttcggacaggataattcgcccgacgaagatcctgcttacactgcatggctgtcaaaatgcccttctgcgctggcctccttcaagcacatagtagccaacgcaaaaggcaggaggatcgctgtgttcttggattacgacggcaccctgtcgccgatcgtcgacgatcccgacaaagcgttcatgtcccctgtgatgagagctgctgttagaaatgtcgcgaagtacttccctaccgcgattgtcagcggaaggtcccgtaagaaggtgtttgaatttgtaaaactgacggaactgtactacgctggtagtcacgggatggacatagtgacatctgcagcagcacatgctactgaaaagtgcaaagaagccaatctcttccaacctgcttgcgagtttctccctatgattaatgaggtttccaagtgcctcgtggaggtcacgagttcaattgaaggtgcaagagttgagaacaacaagttctgtgtatctgtacattaccgcaacgtagcagagaaggactggaaagtggtcgcagggctcgtgaaacaagtcttggaggccttccctcgtctcaaagtaaccaacgggcgaatggttttagaggttcgcccggtgatcgactgggacaagggaaaggctgtcgagttcctgcttcggtcgctcggcctaagcgactccgaagatgtggttcctatctacatcggagacgatcgaacagacgaagacgccttcaaggtactgcgagagcgaagctgtggatacggaatcctagtctcccaggtgcccaaggacactgaagccttctactcgctgagagacccgtctgaagtgatggggttcctcaattccttggtgagatggaagaagcacccgctgtgacgcaactgaaaacacgacgactgattcagaagccgtaaagcgactgtacttcgtgcggcggcaattttgtagagtttttggctcaccgggtggctcattctttcatgcgtttttattttttatttttttaactgtcccagtccttcgtcactgagaaataacaagtggttgtcccacaccctcttgcaactgtaatttgtaagcaagaggcccctctccctgttcagtctatatattgaataaagcagggacgcttttgccttgccctg

SEQ ID NO: 145 - DNA, 539 bp, Zea mays
  Clone ID: 700048290_FLI
cttgccttctatccctttcacacacgcctctccttccctctctctctctctatcttcctgcctgaggcagcagccatttccgcttccgatcgtggaggcttggtgtggaaggaggaaaggaggccagctgctggttttcggtgcggcggagatgtctgaggtgtcggtgataaaccaggcggaggtggaggatgcgggtgccgggcagctggacctgccgccggggttccgcttccaccccaccgacgaggagatcatctcgcactacctcacccacaaggccctcaaccaccgcttcgtctccggtgtcatcggcgaggtcgacctcaacaagtgcgagccatgggacctgccaggcagggccaagatgggggagaaggagtggtacttcttctgccacaaggatcgcaagtacccgacgggcacgcggaccaaccgcgccacggagaccggctactggaaggccaccggcaaggacaaggagatcttcaggggccgcggcgtcctcgtgggcatgaagaagacgctcgtcttctacc

SEQ ID NO: 146 - DNA, 966 bp, Zea mays
  Clone ID: 700048315_FLI
gaaagatcacaatgttgtacctcgtgggacttggtctctctgacgagacagatattactgtcaagggtcttgaggtcgttaagaaagcctccagggtctatctggaggcttatactagcattctgcttgtcgagcaatctgtcttggaatcgtactatggacgatccatcacggtagctgaccgtgagatggttgagtcaaacagcgacgagatcctccgaaatgcgcagaacgaagatgttgcgttccttgtagttggagatcccttcggagctaccactcatacggatctcgtgcttcgtgctcgggaactcgaaatccctgtccgaaccgttcccaatgcctccatcatgtccgggattggcgcatgcggtctacagctctacaattttggacaaaccgtgtccatggtttttttcactgatacatggaagcccgcatctttctacgatcggataaaggagaaccgtcaaatcggcttacatacgctagtcttggtcgatatcaaggttaaggagcagagtctcgaaaatatggcccgaggtcgtctggtctacgagcctcctcgctacatgactgttggccagtgtgcaaagcagatgctagagattgaggatgagcgtaaggagggtgtctataccaaggacagtctggccattggcgctgctcgcgtgggaggtaagacggagaagttcgtggccggtactttggaggagctttgctccaccgacgaggtgctagggcctcctcttcacagtctcgtcctccttggtcgaaggacacacgagctggagcttgactacgtccggcagtttgcggttgacaaggagaagtgggatagactatggaaagctgagtacggaaagcagctgtgaactgttgctaatattgtcatgaattcgtatcgcctttgataaaagtcctatcgtacaagcgagatttgcattattcagaacattactctcg

SEQ ID NO: 147 - DNA, 880 bp, Zea mays
  Clone ID: 700048388_FLI
gcagtagttgacatgatactgacccttttggttgtagcataagctgctatttatcttgatctgttttatttgattaagatcagcgagcaagctgcggccttcttttgcttcgatccatctccacttgtttttttgctggctggagtttcttttaattgtttgcttagctctgcagcttcgatttgttccgaaactttgttgatctatctgtgctgttgttgctcagatcagctcgcaaggaactaacacactttattttttagatcttagaattctgactccatatcttgatctcgatggcttgcacgccgtactacaacacctgcacagcccgccacgccacgaagaacgccccgtcatttccgcgaccgccggcgccaccccaggctccgcgcgccaaggagccacagccacacaagatggccgtcgctcctgaaccatccaagaagagggtggcgccggggactggactggaggagtggacggagacggcggactcgctctactccgtgtccccaccgccgagcagcgtaccgatgcctacgtccctgttgctcacagtcacgccgccgaccgcctgcgccgtggatgtcggcgccaccgacgagctccgacggatcctcaagctttagctgcgacgatgcggctatggcatcgcaacaaagatgtgatctgcgtgactgtccgttctctttagcgagcaagcgagcttcatggtctcgtcccaaagttgtactattctagtaatcgaatgttccaatgcgttgtgttttccattccaaccaaaccacgcattcgagtatgagatgttgcttttttttctttttttttgtaatcgaatgtgtccgtattgtgttccgaaccactaattaattccagt

SEQ ID NO: 148 - DNA, 1325 bp, Zea mays
  Clone ID: 700048427_FLI
gctgcatataccttttaggtgcttggaaaaatttggtctgtggcatttaaatatcacttccgtatgccaccttactacacacttgttctccggtcacttgcctctttggaaggactagccgtggcagcagatgggactttcaaaacatttcaagcagcatacccatatgttgttcggaagcttctgtccgaaaattcacttgaaacaagaagactcttgaatcaggcaatttttaacaaaaggaaagagttccaatggcagaagattgacgcgtttctaaaattggcttcagcaaggaccaacttcaagtataacagtgaagttttgccagagcctgacatgaagtccatgaatgtggctagccttgtggagatcagtgatgcatattcacttgaccgtgctatagctacaccagagagagcattgcatactgcaaacctgtgtgtgaggcttttattatctaaggagagcattgtgattaggagacttattatgacagcgaatgcaaaatctcttgcccgtgatctgatctccagagatgctttgatgttccgggtgctccttagtaaggttattgcggatgttgtctaccaatggatgttgagtgccacaggcttgaaacgagttatggagaccaagatccagacgcccatgaccacaggaaagaacgagggacatctggtgctggctgaagaaccatcgaccctgatggtactccaggcggcagtaaaagaccgaaggattcagctcatgttcaccaagtttgtgagggagttgagagaggagcccgtcttgatgattagggtgagctggaacgtgttcctcatctcggtctcatctgccgctgtaggcctgcaccgtttcttggtgttcttcttgaaggaggatggtgccaggttcttggatgacaaggtcaagaaaatgaagatttggctgatggagttctcgaagcggacggctaatctggagattcaaggaattctgtgaatgttggtggcttttggttgaaggatttaatagctgcttcgcactctggtttttggagttactttctgcatcgagtgaatccagttcctgtttacgctggctgtctgagcttgcttggctgctggtgttcccagagatttataaaaacagggttttcctccgtcattccgccgcagctagtatataatagatggttcttggttgttcatgtactgtgtagctgtatataatagaaacattgcaggatcagtgagtaattctgtggccgagtaaagtgcagtggtggaaggcatgtgttacctactggatataaatatgatgatgtgaatgttcagttg

SEQ ID NO: 149 - DNA, 1693 bp, Zea mays
  Clone ID: 700048432_FLI
ttcagctattcaactgaacagtttgaacattgaacttggtaattacaaggaacagattggtaaaacttcaaaagaatgtgaaagattccgcaccaaagtatctgaacttgaggaaacatgcagtacacaacaagaacagattcggacatttcaaaagcagcttgcagttgcgactgagaagttgaagcttgctgatgtaactgcgatagaggcgatgactggttatgaagaacagaaggagaaaataaaataccttgaggagcgtttagcacaggcagagtctcaaattgttgaaggcgacgagttacggaaaaaactgcacaacactatattggaactgaaaggaaacattagggttttttgtagagttcgaccacttcttcgatttgagggtgattccaatggtccggaaggtgcctctatctcttttccaacatctgtagagtctactggacgtagcattgatttgataaaccaagggcaaaagctctccttctcatatgacaaggtttttgaccatggtgcgtcacaggaagatgtgtttgtggaaatatcgcaactagtccaaagtgcccttgatgggtacaaggtatgcatatttgcatatggtcaaactggatctggtaaaacttatacaatgatgggtaaaccaggaaatgatcaaaaagggataatacctcgttctttggagcaaattttcaagaccagtcggtttctagaatctcaaggatggaattattccatgcaagcatcaatgttggaaatatacaatgagaccattcgtgatttgttagcacctggtcggtctaacagttttgagtctagtaaacaatgcactataaagcatgaccctcatgggaatattgtgtcggaccttacaattattgatgtctttggtattgctgatgtgactagtctactagagaaagcatcccagagtaggtctgtgggtaagactcagatgaatgaacagtcgtccagaagtcattttgtattcacattaaagatatctggatctaacgagaacacaggccaaaatgtccaaggagtccttaacttgattgatttagctgggagtgagcgtcttgctaaaagtggctccacaggtgatcgcttgaaggaaactcagtcaatcaataaaagcttgtcggctttgagcgatgtaatcttcgcgatcgcaaaaggagatgaccacgttccgttcagaaattcaaaacttacatacctattgcagccttgccttggaggtgactcgaaagctctcatgtttgtcaacatttcaccggaggcatcctccgttggtgagacgatatgctcgttgaggtttgcttcaagggtgaatgcttgtgagattggaataccaagacgtcacacataagcccgtcccttcgttctaggctgaattatgggtgaaggtagctgtagggatcatgataatgtgatatataatgtgttggtttgtgccgcatttggccacaaaggtgatgcccaacaaaattcttgtaacttgtacagtgtaggtgatggtggtttgctgagagcagcatatgtacgagtgctgacatcttgtcatgctttccttactttttggtgtagcagacttgggtcatgttaattgtgatcgtgggttcgaatgtgaaactacgttttctctctctctctgccaactagaattcatctgctggtttatggc

SEQ ID NO: 150 - DNA, 1252 bp, Zea mays
  Clone ID: 700048446_FLI
gtccaacggaagtgcgtcaaacgtcatccgcaggaagctcgtcattattggagacggtgcctgcggcaagacaagtttactcagcgtcttcacacttggatatttccctacacattatatcccaaccgtcttcgaaaactacgtaaccgactgcagagtagatggaaagtccgtgcagctggccctgtgggatacggctggccaagaagattacgaacgtttacggccccttgcctattccaaggcgcatgttatcctaataggcttttcggtcgatacacccgattctcttgacaatgtcaagcacaagtggatcgaagaggccacgcgtctttgcgaaggtgtacccatcatcctcgttgggcttaaaaaggatctgcgggatgaccctgttgccattgaagagatgcgcaagaagtcccaacgatttgtaacagctcacgatggcgaaggcgttgcccgagaaatcggagccaagcgatatctggaatgctccagtttgagcggagagggcgtcgatgatgtgtttgaagccgccaccagagctgcccttcttacattcgagaagggggagactaccggttgctgtgtcgttctgtaaaacggcatgccagccggctctcttgaaccgacccgactttggtacatctatctgacccacagacagtgaccaagtacaccatactggcccacatgttgcaaaatgagatcacgacacgataattaagtcttcacagcttgctgttgcttgcttatcttagcacatacactctcatctcatctcataccgcgaagagtgttgtcatattacgcttcatcatctcacggcttctaaaccagttttattgggtactctggcaatacagctgattctcaccatatgaggcaacataaaagcatacaactatccgagaacataatttcaaccccagagttgaaatggctacaaatttttcttcactgttccttttggcttatctgttggaaatatgtctttttttttatcctcctgtatcctcgcaatgtttttggcaagcgtattttgttgcagcggagaaaaagcgctcttaactcgaaagcgacttcaacctctgtactaatatggttgattgcatagatcaacaactgatttttctttttttttccttctctggggtatattgggggaggttttttatggacggaaaagggtgaatgatggagatggggatatttatactccactgatggcaataaaattgtcgagcctccc

SEQ ID NO: 151 - DNA, 917 bp, Zea mays
  Clone ID: 700048522_FLI
aaagaagataagtgagaggatgaagcttcttcaagatcttgttcctggatgcagtaagatcactggcaaggcagtcatgctcgatgagattatcaactatgtgcagtcattgcaacgacaagtcgagttcttgtcaatgaaactcgcaactgttaaccccgagcttggctttgacattgagcagatcatatccaaacaaatgctgctttcacaagacagacatcttgctttctatggagtcgaaccaggatcaagcggccttactggcccatttaaccaaggaatcatgcagccagaattgatgtgcaccattgccaatcccgttgatgttttgcacggagctattcacgacgcgtcaacaatgaaccatataccttctatgtgggaaggacttcagaatatgcctcagatgaacttcaaccctggcgtggcagccgatagcggcaccaacaactctggctccatgaagatcgagcagtgagcttctgtatagctccggaattgttctgtgaatcatgaatcgtcgaaaagcgctcacggggtggagtcttttttgtatagctggaggcctaaccattcatgccggtttccttctgttgcttccatactgtgcgacacattgtttatggtacggcaaatgaggatcatgtacagctggagctggaaaactgatgccactgtaaatttctgctgtgttttggcctgtggaaattgggatggaaacctattaccatccatgaaatccaatggcagaagcttgttggaactagggaccaggtgctgaatgctgatgggccaacatactagaatggaatagtaggtacaaaaatgcagagtttgaagcctctttgtcggaaattccatggaacatgcaatgtaaggtttcatcatgcaatggaaggaaactcattattgtt

SEQ ID NO: 152 - DNA, 2310 bp, Zea mays
  Clone ID: 700048534_FLI
gcgagcttggttggtcctgtggcggcttctctgcttgcttaaatctggttttttttaccccgcgccctctctctcgctctctcccgagttccattgcaaaacctcgggcgatttgttagtgttggcataaggagaaggtctagctctttccggtttggaccatgcaacatccaatccgatggggtatgaagagagcaaaaaacatctcctcagtctcagctaccctgagctgcaatgtttgtgcaaaaggtataaccttcctgctaagaagacccactctcagttagcaagttcgctcgcctcgctgcttgaggcatctccatctcctgctcctcctcctgtccaattagcaaatatgaaagaagcatccacatgcaatcatgctaacaacaaaagaggcccatacaatggcagggatgatggtaaaccacttgtgcatgcgaaacatcaaaaaggagatcagacacctgttgatgaaacatctaaaaaggggattgacactggtacgagtatacctccagtttctatgaaccatggaagaccagaatatcatggccatctatcttctgacctgagaactgctcataatttacagtcccaatgtgacgtgggaattgcaactaatacaacaaatctagaatttgttggcaaacatgattgttcacctgctaacgtaattgatcaaatctgtccccctattattcaaaaatatccttctaatggtaatggtcaggcttccactaagttcggccgtatgaatgataacacagaaaagggttgtcggctgtctgataagatatcagcaaatgctgctgctgttcaattttctgtaatgtcagatgagggcattgatcttcttgttgatctgaactccagttcagcaacatgggccaagaacttcatggcagaaatgcacattacccctccgtctgaacatgggaatttctctagcttcattagcagtttgtcaactaaggatgatcatagcactgcgtcaccatctggaaatatcattgttgacattcagaacaagggagctgagaacattgttccttccactgattcatcacttgcttcagatgttggtgagagctcccgttcagtgctctatccagttgatacgactactgtgaactcagtgtcatccacgtctacagtggctggtaccccagttgaactttctgggtatcaggagggtgctccagtggtatgttcttcatgtttaacagctgatgttcagaacaatgtgacatctgatatgccaggtgcttcggataacgaggtgcttcctccagaacctgctgatgtctttttgcagtctgaaagaatcactgcaccagctgtatgtggttcagtgcaaccaattggcaataaatgcacaatgagttctggggatgaggttagaagtggctccaatgaagactcctgtccaaaatcttcaggaaaacaaactggagatgaaaccctaatggaaaatgaacctgtgaaggcagtagcagtggaagaaaatataggtcgtgatgacagtttgtccatttcttatcaactagcctgtaagacagtagcagaactgcctgttacagatgcccagtcgcctgctagttcttctggtcattttattgctggaaattttgacaacacacatccaacatcttccgccacttcgtaaaaggggaagagaatgaaagctgctaaacgtattattttggtcaatggcaaagtctacgtgtctcacttttagctccgcaactgcaaacctgcttatttggacaatgctattaattctctgacttcaaagttcggtgcagagctagcacaaagtcatgattctacggacaaaaagggacagaatgatgctgaggaggttgaggagttagagagtatgacaccagcagcctatagtgaacctcccagaaatatacaacttagcttacgaagtgcttccgctaaggtcaagccttctacactaccaagacgatcagcgaggcttcttcctaagtaaccgccgtaaatgatacagatgagatccagtgtgagaatagcctcactaccggcttagtcagattccatgaggatgaagggatagaaaacagttaacaagcttagattctaattttgtatgttcttgttaattcttttttgttccagcaactgagtagaacttggtttctgaagcttaggctgcgtgactttttatctcctcgtgtccatcaacatctgttacagttacagtcgtactgtcgagctttcatacactattgtacaaacgactcctacttttacagcatctgtttcctctggtctgcgact

SEQ ID NO: 153 - DNA, 991 bp, Zea mays
  Clone ID: 700048626_FLI
gatatcgatactgaaatgatgcatgtgcgaggtatacacagtatgttgcatacgggaggagcattttggtggacaaagctcagttcatgcagctacaacgaaggtttgcattcgtatgtggagaaggctgggttggaggacgagttaattgtcaggaatgcattggttgacatgtatgggaagtgtggttgcattgagtcagcacatagattgttttgtttgatgcgtgagaaggacttgcattcatggagaccaatgatttcagggttgtcttgtcatggacgcggcgaagaagtggttggtttgttcttcagcagtgatttcagggctgcctgtagccatgctggattagtagatgagggatgcatatcttcaattccatggagagtgagtacaatgtttcctcggacaccaagcactgtggttgcatggtggaatttttttcagcagagcagggcttgttcaccatgcttatgtattcattagcatgatgcctttcgtactgaataaaatggattcagtctgctcctacaaagaaggtgctggtgtgcttttgtcctgtgatcagtacatgtcatcggcaacctgggtgatgtcagattgtgaattttcagcagatctaaattttttgcagttaccatcatcagtccaactccattcccaagctcatggaacgttcgacatatttgctacggttctctgcacactcgaaggagctgatccaccaactattgtctacgctatcaacggcttgggggcaagccgtattttaagcggcggggaatgtcagcaccatcacagaagaggatctagccgcctaggtcgaagaggcaaagacaagctgcgtcaggaggaagagaagactgagccacgcccatgtcggatgaggcgcgctaatgttggaatggttgggccagaatgagctctgtaatagttattgggccgatcatgtaagggaggttaaaagaaaacgctggcgtcgggaacagct

SEQ ID NO: 154 - DNA, 498 bp, Zea mays
  Clone ID: 700048684_FLI
cgcagagtttccacattgtaccatggaccgcggcatcaagaggagcgtcgcggcagcgggcggcggcccgccaccgcccaaggtgtaccgcgtggagcccagggacttccgggagctcgtgcagaggctcacgggcgccggtacgcccgccgccgccgccgctccggggccggcgcaccggagggcgacgctgaagccggccatggccgcggagagcaggcgcgcacaggccgctgcggccgtgcccgtggcggccggggcagagcagttcgactacgcggcgtcatggttctccgcgccgctgctgagccccgggtacggcgcgccgggcttcggaggcggccaccagcaccaggggaacactggctctctgttttagggccctaggtagaaacagagtccctgtatagctccgtcgtcacttgttcgtgcttctctggctctttttgtcttgcgtttcgggcatgactatacatacacaaccttcttgcgccgcgt

SEQ ID NO: 155 - DNA, 502 bp, Zea mays
  Clone ID: 700048691_FLI
gttccacctattatatatgtggaaagagcatttatggtcaatctgtgccttacaaatcaaacggacaaaactgtgggcccttttgaagtatttctggctccaagcatgtcgggtgaagacagagctgttctagttaatgggccacagaagttgattttacctttggtggaggcttttgagtctatcaaatttgatctgagcatggtgaccacccagctaggagtgcaaaagatttccggaattacaatgtacgccgtgcaggaaaagaagtactatgaacctttgcccgacatagagatttttgttgatgcagaatagcaacaccatttgacgagctgaagatgcatttgtacttttcattaccatgggaggtctacatagtttacataaaggctaaagcactggctgatgtatattgttcactgaacaactgatacatgcgattgtaattaaatgcatattgatatcaaattgacttctgtcggatgtcactcaacttacc

SEQ ID NO: 156 - DNA, 1398 bp, Zea mays
  Clone ID: 700048693_FLI
gcaggccattcttctcgccttactccctcacagaacccagtaaaatatcgccagtcccgccgtcgagatggccccacgccgcctgctcgtcctcgccgtcgtcgccctcgcggccaccgccgccgcggccaactccggcttcgcggactccaacccgatccgccccgtcaccgaccgcgcggcctccgcgctcgagtccacggtcttcgccgcgctcggccgcacccgcgacgcgctccgcttcgcacgcttcgccgtcaggtacggcaagagctacgagagcgcggcggaggtccacaagcggttcaggatcttctccgagagcctccagctggtccgctccaccaaccgcaaaggcctctcctaccgcctcggcatcaaccgcttcgcggacatgagctgggaggagttccgtgcgacccggctcggcgcagcccagaactgctccgccacgcttaccggcaaccaccggatgcgcgccgccgccgttgcgctgccggagacgaaagactggagggaggatgggattgtgagcccagtgaaaaaccagggccactgtggatcatgctggaccttcagcactactggtgcacttgaggctgcatatacccaggcaactggcaagcccatctctctctctgagcaacagcttgttgactgtggttttgcattcaacaatttcggatgcaacggaggccttccatcccaggcctttgaatacatcaaatacaatggtggccttgacactgaggaatcttacccttaccaaggtgtcaatggaatctgcaagtttaagaatgagaatgttggagtcaaggttttggactcggttaacatcaccctgggtgctgaggatgaactgaaggatgctgttggtctggttcgcccagttagcgttgccttcgaggtgatcactggtttcaggctgtacaagagcggagtttacactagcgaccattgtggaactacaccgatggatgtgaaccacgctgttctggctgttggctacggtgtcgaagatggtgtcccctactggctcatcaagaactcatggggcgctgactggggcgatgagggttacttcaagatggaaatgggcaagaacatgtgcggtgttgctacgtgtgcatcctaccctattgtcgcatgaggcccttacgaagtgttacatggtctgtttggcatcaataatgcatgtttaacctgagcttggcgatgggttatacagaacggaaactctgtttgtgaatagaaaatcatgaagggaaggagttgaccggacccctgcttgtacgtctccccgactgtgtaggtagattgtcagttggggttccgaagtactctactcatacgtgtgtatgacagtttatttatgaaacaaaatacgcattgatcgtt

SEQ ID NO: 157 - DNA, 638 bp, Zea mays
  Clone ID: 700048725_FLI
cctgagtactacatgacgcagcagcttacggacaagagcgacgtgtacagcttcggcgtgctgatgctggagatggccacggcgaggaagccgctggagcgcggccggtacattgtcagggagatgaaggtggcgctggaccgtaccaaggacctgtacggcctgcacgacctgctggacccggtgctgggctcgtcgccgtccgcgctggccgggctggagcagtacgtggatctggcgctgcgctgcgtcgaggaggccggcgccgaccggccatcgatgggcgaggtggtcggcgagatcgagcgggtgctcaagatggccggcggcccggggcccgagtccgcgtccaactccatgagctacgccagccggacgccgcgtcacccctacggcggcgacagccccttcgaccacagcaacagcgggttgccgtccgcgagggttgagcccaagtgaatctacagcgcgcgccgcgagtacatgcggaaaagcttcactcttcaacaaaagctagctctgaatgtacagggtattgtaattattagtgttataattttggttactatgataggtgtgcgattggattaagaactgatttcttgataacgattgtttacatgataattttggttgct

SEQ ID NO: 158 - DNA, 726 bp, Zea mays
  Clone ID: 700048751_FLI
ggctcgaggggccctggccgacggccgcatcacgcagatcgtgtacaagggcgcgcacaaccaccccaagccgctgtccacgcgccgcaactcatccggcggcggtgcggcggaggagctgcaggccggcaacagcagcctctcggccgtagcggcggccggctgtactggaccggagcactccggcgccaccgccgagaactcgtctgtcaccttcggcgacgacgaggcagagaacgggtcgcagcggagcgacggcgacgagcccgacgccaagcgctgcaggaggacggcgagaacgagggcagctctgcaggcggcggcggcaagccggtccgcgagccccggctggtggtccagacgatgagcgacatcgacatcctggacgacgggttccggtggcgcaagtacgggcagaaggtggtgaaggggaacccgaacccgcggagctactacaagtgcaccacggcggggtgcccggtgcggaagcacgtggagcgcgcgtcccacgacaagcgcgccgtgatcaccacgtacgagggcaagcacaaccacgacgtgcccgtgggccgcggcgccgccagccgagctgctgctgcggcggcggcgggttccggggccttgatggccaccggcggcggccagctcgggtatcagcagcaccagcggcagcagccatacaccctggagatgctgagcagcggatcgtacggcggcggcggctac

SEQ ID NO: 159 - DNA, 911 bp, Zea mays
  Clone ID: 700048766_FLI
tcgtttcgccgcctccgccgacaccgactgcctacctcagctgccgtcgccatgggcagaaggcctgctagatgctatcgccagatcaagaacaagccgtaccctaagtccaggtactgccgtggtgtccctgaccccaagatcaggatctacgatgtcgggatgaagaggaagggtgttgatgagttcccctactgtgtgcaccttgtctcttgggagaaggagaatgtctccagtgaggcgctcgaggctgcccgcattgcctgcaacaagtacatgaccaagtctgcaggaaaggatgccttccaccttagggtccgggttcacccgttccatgtcctccgtatcaacaagatgctttcctgtgccggggctgataggctccagactggaatgaggggtgcctttggcaagcctcagggcacctgtgctagggtggacattggtcaggtcctcctttccgtgcgatgcaaggacaacaatgctgcccatgccagcgaagctctgcgtcgcgctaagttcaagttccctggccgccaaaagatcattgagagcagaaagtggggcttcaccaagttcagccgcgctgactacctgaagtacaagagcgagggcagaattgttcctgatggtgtcaacgcaaagctgctcggcaaccacggcagacttgagaagcgtgctcctgggaaggctttcctcgatgccgttgcttaagtgcggatgcgaatcctgacgttttgctttagcgtatcttactttgcttcgtggaacatgaatttcaagtgttttgagggtattacagtgccttatgtgaacttgcctatcttgtgctgaacatcggaatgtatcctccgagtatgtttaatcgcattaattttattggaaattggttgcggaacaatgtccaattt

SEQ ID NO: 160 - DNA, 1069 bp, Zea mays
  Clone ID: 700048774_FLI
gcaagctggtggagatcagttcccttcctgggcgtcaccacagtatgccactggacatggcaattttggaacagaggacaaccatgagaatggcagatggaacaacagtgaatatcatgatctaaatgatgcatgtaagctcgaggtcacatatgatcaggctccagtcaactcggctgaaccgtgcttgtcatcatttgctccactgtcggaaatctgccccagcatgagcaatggtagcagtaaggaagataaccaccaggctaatcctggcattggcatgccaatgcaaggtctacccaaaaggagtggatttgatgttgtcccatgccctgaccgtgactctgtcatttcgcgctataaagcgaagaggaagacaagaagatttgacaggcaggtccggtatgagtcgcgcaaagttcgtgctgatggaaggctcaggatcaaggggcgttttgcaaaggcaaaccagacatgaacctaaatctgaagttatgcaatatcctaagcatctttcctcaagaaatatgctaagtatcttccaacacgaagaagaaaactgatcaggggcgatgataatgcaaaaatgtgccagaattttgtttgccttcagttcaatagctgataaccatagttccatatacagttgaattgaatgacgtgtgtatatattgctgtcatgtgactagtagctacattgctttgagagatcaaaacctgtatatgcacctacacactatgtgattttgccatgacggacataataatagaaccactgcgtttgattgatgtagttattaacttattttgcaatttgatttccaatgcaaaagcttctttcactgatgagcaataaacacagttgtgatgcaagaactgagagatgacgtttgctaagagatattttataggatgaggaattgtaatcagatagatgtttttattctgaaatagactagaatctagtttaaatatgtattgtatttatttaggacttttagaattggcttctatatgtgtacgtaacactgagggttcctcatccaatagatcaacatgtaacacacgc

SEQ ID NO: 161 - DNA, 1029 bp, Zea mays
  Clone ID: 700048791_FLI
ttcattttcacccctgcctctgtatccgagcatactagcggatcctggcccgatccctcttcccacctacctccgcttctctccaagtgaggaaccccaagccctcgccatggcgtcgcggatcctggcccgatccaagtcccttcacctcgtcgccgccctcacccctgccgctgccaaagcagcaacgcctatcgccggagcccgcgcgctctcgtccctgccccgctacccgtctgccccgtcgccccatgggctcggcaaggttctgggatatgaaccaacatctcacctcagtggaccacaagttttacctcgttggttttcctctctagcatccaatggatctcaggtgcagaagtcacagatctctgagacatacaagtcaggtggtgaaatgaaacagtctgagacacggaaatcaagtgaggaagccacaccaaaagttgtggcgttcagtccgctagaagcagctatcgctaaacctagaagtagtcccctgacaagtgagagttctaaagtaaggcgatcagagatagcaacccaagtcaccttttacatgatcccagccctgcttcttgcctccaagaacagcataagtacctcccttctggtcggcgccgtgttccatcaagtatacatgttccacaaggagattcttctggactacgtgcaccatgatatcaccagaaagtgggctttgatttacttcaagctgcttttgctggtgatggcgaaggacaccatcatgtacttcaatctgttctaagctcaccttttcagtttctcaaatatccagcaatgcatccgtctctgcactcgtagaataatgatgatggatgaattatgcagccttcgttcttgtattctccctaatgagcttgcttttttccagctgccagtttcactcttgttaagtatatcagtctggatgggattgattagtgaccagtcagatgatatccctgattctgcacctctgtaataatgattaatgtcaattgtgcaactaaggatgtctttggtttg

SEQ ID NO: 162 - DNA, 846 bp, Zea mays
  Clone ID: 700048795_FLI
cacgcaccctaagataggggcatatctgtgcatggtaccatcttcatcatgtagctgggatgagctggcaccatgaaagaattcaagtggttaaatcatgcatctgcagaaatattgtactctcaaatggtgggttgctgcgtcatgggagtttgggtgaaggcctgaaggatgtgatgcaaaacgtcgatgcaggtctgggatgtccgcctcattatggatcaaaattcatgacgttctaaaggtgtcggatgagtacctatatactccctcccagaaaacaaggcgcctcattacactattggaagctggacgacatggatgactctggcaagatgcggtgggagcacgacgacatggatgactccgaccatgagttcgacaggaagcctagcaacagtacgcagtagcaaggttgaccagaggggcagtggagactaacccaacaccccctcctccgaccgtcatagcgcttctttcctctggcttcatttcttacctatgtatggatggtcttcaccactggttacatctagcaagtcctcctagggtgacatgaaggagattgtcatgctgccaaagcacatcaaggacaatgcaaacaaggacagaggaagaccggacatgccatttccaggtggtgacatttctattctcacgcgcccacccaacatttttgcttttactaaatgactatgtgcgcgaatgctttgtggatgttgagagggattatctgtgcttgacaaaacagtatcccagacttgcaattactccagaattttctaaggttgggcattttgtacattgaacttttgttgctgatcgatattcaatgtggcttttggc

SEQ ID NO: 163 - DNA, 2600 bp, Zea mays
  Clone ID: 700048807_FLI
atcgtcacgtcgccagatctaaccaagccccaaatctgcgcgccggcaatggcggtgcgcgcgagcctcgcctgcttcccctccgacccagcgctccacgcggcttgcggcatgccgtggggcgtcgccatcaccccgttctctgccacagatgagcgcggcttcccgccggccaccggcaccgagggccacctcctcccgcgctgccagtcctgcttcgcctacttcaacttgctctgtccgctcgaccgctggtcctggaactgcgccatctgcggcgccgagaatgacctctccgccgacgcagctgcgcgctacgcccgcgacggtggccacgacccgcccgagatgcgctccgcgttcgtcgacctcctcctcccagtggaggagggcgaggcggcagcggcggcggctccgacgcccgtgtacgtggcggcgatcgacttgtcctcttcagaggagttcttggagctagtcaaaagtgctcttcaagctgctcttgaagctcttttgccaggatcactatttggacttttgacatttagcagcaaaataggattgtatgatgtccaaggtccaataccaatcgtgaagaatgtgtttatccctcctgattctgatggtgccttacaagtcgaccttgaagatatcatgcccctttgctcatttttggcttctattgatagctgcaaagaccgcattactgaagcacttgaaacaattaaaccaatgtcttcctgggaagtagcagcaaatgcgcacgatggacaggatcatgtattgcatcacatacgtggttttggtgtagcgttggatgttcttatcaactacctaagttcagaatatggaaatgcatttgagcttgctaggatatttgcgtttttatctggtccacccaattatggggctgggcagctggatataaatgaggaccaaaattctggtaaagcaaggggtgctgatcatatattgcttcaagagcagacaagtttctacagaaatctggctactagtgctgttcaagcaggtgtatgcgtggacctttttgcaattacaaatgaatacactgatcttacttctctgaaagttctgagtgttgagagtggtggatcactgtttctatattccagtacagatgaatcaacacttccacaagatatatacaagatgttgagtcgtccttatgcttttggatgtgtaatgcgattgagaacatcgtcgcagttcaagattgttgattcttatggccatttcttcccagacccccagtacatgcatgttcagcacataaattgttgcgactcttttgctacatacagttatgactttgagtttgaaaaggattcccaattttccaggaagtcaagccctcccattattcaaattgcatttaagtacactgtgcttgtgcacaatggtgatatatcagatcttccaaattctgggtgcagatttaaatacttgttagaaaggaggctaagagtgcggactatccagtacaacacaactgctaatatctgggacctttacgattttgttgatccagatgttgttttgacaatattggtacaccaggttattttggcttctttaagtgatgcactggaaacaaggctgtggctccaagattggttggtggttgtcatcgctcagtacaacaaagcatacaagaatgtcacatctggaggtggtactgagatttataatattgatgtcaatttctcacactgctcgcaactgcagcctttgtcacggtttgtgtttgctattctgttgagccccctgcttcaagtcagcagtgaaggcattcatccagattatgtgacatatttgcaatgcctcttgagtgcactggagccagcttcgcttcggcaggctatttggcctacgttgatttcatactcctcccccgatgtagaagcagaagtacatcaatcactaagccggactgtgttcaccagtgagaggccaatatatattcttgatgcatacaaagaccttctggtgtattactcacctacagctagtagcgaaatcccttttcctcctccacgaaactgtctactgagatcaacagtcgatagactaaaacaagaaaggaatataacacccaaactggttttcattcacggagcacatgatgacactacagaatttgagaaataccttgttgaggatcagaccttggatgggtccccgttatctagctccacaggtttcagctcattccttgatgaggttagaagtaaagtggctgagcatggcatttgaggaccagtgtcacctgtctcccgattgctggactgtgatgttaaacgggtgatgactgatgacccatgcaacccagaaatactgtcatgaatagaaagagtaagtgctttgctggtttaccggcaaacgtttttgtatgtgtgccgtgtgtttgatggatgctgttcgccatttttttaccgacagctagatgaattttaaagctttcctttacaagaccgcgctatatgtttttgtaatatccatgcgctactatgtttttttgggtacattgcctgttgctaaactatgcatttgctatatacattgctgaaaaacccgttcattat

SEQ ID NO: 164 - DNA, 961 bp, Zea mays
  Clone ID: 700048809_FLI
acttcatataccactccctaggacccagcaacacaacagccgagctttgcttaggcaagatgaacaggaagccaggagactgggactgcagggcgtgccagcacctcaacttcagccgccgagacatatgccagcgctgcagcgagccacgtggagttgctgatcgtggcagtggcggcggcggaggaggcgactacgccagcttcggtggccgcggtggctcctccttcggcggcggctttggcgctgctggctccgacgtccgccctggtgactggtactgctcctgcggcgcgcacaacttcgccagccgctccagctgcttcaagtgctccgcctacaaggaggaggccgctgtgaacagtggcgctggcggctttgatggcgacatgtcacgctcacggggctacggcttcggcagcggtgctgctgctgctgctggtgctggcgctgcccgtactaccaaccgccccggttggaagtccggagactggatctgcaccagatccggatgcaacgagcacaacttcgccagcaggatggagtgcttcaggtgcaacgcaccgcgggactctggtagcgctgccatgacctacgaaaactacttgcactgaggtgtaggatcgagcaagttaaaaagtctgcagcgccgaagaaagcgacgacaagaggagtcctcatcacgtcgtaacgtaagagagagagtagtggatttgcaacaaaaaaaaaaaaaagacggccgcgatgctctgttactagctagctagttttgttcaaccacccatgccgtctcttctcttttattagatttggtttggttctcatagccctttaattaccatttgggacctatgtttgctgttctgtttcccgttcgtctcctccgcatgtttgcgcttggatcgagtcttgtgatgtaaccccccaaaaaacgcttgcttaactagtactgttgcttctt

SEQ ID NO: 165 - DNA, 996 bp, Zea mays
  Clone ID: 700048816_FLI
cgcatcgcgacggctccccaaccccaacaagtctcttggccaggtctccctctccccggctctccgccttcctcttccagtccccgcgcgcgagatcgccgccccgtgtgggccctagatcccgatggcctcgcgccgccgcaccctgctcaaggtcatcatcctcggcgatagtggggttgggaagacttccttgatgaaccaatatgtgaacaagaagttcagcaatcagtacaaggctacgatcggcgcggatttcctcaccaaggaggtgcagttcgaggacaggctcttcactctgcaaatatgggacactgctggccaggaaaggtttcagagtctcggcgttgcattctaccggggagcagattgttgtgtcctagtctatgatgttaattctatgaaatcatttgacaacctgaataactggcgagaagagtttctaattcaggctagcccatcagatcctgataatttcccttttgttctgttgggtaacaaagttgatgtagatggtggcaacagccgcgtggtatctgagaaaaaggcaaaggcatggtgtgcttccaaagggaacatcccgtactttgagacgtctgctaaggacggaacgaacgtggaagacgccttccagtgtatcgtgaagaatgctctgaagaatgagccagaggaagaactgtatgtgccagataccgtggacgtggtgggtggcaaccgggcccagagatcatccgggtgctgttaaggcacgaggcatcacgaggcgttgtgaccatcatcgtcggttatgcagtgaccaaacaataccttagcattgctgggtctccgtggttatctacgtatccgtattccatttgttacctttccagtctcactgctatgtacccaagggcgcctgtcaattcggtggactttgtgcagtttcatcagtagcgtcataccttgtgaatacaattggccaaaataagaggaagtgtaaactaaagttcatgcttt

SEQ ID NO: 166 - DNA, 1258 bp, Zea mays
  Clone ID: 700048822_FLI
gcctccgtctgtcccgcggcctccgctctcctcgccgcccgcccgcctgtccctccctctctctccctccctcctcgccgccatgaacaacctcctcacggattcctttgagctccctcggcgggactcctcaagagacgcagatattgaaatgggaatgcatcaggctgatgcttcagacaacttgaaagatttcttgaagaaggtcgatgcaattgagagtataattgcaaagctgtcaaatctattgaataagctccagactgcaaatgaggaatccaaagcagttacaaaagcaagttccatgaaagcaattaagcagcggatggagaaagatattgatgaagtggggaaaattgctcgtcaggcaaagacaaaagttgatgaactggaaagagataacctatcgaataggcaaaaacctggatgtggaaagggttctgccgtggaccgatcaagagagcaaactactggagcagtgaaaaagaaattgaaggaacggatggatgattttcagaccttgagagaagcaatcaggcaagagtatcgagaggttgtcgaaagaagggtttttactgtaactggtaatcgtcctgatgaagagacaattgatgacttgatagagaccgaaaaaagtgagcaaatattcaaagatgctatccaacatcagggaagaggccagatactggacacagttgctgaaatacaggagcgacatgatgctgtaagggatctagagaggaagcttttggagttgcaacagatatttatggacatggcagttcttgtcgaggctcaaggagacatgatcaacaacatcgagacacatgtctcgaatgccaccaaccacatacaacaaggcgtgagcgcgctccagaacgcgaagaagctgcagaagaactcgaggaagtggatgtgctacgccatcatcttgctgctggtgatagtggcggtcattgtcgtcgcggtcatccagccatggaagaagtgagcctagggtggctctaaacagggaggagggcgtgggagatacgtttttttttggctgtctgtgtaatatctgtgcagttgttgtgggtggttctgtgatttatggttgtacttatggtcggcaccagagaagctttggtatttccattctttctgtttgggatagttcgtgcagtccattgaccatagctctcagaaatgttattgtggtgaccatatattcatatgtcggtcagctgatgaaaagaatggtgcttctgaatctttc

SEQ ID NO: 167 - DNA, 456 bp, Zea mays
  Clone ID: 700048879_FLI
attcaaaatgggtggttctaaccgagaaggcggcaaggcgaagcccttaaaggccccgaagaagcagaacaaggacctcgacgaagacgacttggctttccttgagaagaagaaggctgacgagaaggctcgcaaggagttggctgccaaggccggcggcagaggccctctgaacactggcacccagggcatcaagaagagcggcaagaaatagacgacatacgacgaagcaatatgttattgagaaacgtttacatgagcttgctgcgaagtttgcgataatatgggcggctacaagaggatgtcctgtggtagatgactacatgtattcacacggcatcgactgttggatcaagtggaaaggccgcaccgctcttcgagataagatctgtagtttccgcagggaatgttatccggcgttgggaaatatactttttacatactgatttgacatct

SEQ ID NO: 168 - DNA, 859 bp, Zea mays
  Clone ID: 700048895_FLI
gcatggacagctactatttgtactggcaggggaagtggtattggtggtcggggtactggaacgatcctaacgatagcagacgttacccagcagttaatatagttatattaactaatgcctccttcaactatgcgttgggcatgggagcattagccgaaccacctcaggacagctctgccgacggtgtgatcttgatcaaggatatggcggagtggcaaaagcactgggaccagactgctccatacaacaagctgctggtgtatgagttctacgaaaagaattcctcgctgtgcaaggccatggacaagccgttcgagaagctcgccacgcagtacaaaggcagggccgacttctgcaagctggacgtggacaactttgagcttttggcgcggatttgcggagtggagggagcgtatccgacgttcgtgctgttcaagaaatgcgcgcaggtgggcaaggtcgttggcctcaaggaggacgacctcgagcggatcgtccagcgagcgataataagctagggcgtgttcggctggctacaagccgacactgttgcagctgtttggattgctgcagctgcaatccatagagagaaaaatactgtagaagccgcagccgcagccggattgcagccgcagcaagccgcagcgaacaagctgctagctaggagtagtcgtcaactcgtcatgtagtaccacacagactcagttttcgtacgtgtgccaagacaaaactacaaaaggacatgactatgcgtacgcatcgatcggcacagtggcggatctacaccctctgtggctggggcttgatccatgtatctttatataagtctctatttaatacgatataaaatagttaagat

SEQ ID NO: 169 - DNA, 1005 bp, Zea mays
  Clone ID: 700048904_FLI
cgacgtcgtcgtctccttccgcggcacggtcaccggttccgagtgggtggccaacatgatgagctccctcgagcaggccaggttcgatccggcggacccgcgccccgacgtgaaggtcgagtcgggcttcctctccgtctacacctccgacgacgccacctgccgcttcacctacggcagctgccgaaaccagctgctttccgaggtcactcgcctcatcagcaaatacaaacacgaggagatgagcatcacgctggccggccacagcatgggcagctccctcgccctcctcttgggctacgaccttgccgagctcggtctcaactgcgacggttgcggcgacaccgtgccgatcaccgtctactcctttgctggcccgagggttggcaacactgggttcaagaatcggtgtgatgagctcggggtgaaggtgctaagggtggtaaatgtcaatgaccctatcaccaagttgcccggcatcttcttgaacgagaacttcttcggggccggcaggttggagcttccatggagctgtgcctgttacacgcatgtcggtgtcgagcttgccctggatttcttcaaggcgagagatcctgcttgtgtgcatgacctagaggcctatatagggttgctcaagtgccctaacaaggttgcagtggtgaaaaacgacggggagcatgttttgagcaaggcaatgaagtttgtgcttcaacacagttttgatacttggagatggcaaatggccgcaatccaagttggtgagttagtgcaagccattgggttgtagattgattgatacaggggtccaatttcattcccattttttgtgggggatatgaaacatagatgcccttgtaaattcattcatcttgtcggtaaaacgaggtagagaagagtggaaattaaggggggaaactcggaattgtacatgaaaggtaacaaaaacaatcaaaagaaatactgatcatagttaatacatatactcggaattgctaatttctagcc

SEQ ID NO: 170 - DNA, 370 bp, Zea mays
  Clone ID: 700048951_FLI
gtcgtcgccggtgagcgggtcggagaaggagaggaaggacgaggccggggtctcggatccggcggcggtgggggacagcagggagatgcgctggtccgggtcgctccagcgcggaacctggtcgagcgtcacggccggctcaaccccgccgacgcccggcgccatggcctccaccgccgcggccgtcggggaggcggatgccgaagccgcctccggcgagcggtgctgcatggctatggccggatcagaaccgcgagggcatggaggacgtgtgctggaggctggagcgatagaaggagatgcgcgcgaagcgggaggaggcggaggtgaccggtgtgagcgaagctcgggggatcgaagcgacgggacg

SEQ ID NO: 171 - DNA, 333 bp, Zea mays
  Clone ID: 700048978_FLI
cttgagactgggaccccggaggatcagcaagtcaagaggatgcgtttctctgagctcagagaggacgtgcgcaaggcgttcacgaaagataaggcagcagtggctgcaatagcttcctcggcgtcctcgtcttcgtctccgaggtgcagacgacccaataggaaatcacggtgatgtcagtctgttcaggacacctgcactgggttgtgtgtgttttgacatgtaacactgtttcagtagataatgctgattgtcagatttgctgccgctctacagaagattaagcgaccgtctgtttcaagaattattcagacagttacttgtgattctttc

SEQ ID NO: 172 - DNA, 1344 bp, Zea mays
  Clone ID: 700048983_FLI
ttcttcctcgcaggcacagccgcttctcccaaaggttgcgatggccagcacaacctctcctctcctcctgcttgccgccatggcggtggtggcggcgacgcttgccgtggcgccagtctcgtcagcggacctgccatccggtgtcgcatccatcacgtccaagatcccaaacccatggtcggccttccagaacctcacgggctgccacttgggcgagcagcagcagggcctcgccaaggtcaaggactacctctcccgcttcggctacctgccccccgagtcgtccgggtcgttcaacgacgtcttcgacgccgacctggaggaggccatcaaggtgtaccagcgcaacttcggcctgggcatcacgggcgtgatggacgcgtccacggtggcgcagatgatggctccgcggtgcggcgtcgccgacatcatcaacggcacgtccaccatgggcggcggcagcgcctcggcctcggcggcgcacgcgcgcggccggaacctcttcacctacttcccggggtccccgtcgtggccgcgctccaggaagagcctgacgtacgcggtcacgcagacctcgctgacctccatcgaccgcgcgacgctgagccaggtgttggcgcgggccttcgcgcggtggtcggcggccacgacgctcagcttcacggagacggcgtcggagcgagacgcggacatcaccatcggcttctacgcgggggaccacggcgacggcgaggcgttcgacgggccgctgggcacgctggcgcacgccttctcgccgacggacgggcgcttccacctggacgcggccgaggcgtgggacgccagcggcgacgtggcgcgcgcggcctccgacgtggccgtcgacctcgagtccgtcgccgtgcacgagatcggccacctcctcggcctgggccactcggccgagccctccgccatcatgttccccaccatcacctcgcgcaccagcaaggtggacctggcccaggacgacgtcgccggcatccagaacctgtacggcggcaaccccaacttcaagggcgtcgcgccgcccgccaccagcagccgggacatggacagcggcgcgaccacgagctcccgggggccgtggaccgccgccgttgccgtggccgctgggctcttggtagcgttgtagtcatcggcagatttttttttttaaaaaaaacttttgctttagctgattttaattcttgtgcgtacatcgatcagtagatacatttgtaatttatgtactccttgttgttatacatagatagacacatggattgtatagaatcaaatcctattgggtaaaaagaaatggtgcgtgtgtcactatttttgatg

SEQ ID NO: 173 - DNA, 571 bp, Zea mays
  Clone ID: 700048992_FLI
cgccgactcagatccagcttcctcgcaccgccgtcgccatgccgttcactccaggcccctactctggcgtcagcaccctcgcccttgtggcgagggcgtcggcctttggcgtcggtgtcgtctacgggagcatcaagctctcaatcctaaaggtaacaaaacctaaaaaggaggaagtgcatgatcatcactaaggatgacagggctgctacatgttataaaattggcagtgcaccccttctccatacgtgcaatttcgtttatgatttgtggacctgtctgtaacatacctgctgttttttttgtgttgtaataaattcttatacaatgacatgaaatcaggaagtggaaaaagcaatattaataattgcaagtcgttcgacaaatcttgattagttgggccggttgcctgttaaaagagatttggtgggtgtggttgtccagaccgtccgaactagtggacaataagggcgctaggatactgtggagaccttaacagttgctgacaattggacccatatggcagccactcttaaaggccatgcaatatagaccctgtttgttaccgttt

SEQ ID NO: 174 - DNA, 847 bp, Zea mays
  Clone ID: 700048994_FLI
caactacccccagcctcggaaggaaccttccagaagcgcaagactctaaggccgtcaccttcccattcttcctcgccgcgggggtcgcctgagatcacataaacaatggtgaaggctgttgctgtgcttggtagcagcgatggtgtcaagggcaccatctttttcacccaagagggagatggccctaccgctgtcaccggaagtgtctctggcctcaagcctggcctccatgggttccatgtacatgcacttggtgacaccaccaatggatgcatgtcaactggaccacactacaatcctgcgagcaaggagcatggggcaccagaagatgagaaccgccatgctggtgatcttggaaacgtgacagctggagcagatggtgttgctaatatcaatgtcactgacagccagatcccactgactgggccaaactcaatcattggcagagctgttgttgttcacactgatcctgatgatcttggaaagggtgggcacgagctgagcaagagcactggaaacgccggtggccgtgttgcttgtgggatcattggactccagggctgaaaacgatcgccggacttgggggtgcctgagaggtccgtctcctgccgtccccagcagacgagcctgaacattcggagacatcgtgaaataagagcgtcgctgatctgtgatcatcgtatttgtcattatgcacctgtagccaccgatggactaaactgtgctggattatgctgttggatcacctgagtatgtgttacatgtcggttttgatgtgacatcctatcgtttcgatgtgttttgtggaagtgttgttgcaagatttcaacagtcacgacttggtttt

SEQ ID NO: 175 - DNA, 1495 bp, Zea mays
  Clone ID: 700049013_FLI
ggacgacacaggcagagccgccggccctcgcttcttggtggggtctagtttctttctcgcctctgcctgtgcctgctggtggtaagtaataacagcgacacggtacccacgcgcggcggcggcggcgacgacgaagacgacatgaccgtcggcgacgacgcagcggcgccggggcgcgggcagacggtgtgcgtgaccggcgccggcggctacgtcgggtcgtggatcgtcaagctcctgctcgagcggggctacgccgtccgcggcaccgtgcgcaaccctggtaacgtcgtcgtagatctgtcgtccggcgcgccggtcgttattgttgttgctgctgacaggccgctgggtggtcgttggaggcagacgacgcgaagaacgcgcacctgctggcgctccccggcgcggcggagcggctggcgctgtgcaaggccgacctgctcgactacggcgcgctaagggcggccgtcgccggctgccacggcgtcttccacgccgcgtcgccggtcaccgacgacccggaggagatggtggagccggcggtgcgggggacgcggtacgtcatcgacgcggcggccgaggccggcacggtccgccgcgtcgtcctgacgtcgtcgatcggcgcggtggccatggacccccgccgcgagccggacgccgtcgtcgacgagtcgtgctggagcgacctcgacttctgcaagaagaccaagaactggtactgctacggcaaggcagtggcggagcgggcggcgtgggaggcggcggcggcgcgcggggtggacctggtggtggtggtgccggtgctggtgcagggcccggcgctgcagccgtcggtgaacgccagcctgatgcacgtgctcaagtacctgaacgggtccgccaagacgtacgccaacgcggtgcaggcgtacgtgcacgtccgcgacgccgccgacgcgcacgtccgcgtcttcgaggcgccccgcgccgccggccgctacatctgcgccgacgccgtgctccaccgcgaggacgtcgtccgcaccctccgcaagtccttcccgggctaccccgtcccggagaggtgctctgacgaggtgaacccgaggaagcagccgtacaagatctccaaccagcggctgagggagctgggcctggagttcaccccggcggcgcaggcgctgtacgacaccgtcgtgtgcttccaggagaagggcatcctccctctccctgtccccgccccaacgccggcgtcaccggacgcctgagctagctgatgagctggccctgaaccaacgaagaaacatgtttggcacgcaaaccgctattataacagtcgctgcttcgatcattcattctgccgctagagatagaatgtggagtgtgtgctactcgttgtgggcgtaagagtgtcagaagagtgcagcagtaactgtatatcgatgcgactttttatatgttgctatatcatgtgtgacaatctcctaataataaatatatggagtatcgtcct

SEQ ID NO: 176 - DNA, 924 bp, Zea mays
  Clone ID: 700049035_FLI
gctagataagacaaccatgaagatgcacgaggtcgaggagcctccagcggagatcacccgcgacgcccacccggcgcacgcgctgaggctggtggccaccgacgacggcgcgccgttccggtgcgacgggtgcaaggagcccggcagcggccaggggcggcggtacaggtgtggccacggctgcgacttcgacctgcacgtggcctgcgcgctggcggggccgactctgaggcaccccctcttcggcgagggcctcgagttccagctcctcccggaggcgccgccgcccgtcgacaagacgttctgcgacgcctgcggcctgcgggcgcccggcctcgtctaccactgcttcgacagggacctggacctccacccgacctgcgccgcgctgaagccggagagcgccttcccgggcggccacctggcccagctcggctgggaggccgccgagcaccgctgcgtcgcctgcgacgccgccgccgccgccgccggcaagaggttctgggcgtaccgctgggcctacggcggcacgcacgggtacctgcacgtggcgtgcatgaagaagatcgcctttcagagctgggaacaggcctaccaggccagcgtcgtcggcggcggcctcgtggaggcgagcgtgccgacgatgacagccgtgctgcacaggaagcgcaccgacgaaattacgggcggcgttaagattatcgacaccggcatacgcgggcagtacctttccagttcaacttggggtacttaaataattggtactatcgctctagtttattacacccaaaatactgctggcacataagagggctagctgcctagctatagtgccggcctgtgaatcaagccaacgactttgtgtaccgttgccacctcagctgtgtttaataattgggttttttaagctggtgccatcagatt

SEQ ID NO: 177 - DNA, 1583 bp, Zea mays
  Clone ID: 700049036_FLI
tgttgctagagctggtcgtcttcctcttcctcttcctcctcctgcctcgatctgacgagagctcagccttgccttagtctcgccatcgcagaaggcagaagcactagttcctgagagccacaaaaccaaccaaaggccaagctaccgtgaggcgagggaaagggaaagatcacatatcgcctattcgcctacctctgcgtgcatcagaagatgatccccttcataaagatgaaacattctcattccctccactagaagctccgggaggacgcagcaagctcaccgaagccagcaaccgatggatcagaggcgcgtcacggcgaggttcggcagcaagacgagctcggagcggaggatgctgcggcgagtgaggctccccttctggtcctgccctccaaaccggcctccaggcacctgagcgcctcaaatcctcgatagaacagctggtctcgtgctcccctcccccctgtctctctactctgactttctttctttctttctccgctccgctccccgtgcccctcctgctccttggaccctgcctgttctgtcagtcagtctccctccctagaacggcatggctctgcgttttgtgtgatctcgtcgcgagcctgtccgccggtgccggtgcctcaatccccttgggagaagcaagggctcctgtctggtccgtgttcttgggaaccagggccttggtactgctgctgccgcgtgcttcactgcttcctggctgcctccgatcctctcgtctcgtgtgtgaaagaaacattccggaggcgcgtgtccttggcccgttgtgcccgcaacttgctggatgcaagagctgccctgtccctgccctgagcccctgtttccatcggaaaaggcaacagctcttgcctgcttggcacctgccgagtaattcgttatatatacagtgctcccacgaagcactagttggcagctgctgcgctgttatgttcttgtgcctcgtggatcgtcgccgtcggcctcgaagctttccacgacgaaatggacgacatgggctccgtccccttcgccgaagccgggctcctcgacgggttctacggcggtagccatggacatggtggtgactacgggctgcttgctagccagctgggagcgggagcgggagcgtcgtcgacgtcgcctgccatcttggacggcagcgtgccgctggtcgacgccgcggcctccgcggaggaggcgacgaggaggaagggagaccacctccaggacgacaaggcggcgatggcgctcaagagccacagcgaggcggagcggcgccggagggagaggatcaacgcgcacctcgccacgctccggaccatggtgccctgctccgacaagatggacaaggccgcggtgctggcggaggtgataacccacgtgaagaagcttaagtccaccgcggcgcacatccgagaccgctgcgccgccgtcccggccgacgcggacgacgtcgtcgtcgagctggtccatggcggcgcggcgccgccgtcggccggaggcggcgtcctcgtcagggcgacgctcagctgcgacgacggcgcagacgtgttcgcggacgtcaggcacgcgct

SEQ ID NO: 178 - DNA, 877 bp, Zea mays
  Clone ID: 700049043_FLI
ctttctttttcaacacactctatgatccatacaggaaaggtgctgactttgtccgtggttacccattcagcctgcgcgagggggttgagtgcatgctctcgtgtggtttgtggcttcataatgctgactacgacccgatgactcatgttgtgaagagaaatcaacggaacacaacatatgtggatgctgtgatgacggttccgcttggtgccatgctgcctgtgagcgggataaatgttgcattcaaccgcgatgtgctggggcctgctatgttcccaggcctgcgtctacgaaacgaagggaagcacagatgggatacccttgaagacatatggaatggcttatgtgctaaagtagtctgcgacagcttgggatatggtgtgaagaccggactgccttatgtgatgagaagtgatgcagaagcaggtaaagctctggagagcttgaaagagtgggaaggggtaaaagtcatggatgatgttctcccattcttccagtcgctcaagctatcgaggactgcagttactgttgacgattgtgttaaggagcttgctggagttgtccgtgagaagctaggacctaagaatgcaatcttcaccaaagcagccgatgccatggtggaatggaacaatctctggaaagtgcatggtgctcagaatgcatagtttgggagtttgcatgtttcctacagagcatctaatagttgtttggagtgcgcgttttacagttctaaattttccctgtggaactcatgaagctgaaataaacaacggtcctttatgccgtgaatttggcatgaatagctgagcatctcattgtatacgcttaagaattatgtaatgtaatgcatcaaaagaacatgtgatgttttcttgcc

SEQ ID NO: 179 - DNA, 1229 bp, Zea mays
  Clone ID: 700049071_FLI
gttgacctgtgccttgaccgcatcaggaagcttgcagataattgcactggtctccagggcttcctcgtcttcaacgctgttggtggaggaacgggctctgggcttggttctctcctcctggagcgcctgtctgttgactatggcaagaagtccaagctcggtttcaccgtgtacccatccccccaggtgtccacatccgtggttgagccatacaacagtgtcctgtccacccactctctcctcgagcacactgatgttgctgtcctgctcgacaatgaggccatctatgacatctgccgccgctcccttgacattgagcgcccaacctacaccaacctcaacaggcttgtctcccaggtcatctcatccctgacggcttccctgaggttcgatggtgctctgaacgttgatgtgaacgagttccagaccaacctggtgccctacccgaggatccacttcatgctttcgtcctacgctccagtcatttctgctgagaaggcctaccacgagcagctgtccgtggctgaaatcaccaacagcgccttcgagccatcctccatgatggccaagtgcgacccccgccatggcaagtacatggcatgctgcctcatgtaccgtggtgatgtggttcccaaggacgtgaacgctgctgtggccacaatcaagaccaagcgcaccatccagttcgtggactggtgcccgactggcttcaagtgcggaatcaactaccagcctcccagcgtcgtcccaggcggtgatctggccaaggtgcagcgtgccgtgtgtatgatctccaactccaccagtgttgtggaggtcttctcccgcattgaccacaagttcgacctcatgtacgccaagcgcgccttcgtgcactggtacgtcggtgagggtatggaggagggcgagttctccgaggctcgtgaggatctggcggcgcttgagaaggactacgaggaggtcggtgctgagtttgacgagggtgaggacggcgacgagggtgacgagtactagacgctctactggcgcggcgtcgtcgggcttgtgtgccactgctatcctgtgatctgccctgagtggctcctatcgtgttatgtttctgtcggttcttatctatctgtcgttgtgtggtttacaacttacgttgtaagactttattcccccgctttgctactgggttattaagtttggcgttattgttttcttgatctctgagatgctttgctttc

SEQ ID NO: 180 - DNA, 1406 bp, Zea mays
  Clone ID: 700049102_FLI
ggcttctcctggaggtgtgggagctgagttgggaggaggactgctgctgcagccatgaaggccctcattctcgtcggaggcttcggcacccgcctgcgcccgctcacgctcagcgtgcccaagccgctcgtggatttcggcaacaagcccatgatcctgcaccagatcgaggctctgaaggaagttggtgttacagaggttgtcctggccatcaattaccagcctgaggtcatgctcaactttctcaaggacttcgagagcaagcttggcatcaagatcacctgctcgcaggagacggagcccctcgggaccgcaggcccgctggccctggcccgcgacaagctcgccgacggatccggcgaccctttcttcgtgctcaacagcgacgtgatcagcgagtacccgttcgccgagctcattgagttccacagggcccacggcggcgaggccacgatcatggtgaccaaggtcgacgagccgtccaagtacggcgtggtggtcatggaggagggcaccggcaaggtggagcggttcgtggagaagcccaaggcgttcgtgggcaacaagatcaacgccggcatctacctgctcaacccgtccgtgctcggccgcatcgagctgaagccgacgtccatcgagaaggaggtgttcccgcgcgtcgcggcggacggggccctcttcgccatggttctcccgggtttctggatggacatcgggcagccgagggactacatcacgggcctgcgcctgtacctggactcgctgcggaagaaggcgcccgccaggctcgcgtcgggcgcgcacgtcctgggcaacgtgctggtgcacgagaccgcggtcatcggggacggctgcctcatcgggcccgacgtcgcggtcgggccaggctgcgtggtggaggccggggtgcgcctgtcccgctgcaccgtcatgcgcgccgcgcgcgtcaagcagcacgcctgcgtctccagcagcatcatcggctggcactccaccgtcggcaagtgggcgcgcgtcgagaacatgaccatcctcggcgaggacgtccacgtctgcgacgagatctacagcaacggcggcgtcgtgctcccgcacaaggagatcaaatccagcatcctcaagcccgagatcgtcatgtgatccgggagtaaatctggggcgccaaatccaaatcacaaggggcccttgcattgcattgcattgcatcgcatcgcatcccatcccatcccgatatgcttcatacttttgttgtttgattttttgctcggttgtttgtctgcaagtgtaaccagttgtcgagtgtttaatttgtcggctatatagactattttcaagtttcgctccgtgcttgtagataggtatcagtcgtctatcagatgagtggaaataacaacttctcttcgtat

SEQ ID NO: 181 - DNA, 961 bp, Zea mays
  Clone ID: 700049109_FLI
cgagcacactgatgttgctgtcctgctcgacaatgaggccatctatgacatctgccgccgctcccttgacattgagcgcccaacctacaccaacctcaacaggcttgtctcccaggtcatctcatccctgacggcttccctgaggttcgatggtgctctgaacgttgatgtgaacgagttccagaccaacctggtgccctacccgaggatccacttcatgctttcgtcctacgctccagtcatttctgctgagaaggcctaccacgagcagctgtccgtggctgaaatcaccaacagcgccttcgagccatcctccatgatggccaagtgcgacccccgccatggcaagtacatggcatgctgcctcatgtaccgtggtgatgtggttcccaaggacgtgaacgctgctgtggccacaatcaagaccaagcgcaccatccagttcgtggactggtgcccgactggcttcaagtgcggaatcaactaccagcctcccagcgtcgtcccaggcggtgatctggccaaggtgcagcgtgccgtgtgtatgatctccaactccaccagtgttgtggaggtcttctcccgcattgaccacaagttcgacctcatgtacgccaagcgcgccttcgtgcactggtacgtcggtgagggtatggaggagggcgagttctccgaggctcgtgaggatctggcggcgcttgagaaggactacgaggaggtcggtgctgagtttgacgagggtgaggacggcgacgagggtgacgagtactagacgctctactggcgcggcgtcgtcgggcttgtgtgccactgctatcctgtgatctgccctgagtggctcctatcgtgttatgtttctgtcggttcttatctatctgtcgttgtgtggtttacaacttacgttgtaagactttattcccccgctttgctactgggttattaagtttggcgttattgtttt

SEQ ID NO: 182 - DNA, 523 bp, Zea mays
  Clone ID: 700049130_FLI
cagttgttgacctcactgtcagaatcgagaagggggcctcttacgaggaaatcaagaaagctattaaggctgcttctgagggcccactcaagggtattatgggctacgtggaggaggatctggtttccaccgacttcaccggtgacagcaggtcgagcatcttcgacgccaaggccgggattgccctgaacgaccacttcatcaagctcgtctcttggtacgacaacgagtggggctacagcaaccgcgtcgtcgacctgatccgccacatgttcaagacccagtagagagagatatttctgcctccctatcgtgggtcgtccccaatggcctttggtcgcagaccatctttgctgcttgtctatgctgagaataaatgtgaacggtgcccctggacgctggatccatgctggttttggacacgttgtctttttgtgtttaacttatctgctaccgtcctgtaacgaattcactaagttctagttcttttgtgctttgttaagaatataaacaatgaggtttc

SEQ ID NO: 183 - DNA, 781 bp, Zea mays
  Clone ID: 700049131_FLI
cgtcgcctggcggccgtctgcagctccgcgcctctgctcggaagttgttggtgaaggtttcttgaagctgagaagatggtgctgaagacagaactctgccgcttcagcggccagaagatttatcctgggaaaggcatccgatttatccgtgctgattctcaggttttcctttttgccaactcaaaatgcaagcgctacttccacaaccgcctgaagcctgcaaagcttacctggacagcaatgtacaggaagcagcacaagaaggatatccatgctgaggctgtcaagaagaggcgccgcgccaacaagaagccatactcgaggtccattgtgggtgcttccctagaggtgatccagaagaagagggctgagaagcccgaggtccgcgatgctgctagagaagctgctcttcgcgagatcaaggagcgcatcaagaagaccaaggatgagaagaaggcgaagaaggcggaggtgaccaagtcccagaaggcgcagacgaagggcgcggtccagaagggttccaagggccccaagttgggtggcggcggtggcaagcgctgaaagaaccgaagtgtcgttccttgaccttgcaattgctcctccgtggcccaccttgttgcaccaccgccacttttgtagtacctcggttaattttgcattttctttcagagttgcttgtgggttttgagttccatctcaagagagttgagtttatttatctttatattgggtgaaatgttcatatgctttcctcagcttggatgatggtttgctttgtttc

SEQ ID NO: 184 - DNA, 668 bp, Zea mays
  Clone ID: 700049169_FLI
atcacgggcgcggaggcctgcttcgcgcactccaagcagatgctccaggcgctgggcttcccgggcggcgtgatgccgctgcgggggctggaggagtgcggctgggtgcgcgagaccgggttcgtgtggatgcggcagaaggccccctacgagcactacttccgcggcacgggcacgcgggtgcgctacgacgccgaggtcaccgcgtacgtggaggacggccggatgaagcgcatgaccggggtgcgcagcaagcaggtcatgctctgggtgcccatcgtcgagatgagcctcgacggagagaagcgcgacaagatctacttcaagtccaacgtcgggatcggccgctcgttccccgcctccgccttcgctgacgaggacgagcaagcggaggaggaggagaagaagaagaatgagaacaaggaggagaacggcgacaagccagccgccgccgccgccgatgccgccggcaagtgagacggagacccgagcgcgcgcgtgttgtcgtcgtgccgggtactgtgcgcggttgcagggcaccgttgcgcgacgcatctcgcgcgtaaccacgcgtgaagatgcacgtatctatcgtctttctttgctactttgtgttgcttgtcctttttcctccttttttttctttcaaaaaatgtattattgcctgt

SEQ ID NO: 185 - DNA, 933 bp, Zea mays
  Clone ID: 700049189_FLI
ctcaatcccgagacaaaggaacccacctccactcccaccagcaagctcaagcaagcagccaccaccagcagcgatcagcggcagccatggacatgggccggcaccagctccagctccagcacgcggcctcctcgtcctccacctcggcgtcgtcctcgtccgagcaggacaagccgctctgctgctctggtcccaagaagcgccccgcggggcgcaccaagttccgggagacgcggcacccggtgttccgcggcgtgcggcggcggggcgccgcggggcggtgggtgtgcgaggtgcgcgtccccgggcggcgcggcgcgcggctgtggctcggcacctacctcggcgccgaggcggcggcgcgcgcgcacgacgccgcgatgctcgccctgggccgcggcgcggcctgcctcaacttccccgactccgcgtggctgctcgccgtgccgcccccgcccgcgctctcgggcggcctggacggcgcccgccgggccgcgctcgaggccgtcgcggagttccagagacgccgcttcggggcggcagccgccgacgaagcgacctcgggcacgtctcctccctcctcctcctcctcggcgacgaagccggcgccggcgattgagcgcgtgcctgtggaggccagtgagacggtggcgttggacggcgccgtgttcgagcccgactggttcggggacatggacttggacttgtactatgccagcctcgcggaagggctgctcgtggagccgccgccaccgccaccgcccgccgcctgggatcatggtgactgctgcgactccggagctgacgtcgcgctctggagctactagcaagctatagcagcaataagctccaccaactcatctgtactgtagtgtacttgtaccttgtaccttgtaccaaaatccaaattgatttgtagcgaattaacttacc

SEQ ID NO: 186 - DNA, 1106 bp, Zea mays
  Clone ID: 700049247_FLI
gagaatgtcactgtaacaccccaccttggagctagtactgtcgaggctcaggaaggcgtcgctatcgagattgcggaagccgtggttggtgcgctgagaggggagctcgcagcaaccgctgtgaatgcgcccatggtcccagctgagatcctgtcagagctggctccatatgtttctctggccgagaagctcgggaggctggcggtgcagctcgtggccggcgagagcggcatcaagggcgtgaaggtggtgtacaccacagcgcgtggccccgacgacctggacactcggctcctccgcgcgatggtgaccaagggcctggtggagccggtgtccagcacgttcgtgaacctggtgaacgcggactacacggccaagcagcgcggcctccgcctcacggaggagcgcgtggcgcacgacagccccgcggcggaggcgccgctggagtccgtccaggttcgcctctcgcacgtgcagtccaagttcgcgggtgccatcagcgacggcggggacgacatcgtcctggagggccgggtcaagtacggcgtgcctcacctcaccctcgtggggccctacgaggtggacgtcagcctggagggcaacctgatcctgtgccgccagatcgaccagcccgggatgatcggcaaggtcggcaacatactcggcgacacgaacgtgaacatcaacttcatgagcgtcggacggacgttcaggggcaagcaggcgatcatggccattggcgttgacgaggagcccgacaaggacacgctggagaagatcggggccattccggcgatcgaggagttcgttttcctcgaactatgatggctagcagcgagttttctctaggattgatattttgttatagtacgtactgaactggagtttgacgtcttccgctctggtctgtctgtctgtttggtgacctctacattttttatgcggggagaagggaagcaatatatattgtaagagggtgccttggcttgccccctgcctaaataagaggtgtgtgccgtttgtttatctgtaaactgtgtatgtgtatgtgcttaatgcgtgattttaattaagcacatcatcattgcgtctgaaatgaagacgag

SEQ ID NO: 187 - DNA, 533 bp, Zea mays
  Clone ID: 700049260_FLI
gaaccccaagagctctgacaaggagggtggtgctggcagcaagaagggggatacaaagacttgcccagtgcccatctggtttgagacctgggagagagctgacacatatgccgctcttgctgttgttgcagctgccgcagcggtgcttgtctccttcagaatctacaagaacctcaactgaagaacatgggagatcctggaagaggtgaccaaaacaagtataggtgaaacagcgtactgtgataaaagtctgggatgagaataaatttacctgtgcataatgctaggcttaggctatggctagcaaatcgttgtgcaaaatattgttgtgcattgtttacaaagtgatgtttgaaatagaagataacggcgatgaacaagccgttggagataaccttagaacctcaaagtagcttatctggagatggagacggtgttgaaaagatgttgctgccagtgttctcgtatgtgaactccttgtgaacctccactccactgcaatcgaagtttcgatgccttagctgctgtttatc

SEQ ID NO: 188 - DNA, 1121 bp, Zea mays
  Clone ID: 700049323_FLI
cacaaaaaccctagcacgcaggcgcagccaggcctgcacccaaagcttccggagaattcctcccttgccccgccgtcgcatcctcttcgaagttcgaatcgaatcgcgccgcgatcacccacctcatggcggacaaggagcctgtcgtggagcggccagaggcgggtgaggaggaggaggacgcctcagccgccgccgccgcgggggaggaggaggacacgggcgcccaggtggctcccatcgtgcggcttgaggaggtagccgtcaccaccggcgaggaggacgaggacgtcctgctcgacatgaaggcgaagctgtaccgattcgacaaagacggtaaccaatggaaggaacggggcacgggcgctgtcaagcttctcaagcacaagcagaccggcaaggtccgcctagtcatgcgccaggctaaaacgcttaagatctgcgcgaaccacctcgtggcctccaccacgaagatgcaggagcatgcgggcagcgacaagtcgtgtgtttggcacgctgctgactttgccgatggcgaacttaaggaggagatgtttgccatcaggtttggttcggtagaaaactgcaagaagttcaaggagttggttgaggagatagctgagtcgcttacaaagaacgagggcaaggaaggtgaagatggtggttccacggctggattgctggcgaagctcactgtgagcgagggcaaatctgagggaagtggcaagtctgagtccactgattctggcaaagtgactgaaaccaaagccgactcagccccagctgagtagttggtgtggttgcacttgcacgcagattcgcctggtgctgaactagtttgtctgtccgcgtccagtggaagtttggtgccctttagccatggaatacgattgctatcatttgggcccgggccgagttggaggagtctcaggtgttcggtctggtttggtccgggcttgattttgctaaaaacttgggagtccatgggggttgggaacgtttgatatgtgagtcgctagtatttaactgcatggatcgttgtggattgcggtaaattcataaagtggaccctatatattttttatttcgttcaatacacattcatatcatcaatgatttat

SEQ ID NO: 189 - DNA, 389 bp, Zea mays
  Clone ID: 700049351_FLI
ggtggatagcggcgcccaggcatacgattccctgcgtcatctggctggccgacgggctgcgtgttttaacggctccactcctaacactggctgagctcagcccacacttggcctggcctcgttctgctgaagctcgacccgttccccctaatcttctccaatccctttcttctgggctctgacagggtgacgaatcccatgggcgccgcggcgaggaagcccgccgccgctggggtgttgccaatctggctctgcctcgtctgcgcgtcgagagcgcagccgtacatcggcgtcaactacggcgaggtggcggacaacctgccgtcggcggacgagacggcgaggctgctcaggtcgacgtccatctccagggtgcggctgtacggcgt

SEQ ID NO: 190 - DNA, 413 bp, Zea mays
  Clone ID: 700049368_FLI
tgctcggatctcgggcagacgacgacgacgacaagacgtgcagggagacgtatgtgttggatctccacatactgagcttcgtgaacggggcggagcgggaggagcacgagtggaggaggatcttcctggcggctgggttccgtgactacaagatcacgcacacccgaggcatcccgtccatcatcgaggtcttcccgtgatgatcatggatcgagagtcgatcatatatgcatgtttgtacgtgtttgtgtcataataaatcgatcgatcatgttgtttactctttttatttcggtatgtagttgcatctgtgggcgggctaaaataaatcacggccggccgggcttcatcaagcccatgtatccagctgtgtgtaataatgcaatggaaaacgaaccaaaaagaatgcttcc

SEQ ID NO: 191 - DNA, 1269 bp, Zea mays
  Clone ID: 700049378_FLI
ccggcggcggcaaggcggcgctggcgcccgaggaggtggtggcgcggatgcccgcggcgcccagcgaccccgccgccgccgcggccatggtggaccgcatgctccgcctgctcgcctcctacgacgtcgtccggtgccagatggaggaccgggacggccggtacgagcgccgctactccgccgcgcccgtctgcaagtggctcacccccaacgaggacggcgtgtccatggccgccctcgcgctcatgaaccaggacaaggtcctcatggagagctggtactatctcaaggacgcggtgctggacggcggcatcccgttcaacaaggcgtacgggatgacggcgttcgagtaccacgggacggacccgcgcttcaaccgcgtgttcaacgagggcatgaagaaccactcggtgatcatcaccaagaagctgctggacttctacacgggcttcgagggcgtgtcgacgctggtggacgtgggcggcggcgtgggcgccacgctgcacgccatcacgtcccgccacccgcacatctccggggtcaacttcgacctgccgcacgtcatctccgaggcgccgccgttccccggcgtgcgccacgtgggcggggacatgttcgcgtccgtgcccgccggcgacgccatcctcatgaagtggatcctccacgactggagcgacgcgcactgcgccacgctgctcaagaactgctacgacgcgctgccggaaaatggcaaggtcatcgtcgtcgagtgcgtgctgccggtcaacacggaggccacccccaaggcgcagggcgtgttccacgtcgacatgatcatgctcgcgcacaacccaggcggcaaggagcggtacgagcgcgagttccgcgagctcgccaagggcgccggcttctccgggttcaaggccacctacatctacgccaacgcctgggccatcgagttcatcaagtgaatacggctaccaccgtcgccgcgatgagatgcatggctgccacatgcatgcttgcttgcttggtcctcgtatcgtacgtcgccgtcgtcgtcttcttctggttgcgctgctaccttgctgctctcgccctcgcgtatgcatgtacttttgcttaattttctttcttcatatcatgcactctggctggcctagactgcccccgatctatgctggccggtacgtcttgtcgagctcttgcatgtcgtggattctaaattcttcttctgcgtcgaattgtctctgccatgtgcgagtaataacaatcaaggttatacttacc

SEQ ID NO: 192 - DNA, 928 bp, Zea mays
  Clone ID: 700049389_FLI
tgagcacgcacgcacgcacgcaaactcaaaggagtgtgaccacggaactgaagccatggcggttacagttgagaagggctctatgggcgagccggcgctgctgctggagcgcagccgggcgatcaccctgcacggccgtgaccggaagggccgtgccgtcgtcaggatcgtcggcaactactttccaggtagtacaccttaccagcgattcagaatttgcccagatcgcaggcgggcttcgccgtgccgtggtggaactgacggacgttgcctccgcctcgtttgcagcgcgcgcgctgggcggccgggcggaggaggcgctgcggtcgtacctgcgggagcgcatcctcccggagatcggggaccgcgagttcgtggtcgtgtacatgcactcccgcgtggatcgcggccacaacttccccggcgtcggtgcgatccgcggcgcgtacgagacgctgccggccgcggccaaggagaggctgcgcgccgtctacttcgtgcacccggccctccagtccaggatcttcttcgccaccttcgggcgcttcctcttcagctcagggttgtatgagaagctgcgatacatgagccggcttgagtacgtttgggcccacatagacaaggagcagctggaggtccccgactgcgtgcgcgagcacgacgacgagctggagcgccgcccgctgatggactacggcatcgaggcgacggagacccgctgcatgtatgacgccgcgtccatggacacctcggcgtccctgcactcgctccgctgcgtctcctagtcgcctggacagtggcatcccgattcccgccggtacggcgtgctttctgtgttctggttggtaggaggtagctgcatggcttcatagcgcttcggtactgtagtttagctgtgtatttataatggataaaatttggagtaccg

SEQ ID NO: 193 - DNA, 195 bp, Zea mays
  Clone ID: 700049417_FLI
catgttccagcagctcacgggcatcaacgtcatcatgttctacgccccggtcctcttcaagacgctgggcttcgcggacgacgcctccctcatgtccgccgtcatcacgggcctcgtcaacgtcttcgccaccttcgtgtccatcgtcaccgtcgaccgcctcggccgccgcaagctgttcctgcagggcggcac

SEQ ID NO: 194 - DNA, 779 bp, Zea mays
  Clone ID: 700049430_FLI
ctcccctgttcggttttaggagacctgcgccgctcctccggccacgcgagcacgccgaaatggtcgcccacaggttccatcagtaccaggtggtgggtcgcgcgctgccgaccccgaccgatgagcaccccaagatctaccgcatgaagctctgggccactaacgaggttcgcgccaagtcgaagttctggtacttcctgagaaagctgaagaaggtgaagaagagcaatggccagatgctcgccatcaacgagatcttcgagcgcaaccctaccaccatcaagaactacggcatctggctgcggtaccagagcaggacggggtaccacaacatgtacaaggagtaccgcgacacgaccctgaacggcgccgtggagcagatgtacaacgagatggcctcgcgccaccgcgtgaggtccccctgcatccagatcatcaagactgcgacggtccacttcaagctgtgcaagagggacaacacgaagcagttccacaactcggcgatcaagttcccgctcgtgtaccgcaaggtgaggccgcccaccaggaagctcaggaccaccttcaaggcgtccaggcccaacctgttcatgtgatgggcctcggcgggcgggctgtcgcgcacctctgttttgtgtcttagtgtccagagagataaaggtttttgcctctgcaagatttgctgccccgtggactgagcaattcgatgattttttggatgatgtattgcaaacccttgacttttgtcctactagttatgagcaggctgctctttactt

SEQ ID NO: 195 - DNA, 571 bp, Zea mays
  Clone ID: 700049431_FLI
acggcgaccaacgccgccgtggaggcgatgacgaagatcctggccaaggaggtggcggcgaagggggtgaccgcgaacgtggtcgcgccggggcccgtgcgcaccgagctgttcttggccgggaaggacgaagcgttcctgcggagggtggagcagcagtccatgggccgcatcgccgagacgacggacgtggcaccggtggtggcgttcctggccagcgacgccgcggcttgggttaacggccaggtcatcagggtcaacggcggttttgtctaataagggtccaagtgcgccagatgttcagatatagtggtatctgccacatacgcaagttttttaaaaaaaaatacgcaaaaatgtgagtggcgcgtgtgtgttttaataaaaaaaaatcaagttatgcagtgtactgagtgcggattatgccgtgtaactcaacttattatatgaacgtcatatcaagttactgcggaacaagggctctacagcgatgctgtccacgtttcgctttgactagagaggttatactgagatcgagtctattggcttagctttaatttgttatttctat

SEQ ID NO: 196 - DNA, 1479 bp, Zea mays
  Clone ID: 700049476_FLI
ggcgtggcatccaaaggcggtcaagattcgagaggccggaggaaccaagcgtagggcctccgaccccacgtcgtcgtccgcgcgcgccgcccgccgccgcagggagatgggggccgattactacaaggtcctcggcgtcgaccgcggcgccagcgacgacgacctcaagaaggcctatcggaagctcgccatgcgatggcaccccgacaagaactccaccaataagaaggaggcagaaaccaagttcaaggagatctctgtggcatacgaggtccttagcgatcccaagaaacgtgcaatctatgatcagctaggggaagaagggctcaaggggcagccgcccccaggagcaggaggtcctggcacatctcccttcttccctggcggggctcattccaccgctcaccattttaacccgaggagcgcggacgatatatttaaagagttctttggatcccctggcatgggtggcatgagaacggaaccaggatttcaaaggtcaatgtttggcaacgatatcttctcttcgcgcttccgcgctgagggttccaccagtatgcagcagccattgcgcaaggcagctgcaattgagaatccacttccagtcggccttgcagatctctacaagggtgtgacaaaaaagatgaaaatctcaagagagactattgatgccagcgggagaatctcaaacacagaggatattctgacaatacaagtaaaggctggttggaagaagggaacaaggattacatttcctgacaagggaaatgaagctccaaatatgaaacctgctgatattgttttcatcattgatgagaagccccatgatgttttcactcgggagggaaatgatcttgtcgtgactgagaagatctcactggtggaagcactgactggctataccgcacgtgtcactacgcttgacgggcggagcctatcattgcacatcaactcaataatccatccaaagtacgaagaggtgatgcctggagagggcatgccagtgcccaaggaccccacaaagaagggaaatctgcggattaagttcaacataatgttcccctctaggctgacttctgatcagaaggccgggatcaagaggctattgggttcttaggccgccacctcaaatgacatcttctttatgatgaaagttgtttgtgaatattgccagtaatttgtttgtcacagtttagttttttaaagtggtgcccttagttttgccgatgtcctcatttttacccttagtcgtgtttttttttctaaagttttgctcttccagtgttctatagagcagaagggtaaaactgatgaaaaaaatatgactaagggtaaaaatgaggaacctgacaaaaataagggcacgaattaaaataggttttccggtgggtgggtagttgatgaattgtaaatcccaaacaaaccggccggcccttagcaaccacaacaagggtgaaccttcaccattttattttagtc

SEQ ID NO: 197 - DNA, 464 bp, Zea mays
  Clone ID: 700049504_FLI
gtggactattcacaccctttgattcagcagtgcttcatgcgttgattgatgtgtatcaacattagaatttttgtaagcttcatggtagatatgttccgagcacatgctccaactgccacacggaaacattgtagttaaatcagttggcttttctctcaagttacaatctctgacaaaacatcagtggatgtctatagcatctgtagttgatggaacacaacaattgcgtatctctagccacaggtaaacagcacacgagctgagactgctatgcagtaggctgctacttgaactacatccactacacagatcataacttgcgaccatcgatgtaattttcccattttttatttttgggtgagacatagccacagaatggagatggtgtagaattgattttaaattattgatgtgttacaacaagttttgtgttacctatccatatttattgggtgttaaagact

SEQ ID NO: 198 - DNA, 1883 bp, Zea mays
  Clone ID: 700049526_FLI
gtcgtaggcagcgagcgtctctcctctcccacgcatcgcgccaaggaagagagagagatcgccgctccccttctcggcgtcggtggtgcgggtgccctccctcctcgagcgagatctgtctggtcacagatctatctgacaaaatggtgaagatctgctgcatcggtgctggctatgtcggtggcccaaccatggccgtcattgccctcaagtgcccagacattgaggtcgtcgtcgttgacatctccaagccccgcattgaggcctggaacagtgacaccctgccaatctacgagcctggtctcgatgatgttgtgaagcagtgcaggggcaggaacctcttcttcagcactgatgttgagaagcacgtcgctgaggctgacattatctttgtctcggtgaacacccccaccaagacccgtgggcttggagctggcaaggctgccgacctcacctactgggagagcgctgcccgcatgattgcggatgtctccaagtctgacaagattgttgttgagaagtccactgtccctgtcaagaccgctgaggctattgagaagatcttgacccacaacagcaagggcatcaactaccagatcctttccaacccagagttccttgcggagggcactgccattgaggacctgttcaagcctgacagagtgcttatcggtggccgggagacccctgagggcaggaaggccgtccaggctctcaaggatgtgtacgctcactgggttcccgaggacaggatcctcaccaccaacctgtggtctgctgagctctccaagctcgctgccaacgcgttcctggcacagaggatctcctctgtgaacgccatctccgccctctgcgaggccaccggcgcgaatgtgactgaggtggcttacgccgtgggcaaggacacgaggattggccccaagttcctgaacgccagtgttgggttcggtgggtcttgcttccagaaggacatcctgaacctggtgtacatctgcgagtgcaatggcctgcccgaggtggccaactactggaagcaggtgatcaagatcaacgactaccagaagagccggttcgtgaaccgcgtcgtgtcgtccatgttcaacaccgttgccggcaagaagatcgccgtcctcggcttcgccttcaagaaggacaccggcgacaccagggagaccccggccatcgatgtctgcaagggcctgctgggtgacaaggcccagatcagcatctacgacccccaggtgacggaggaccagatccagcgggacctagccatgaacaagttcgactgggaccacccgatgcacctgcagccgacgagcccgacggccgtgaagcaggtgagctgcgtgtgggacgcgtacgaggccaccaagggcgcccacgggctgtgcatcctgaccgagtgggacgagttcaagaccctggactaccagaagatcttcgacaacatgcagaagcccgccttcgtcttcgacggccgcaacatcgtcgactccgagaagctgagggagatcggcttcatcgtctactccatcggcaagccgctcgacgcctggctcaaggacatgcccgcggtcgcctaatcccacccccctcacccatggattggattccgggaaggaagaggagagaagctggttgaccgttctttattacagtttgtttttgcaggctacgctaccgattttctcttgtgtcaggcataaaaaaaggttggacgggctgctagtattccctgctgtttggtgttttcgtatcggaggacgtctgtagatgtacaattcctcaggccccttgtgttcggcttgaggaagtttccgttgtaccctggacctgctatagccggttgattcttcaattgtattcctaaaagttactac

SEQ ID NO: 199 - DNA, 1189 bp, Zea mays
  Clone ID: 700049541_FLI
gcttattaggatacaatatgccatcgccaataattgtcgcacctacaggggcacacaaattagccaatcccgaaggggaggtggccacagcaagagctgccgcagcatgtaacaccataatggtgctttccttctcatcaagctgcaggatcgaggaggttgcctccagttgcgacgctattcgcttttatcagttatatgtgtacaagagaagggatgtttcggcaactttggtacggcgggctgaaagtttaggattcagggcaattgttttgacagttgacacgcctgtgcttggcaggcgtgaagctgatatcagaaataagatgattgctccacctctgtcaaaccttgaaggtttaatgtcattagacgactttgacgatgctgaaggcggctccaagctggaacgattctcacgggagacgctggatccatcattgtcatggaaggacgtggagtggctcaagtccatcaccagcctgccgattctgctcaagggcatcgtcaccgcggaagacgcgaggaaggccgtggaggcgggggcggccggcgtgatcgtgtccaaccacggcgcccggcagctggactatgcgccggccaccatctcggcgctcgaagaggtggtcaaggcggtggcgggggctgtgccggtgctggtggacggcggcgtccggcgcggcaccgacgtgttgaaggcgctggcgctcggcgccaaggcagtcatggtgggcaggccggtgttcttcgggctggcggcgcgcggggaagccggcgcgaggcacgtgatcgagatgctgaacaaggagctggagttggccatggcgctctgcggctgccgtagcgtcgcggaggtcaccagggcgcacgtccagaccgagggcgaccggatcagggccctgctgtgacgtataaataagcgaccatatccgaggccgaccaccgtgctgtcagggttgcgatatgatttatatgatacgtgagggcatgtgatgtgacatccattgttgcctccacacagataagcttattactattgccagagcctgggctggactatgctttcagtgattatctaaatcaaatagactgaatgctaaagggaacatccaatggaatggtgtcagcatttgttggagtcatgtagccatttgactgcccatcattaagaacagtggattctcatgct

SEQ ID NO: 200 - DNA, 1122 bp, Zea mays
  Clone ID: 700049542_FLI
ggccactgcaacgagctcgcctgtcgcctcgccccggcgccccgcgacaacgagacctcctcctccgctcagccgcagaagccacctcgccgccggcagcagcgttggcggaaaaggggtggaggcgcggcgattgttcgcgggatgagctacggcggcagcagctccctcgcgcccggtgccaagaggccgttcgagtacgggagaacgcatgtggtgaggcccaagggcacgcacaaggccaccattgtctggctccacggccttggtgacaatggaaccagctggtctcaactgctggaaacgcttccccttcctaatataaaatggatatgcccaactgcaccttcaagacctgtgtcattgtttggcgggttcccctgcacagcatggtttgatgttgctgacctttctgaggatgctcccgatgacactgaggggatggatgcctcagcagcacatgttgcaaatttgttgtcaactgagcccgctgatatcaagcttggtgttggtggctttagtatgggtgctgctactgctctgtactctgcaacttgctttgctcatggaaaatatgggaacggcaatccataccctgtgaacctaagtcttgccgttggtcttagtggctggcttccatgtgccaggaccttgaagaacagaattgaagcctcaccagaggctgcacaaagggcttcaacaatacctcttttgctctgtcatggaaaagctgatgatgtagttctctacaagcacgggcagagatctactgatgccttgaaggcaaatggcttttccaatgtgctcttcaagtcatacaatagtcttggtcactacactgttccagaggagatggatgaagtttgcaaatggctcacagcaaatttggggctcggcacttcgtcatcttgatcgcgagaaagactcgcggtgtcggtgtcttctccagggtagtaaatgggctaatagcaaatttgggcttgggtatacggccatgttctagcttttcttcacgcagacgtgtctgcgagtgctgtacgcttataatttctatattctggtctacgtcgatttggttgacacggatattgtttgtttcaaatattctgttttccggtttgg

SEQ ID NO: 201 - DNA, 1936 bp, Zea mays
  Clone ID: 700049568_FLI
ctacaaaacactcccttgctctaagcacaactgatggaccactacaaaacactcccttgctcgaatccgctaagcacaggcccaaaccgtccacttggaaactcgaagcccatcctgtctttcctttgcgtcagtcgtcttcgacgcaaggagaattgggaattcaggaatcaggatgcggctctccttcccccttgtcgccggcgccgtcgtgatcggagtgatttctgggaatgttatatttgggccaccgcttcagaagtactgggcagagaagcagcagcaagaggcagcaaaagaaggccaagctggttcaacctgacaaaatgtcctccccttctgcagttacacggagaaatgtgtactcctcggtcctgaactagcatcggcttttgttagcattggttacatttagttgcccaagttttcggcgctggaagaagacaccgtgcaatgcacagaaagatttgaaaaacgtttaaatgctggttgatctcattctgaaatacagtacctttgatgaatgcaccgtgcaagacacggtggagacaccttcgaatgatttcaagcctcctttgaaatacctttgaagaagacaccgtgcaagacacggtattgtagtttgcatatctccgagtgcaggttgatttctgaaatagctagaagtcaggatcacagcgctgtatatcctactatcctagcctctttttcgtggcttccggatcttgctgggccgaccgttcgtctgagttctggcccaaattggcttttccggaatacggctcggccctctccagtacaacctccaccgctttctgaacacgaattagaaaaggacgcgatattgcagaagctcccgcccatttttcaccaatcaccagccctagccgcccattttccccatttttcaccaatcacaagaacctttgcgtcctccggcgaggcggcaaccgccggatccctgaacgtctgaatcctggagtgaaccccgcacaggatggcgaggaaagcgaaacccgccgcccaaggcaccgcggtcgtggctgccgccaccggcgtccagtactggctcttgaagacggagccgggcgagtggtcgtggtccgaccaggcgcgcgccccgggcggcgtcgcgccgtgggacggcgtccggaaccggcaggccatgagcagcctgcgcgccatgcggccgggcgaccgctgcctgttctaccactccggcgccggcgccgcctcccgccgcgtcgtcggcgtcgtcgaggtcgccaggccctggtacgagggcgagggcgaggaggcggtggccggtggcgccgtggacgtgcgggcggtcggggagttccggaaccccgtccctctgggtgtcatcaagaaggcggcgggcgaggtggaggggatgaaggacttcgcgctgctccggcaggcgcggctgtcggtgatgcccgtgccggcgaagatctgggactgggtttgcgacgcgggaggcggcctcgtgcaagacggcgagggtgaggacgaggaagaggaagaagaggcttgattccgcagaccagcaaatgtgaagaaggtacacggccctgattttgctgtgcaacagagaacttgatcagtgttgctacatctctatagtaaatctgtaagttatctgcttattctgacgtcttcttgtagaaccaagttgctcctgctggtgacatgagcagttgcaacttgcaaggcggcgttgtgtgggagtccttttggcctgcaagtgttttgctagctttgacaaggcactcctgtttcttcagtgttcgccgtctcggcgccgaagtgcccaagaaaaaaatgtatttactatttgatctactcctatgtaagttcagtggttcatgtagccaagtagcttggatatctatgaaggtactcgagctgttgcatgctgcggcagttttgc

SEQ ID NO: 202 - DNA, 1229 bp, Zea mays
  Clone ID: 700049622_FLI
ctccatcatggaacgtaaccctaggtggaaccagctgccggttccaaaggaggcactgtacccatgggaagacaggtccacctacatccgcaagcctacgtacctggagggcatgtccatgacgccgcctgcagccccgcccacggtgacggaggcctactgcctgctcaaccttggggacagcatcaccacggaccacatctcctactcggggaagatccccgagggcacacctgcggccaagtatctgctcgagtatggcgtggagcccaagaactttagctcctatggtggccgccgcgggaacaatgaggtggtgatgaggggagcgtttgccaatatgaggatcgtgaataagcttcttgatggcaaggctggtccctggacgatccatgttccttccggggagaagctctatgtttacgacgcggcaatgaagtacaagtcggaaggtcatgacatggtcatcattgctggctccgagtacggcagtggcagctctcgtgactctgctgccaagggaccaatgctactgggtgtcaagtcggtgattgcaaagagcttcgagcggatccaccggagcaacttggtggggatggggatcattcctctctgctttaaagcaggagaggatgccgattcactcggcctcaccggacgtgagcgctacaccatccacctccctaccagcaccgccgagctcagtccaggccaggacgtgaccgtcacgacccacgacggcagatccttcacttgcactcttcgcttggacacacagcttgaggtcacatacttcaaccatggaggcatccttccctacatggtccgcaacctggcagcacagatgaaataagttaaaaaagcaagctagcttattggtgcggtgggaataaattaaaaaggtactcagtgccccacgtatttgacgtatgtctgtaaataagtggcacattcgagcgctcttcgctctgccattgaggtggatcgaagctgccacatattttctccgcaggacatcggcacgaattttgtcttagcaaaccagttaattttgtactctttagattctttaattggttccatgctctctttggtacttttcatgtcagtttgctttgcaaacattatcagcgtgcccttgtagatttcgtaatggttatatgtatatgccctattgaaattgtcattttgctttgcaaaaaaatatcagcgtgccgttgtagattttc

SEQ ID NO: 203 - DNA, 715 bp, Zea mays
  Clone ID: 700049763_FLI
gactacaccatcaccttctgccccgtcgccaccccaagcgtgaaatcgtcgagtggccctggagcggcaacaacgacggcggcaccgacaggcccgacgccgacgctgccgggggcgacgccgcggtcggcaggcggcggcccggaggggcagggcgtgatgctgggcgacaactcctggctcgccagcctcgccacgggcgacgcgtcgtccgcgccggcgctccgggccttgcccctcgcgccgctcctgctcgtcggcctgctcctgcttgtgctgctatagcaccaccagcgggaaacccaggcaaccgaccgcgtcacgggcgtgtgaggcgaaagcttttgatctcggacagcctaccgaacgcgcgcgctcctgctacgtttgatgaatcatctcctagtcacggtgcaggcgtgcagtgcggcggatgattttgacggctagccgaatgcgcgcacccccatccccagtcagcagctgaaggaaaaaaagtttaagtggcctactcatggatgaggtggctgcagcatggactagacacaaatactattagtgctgatggtgtatagtaccgctgccgctttaaagtagtgtacagtgcagtgcagctctgatggcgctgtccctcggcacatgggaggagatgtgccatgccatgccatctgatctgtgcttgcggatcaatcaaatactacgtacgtgtctacgt

SEQ ID NO: 204 - DNA, 488 bp, Zea mays
  Clone ID: 700049810_FLI
cagcaacaaagattcggtggtagcactctgtccactccctctcgtttgttgaaaaaacatggagcctcaattttttctcgaggtctcgttacggcttctggtcgtgaaggcctcttcactgctggatacctcggtcttgctccctccattacccgtaacctaatcgaagaaagagagttttccaacacgaacgctcgattcatcggtgcactgctcgctggattgctctttggtactctcagtcatcctctcgacactataaagacttgtatgcaaggagacgtagagaaagagaagtacacatcgctcagagacactgcttctaccttgtacagagaaggaggactacgacgattttttagaggatggggatggagaacaagtagatttattggtggtatttttattatcaatgttggcaaatcgctttttggtccacttctctttcctcaacactttagacagcagaaataaaataaacacatgcc

SEQ ID NO: 205 - DNA, 1515 bp, Zea mays
  Clone ID: 700049821_FLI
gcaactccgacgtcatcgtccagatgctccagccctaaccgcgcataaaccccgcgccgccgctgccgcctcctgtcccggtcggatcctccgcgccgctcgcgccgccctcatcttcccagccccaacgcgacgcaccacaagggccctcgccatgtcgaagaaagtaggacgagcgaagaaagcagcgggcggcggcgagctgtcccgcttcctggagtcgcatctccagaccattagcgacaccttccagatgatggcggagtcggctccgggggccttggagcggacggagtggtctgaggtcgttaagctcggcgaccaggtctccaggcaggccaccgtcgctggaatgctctggagcggtgacttgcctgatgtagagaccctcaaagagaacatcgttgcttatttcaacatcctacagggatttcttttggtttgccacggaagcatggtcggtgctgggcctactctacacaagtccatctttgggtctgcaaaagacgtggttgactctagcttctcattgttcaagcatgctgtctctgcttatgaatctcgcagctctgaccgcaacacaactataccccaggtcacaggaactgtatgggaagcttgtgctgctctcaagaaggtgcctgcatcaaactgcattgccataggacgagccatgaccaggataggtgtgtgtctgaaagatgttctccgagaaatgaatgagctccctattggtggttctggtgatagtactgctgagaagtcttccaatggtgttgtcgacacaacgagttgttctgatagagatgagaggtctgatcttgatttagatgatgacgacgacgatgagttcactgaagaagaggttgctgttgccaagttggttattaacgtggtatctgattccttggttgtagtgaaagaggcaattcgtttcattactggtttgctcaggagctctggtaacaaagacaaagatggtgctaatgaggacagagttgagccaatggagaaattgctgagccactgcaaggagatcgcagaccaggtcaacgatcttggggcttctgtatacccaccacaagactcgtctgagatggagctcgctataaaaagactgtacaatggcatcaacgggatgcgcaaggaaatagggaacctcggtggcgcacctgagagcacctttgcagcccttgaaggattcgaaaattgccttggatctctgcgggccaggttagctgatgatgtggtgaacgagatggaaggtcttaatattagccattagcacgtactgttcagattttccatagcagtgttgtgccagtatatcttctggttttgcacgatggaaggagcttctgtggtttcagtaaatgaggcgtccggtctctgtactgatggcgttgttgcgggtcatcgattgtaaaggaagtgggcctggatttctgtaacttctctggttagtgatgccactgtttacgggtcattcattgcgcgaataagattgtttgcatt

SEQ ID NO: 206 - DNA, 1737 bp, Zea mays
  Clone ID: 700049822_FLI
ccgaggcaatcgagtaatcgacgaaggccaccaccacctccacaccactttgcctcgagaaggttccaccaagcctctcggctagggtttggggactttgggggcgatcgcaatggagggccgcggcgcggaacaagcacccgaggcggcggcggaggtgaaaaatccgaggtgcttcatggacgtcaccatcggcggcgagatggaggggaggatcgttgtagagctctacgcttccgtggtaccgcggacggcggagaacttccgcgcgctctgcacaggggagaaaggcatcggcgccgccagcggcaagccgcttcactttaagggctcatgcttccaccgtgttattaaagggtttatgattcaagggggagacacaactgctggagacggaactgggggagagtcaatttatgggtccaaatttgaggacgagaattttgttttaaagcatgagaggaaaggaatgctttcaatggctaattctggtcccaacacaaatggttctcagtttttcatcactactacacggacacctcatttagacgggaaacatgttgtttttggtagagtgatgaaaggaatgggggtagttcgctctattgagcatgtttctgtcggagaagctgactgccccactcttgaagttaaaattgttgattgtggggagcttcctgaaggtgctgatgatggagttgtaaactttttcaaagatggtgatacgtacccagattggcccaatgatcttgaagagaagcctgctgaggtttcatggtggatggatgctgtggagtctgctaaagcttatgggaatgacaatttcaagaaacaggactacaaggcagctctcagaaagtacaggaaagctctgcgctacttggatctttgctgggagaaagaagagatagatgaagataagagcacagcactgcggaagaccaagtcaataatactcactaatagctccgcatgcaaattaaagttaggagattcaagtggggctttattagacgcagattttgcactgcgtgaaagggagggaaatgctaaagcttttttccgacaaggacaggcacacattgcacttaatgacattgatgcagccgtggagagctttaaacaggcattggagttggagccaaatgatgctggaatcaaaagagagctggctgctgcaaagaagaagattgctgacagaagagatcaggagcggaaggcatttgctaggattttccaatcttctggaaagtctgacaagagcaacgaagagaataattgatctacagttcctttcccccgtctgaaactttgcttagcttaaatctggggcacattggaacaggagtctcatgggagtctgctctgcaaaaaaacgcagattactgatctttagatagaaggaaacatagtgggggaaaggaagcttttgttttcttgtactacagaagtagcaattcgtgcttttgtcccggtcttagtttattcaggaaacggacattgaatttaaatgtgcaatttttagacccaacctgacgattcacatcttttgtgggtagttcgcccgtttcactttcgtggtgttttcttgtagccttttgtctgcttgttgccagactctaaggccatgtgtgccacacttcatctcacagctttacatattcaagcagtttctgcagcagctttttagtccagctgcttatctcaatgaactaaaagcagctgtgtttagacccg

SEQ ID NO: 207 - DNA, 1229 bp, Zea mays; identical to SEQ ID NO: 202
  Clone ID: 700049824_FLI

SEQ ID NO: 208 - DNA, 915 bp, Zea mays
  Clone ID: 700049830_FLI
ctcacttcttgcacgtggaggatcatctcatccgtcattccattctacacacagtcagacatgggcaacggcccctctctctcgccgtgcctgaacccgcacctgccggagtcgtccgcgacggtgcgcctggtgtactggggcgggcgggcgaggcagctggcgctcacgggcggcggcgacgacgccattgtcacggccggtgacgtcgcggcggagctcccaccgccggccacgggctacgccgtgtgccccgccgacgccttcttcatcggcctcccgatcccggccatgtccccgggcgaggagctcctgccgggccgcacctactttgtgctccccgccgcgcgcctcccctgcctcaaggcgctcacgcccgccacgctcgccgcgctgtcgcaatcgcacggcagaaagaagcagcagcctatcttcgcggtcgcggggtgcccgttcgagcacgtcaagggcgcccacggcggcgccccgctcatcagggtcctcccggagttcatcgagaagctcatcaccgcctgcgacgccggcgcgaacgcgagcgccaacaaggacacggcggccaagcaggccgcggagctgtgcagcacgcccgagctgaagcggcattacgcgcagctcgtcggggccggcaggagccgcccgtggtcgcccaggctggagaccatcgccgagcgcggtaggtcacggtggatgaggttggcggcgaggaccatgctgtcctcgcgttagccgtgcacatccgcgcgcgtagcgtaggtcggtgttattaattgttagcttgcggagatttccgtttatttaggaagaatgacgaaggacgaacagcaaaatgtacagatggctacgcatttttttccttgcaatttgcaaaccagaacgaacgtttgtttctctctc

SEQ ID NO: 209 - DNA, 805 bp, Zea mays
  Clone ID: 700049917_FLI
cagcaatcgaggcatcgcaagcagagctcctcacgaagctcagtctgctttgtgccttgtggtcaaggaggacattgctgtgcagcaatggcaggcaacgcatcggtgacgctgttcctggccgtgagcctagtgatgttcgccatggccagcgcctgcggtggcaactgccccacgccgaccccgtcgacgccgaccccgacgccggcctcgttcggcaagtgcccccgcgacgcgctcaagctgggcgtgtgcgccaatgttctgggactgatcaaggccaaggtgggcgtgccgcccacggagccatgctgcccgctgctgaagggactcgtcgacctcgaggccgccgtgtgcctctgcaccgccatcaagggagaggtcctcggaatcaagctcaacctaccggtcgacctcagcctcatcctcaaccactgcggcaagagagtgcccaccggattcaagtgcctctaagctataagccgcggggagcatgccgacgtgctcgatcttctgcttgccattcttctcaatgctgccttcttatcatgtgctacgtacgtacgtgcttactagctagttctgctacctctgcatgcatgagtacgtgcatccgcacgaacacgcgtagtagctacgtatgtagagccggccgttttgatgagcagctttcgcttttgggtgtttcttttatgtaagtgtctcgtcctttgaatggacgtgaccctgaactattaagatttttgttcttttatttgtatccggcaattaatctgcttgatgaataaagcttatatattgttcg

SEQ ID NO: 210 - DNA, 625 bp, Zea mays
  Clone ID: 700049953_FLI
agcgcctactacgtgcgctacggcggcggcgccaacgagctcagcgacggctactccaagggcaccggcctcgccgccgagatcatcggcacgttcgtgctcgtctacaccgtattctccgccaccgaccccaagcgcagtgcccgtgactcccacgttccggtgctagctcctctcccaattgggttcgccgtgttcatggtgcacctggccaccatccccatcaccggcaccggcatcaacccggcgaggagcctgggagccgcggtcatctacaacaaggacaaggcctgggacgaccaatggatcttctgggtgggcccactgattggcgccgccatcgccgccgcctaccaccagtacgtgctgagggccagcgccaccaagctcgggtcctaccggagcaacgcctaagttccggccggccgcgccaggagctgggcaccgttccaattctgttcctccccatgacgccctgttctgtttccgtgtggccaggactccgctcgctcgctgctgttttctacttcggaccaaagtgtgacatatctttgctttctgtatatgtatgtaggaatgcatcatgtaaggagaatttggaatacaattgcgtgagtttttatcc

SEQ ID NO: 211 - DNA, 1693 bp, Zea mays
  Clone ID: 700049964_FLI
cttgagagtccttttctttagacgggtaagtcttgtgaaagtacacttcatactcagggtttttgaacccatgttgttccaggtactagaattgtgttgctgtggatggtgttaagcgccggtgggcacggccttcctataagtcaaagtacttcttctatacttcttattgaggattgtcattgagctagcatatatttcaaaactataaataatttataaaagttcaaaattatttctttgaatcacttttgtaatcactctaatgatgtacattgtaaacttgatgtaacttgtagaatttggtaataagatttccgttgcaaaaatgttggtgtgtgatttgtgtttacttaatcttgcgatcctggttgtaagtggtttatccggggtccttgggatactcaaacagatcctgttaagttatccggtgcacatgcatagccgtctgaggtctttgagataagggcaggtgcatgtgggcccaataacttgggaggttctaccacgtagatatcttccttgatctacactctataaatcttgtatagagattgaggtgttttgggcactggttagggagttatggacccattaaaattggtttgtcagtggcttagaaatcaatggaaacttgtgaaaactgagtgtcaaaacatgtcaaacgaaatcggatgaatgccatcttttaatatgttgtgcctctattagttattaacatcttttatattttgtgaaacttgagttgttcaacaaaaatttgggaacgcgagacgtcaacccgaacgacactgattctagacttagaaggatttcaaatcctgaaatcagatttttattccgtcttgagggcactgtttgggatacatataaattgaataaagggtaggtgtatataaaatttgttgtataacataggttctacaacttttattaaaggtcaaaccttatatcttggttggaaattaaaattccactttggtcaatgtattatcattataagctcaaaactgaagtttttggccgaaggaggcattttcttgacattttctcaacacgaaccattaataacttttgttgtagagttcatatagagttgtttgagcaagatgacaaggtttgtttgaatttaaaaatttgcatttgttgacacgagcagtttcaagcacgcctagtatttatcttctcatgcgagcagttggttcaacttcgagaaatatttagaatacactttattgggggccttcgtcttccgaaggtcctaaaaaacatgatttaacaatgtttccggagttgtaatatatgaacaggtatcttcaaactcggatcggaaccacagtgggagaagcacgaacaatacgaagattgatgcagcgccgaagctacgcgcgagggagcttcggcataacagcatgaaagggaaccgacttaaaggggaaaaggctatttagacctcgatgaattattttatagtcattagcaaatgtaaagggcatggatgtaatttcacaagggctgcgttccatgcctataaatagatgaacaatacccctgtactgttcacgctgacttgcatttgctcgtgcatcacacttgtacttttaccttctatcaagccgaaggtacatttgtaatttgatatcatttatattttctatgataataaaatagaaatgagctgataatgttacat

SEQ ID NO: 212 - DNA, 710 bp, Zea mays
  Clone ID: 700050004_FLI
attccattgtctggtcatttgtccccggccggcacgtaataatcaccactatggccagcggacggagaaagagcggcattccagctctggggtggtggctcatggcagtcggcaccatccgctccgccatcgtgtggtcctgcctcttcagttctgcatcgctctgcttggccgtctaccccgagatgaccggcgtgcaggagcgagctatggctgcgtggactctgctatcctgcactctcagcttcctgtgcgcgttcaacatggagagcaagccgctctacgtagctaccttcatgtccttcgtctacgtcgccggctacctgctcgtggagtgcttcttctaccacagcgtccatgcagccagtatcgctccgtactgcttcatcgcagggacatccatggtttggatgctgcttcaatggaactcccatggccgtggccgccgtccccgtgaggctagcaaggagccctgatccaacctctctggttcttttgccatcgatgtgattggggcggtctactatacagacgatgaataaatatttatttacaaaaaattgtattatagatataagatgcacaccgagttccgttgttgctgttgacttgttgaatgtaagaagtgacgactagaatgggtgtcgtctaagttgagttgtattgtatcgtagcatcttgatatatataaccctataatctgttgttgg

SEQ ID NO: 213 - DNA, 989 bp, Zea mays
  Clone ID: 700050012_FLI
aagaggttccatggtatctggatgatggaactggacgtgtatatatggttggtgctcgttctgcagctggtttaattttaactgttgccagtgaggtttttgaggagtcagggaggacacttgtacgtggaactctagattatttacaagggttgaagatgctgggagtaaaacgaactgaaagggttcttccaactggaatctcattgacagttgttggtgaggctattaaagatgatgttggaactattagaattcagcgaccgcataaaggacccttctatgtatcaccaaaaagcatcgatcaacttattatgaatcttggaaaatgggccaagttataccgccttgcttcaatgggctttgcaacatttggtgccttccttcttgcaaagcgtgcaatacaacattttctagaaagaaagcgccggcatgaactgcaaaaaagggttcttaatgcagcagcacaaaggcaagctagagaagctgaagggagcattggttcatcggacacagagcctaacagtaaaaaagaccaattagtgttggacatatgtgtcatatgccttgagcaagagtacaatgctgtttttgtgccgtgcggtcacatgtgttgctgtatggcatgctcttcacatttgacaaactgcccgctttgccggagaagaattgaccaagctgtcagaacattccgccattgacggtgataccacgtgcactgcttttgaaaccagttggctattggaagtgctggctcctgtcaaccaacgatatgaactgcaaaactgggtcgtagcagcttcttcatggagtttgcttttcgaacagaacagcgagtgatgcaagttgcaagctcatgattggcagttaagaaagataccctactgagatagtgccaatgggtgctcttgcatgtaatgtactactactacaactgtgtacaggacacttgtgtaaatgcacataggttagcagcttgcttcttgact

SEQ ID NO: 214 - DNA, 967 bp, Zea mays
  Clone ID: 700050028_FLI
cagaaggacccgttccgggtgcccaccaaggacaacatccggatggcgatgcagtggctggtgcaggggtgcagcagcggcgactccctggtgttccacttctctgggctgggcgcgcaggtcgccgacgcggactgcgacgagcaggacgggtacgacgaggccatctgcccggtggactcgttccagaagggccccatcctggacgacgagatcaacgagaccatcgtccggccgctggtgcccggcgccaagctccacgccgtggtcgacgcgtgccacagtgattccgtcctcgacctccccttcctctgcaacatgtccaggaccgggaactggcagtgggaggatcaccgtccaccgtcgggcgtctgcaagggcacgagcggcggccaggcggtgcttatcagcggctacagcgacggcaaaagcaagttcagcatgacgccggaggcctgcgcgacggtgggggccatgacccacagcttcatcaaggcggtggaatgcgagccccaaggggtcacctacggccgcctgctcacctccatgaaagccatcatgaccaacgccggcggctgcaaccagcagctgcagggcgcctgcgcacccgcccgcaaggtcgtcaacttcagcggcgtgcaggaacctaacctgtcttgctcggagatgttcgacgtctaccgcaagccctttgcgctgtgaacctcctctgcattgtcattgccttcgcagactaccacagattcccgtctggaccctatatataaattaccgtgacggaataataaaccagacgggtttatattgtatatgatgatatgaggcctgcttgctcataatgtgtgccttaattgtcttggtgccaataatgtgtgtccatgtgtcggttaccggccccgagccaagcttgtagcctgtggaccgacgactttgatgaccatttataaatacaatgttgataatgttt

SEQ ID NO: 215 - DNA, 1772 bp, Zea mays
  Clone ID: 700050063_FLI
gagccagagagagaatctcgcaccgcagcaggaggggaccgagagagaagcgaactcgagaaagggattcaaggaggctgttgccgatggccatggcggcgcggctgctgcgagcaaccgaggtggcatctcgatttctatctgcttcccatggtttcgtccagcgagctgcatacacagctggtgggatagtcgatgttggccaaccaacaccccagtctcatccagagttattagctgatggagagatcacaccaggcatcacaaacgaggaatacatctctagaagaaaaaaacttttagaggtgctaccagagaagagcttggccattattgcttctgctgatcagcagatgatgactgatgtagtgccatatccattcagacagaatggtgattacctgtatattacaggttgtacacaacccggtggagtagcagttttgagtgaagaaacagggttctgcatgttcatgccagatacaaataaggaggatttagtttggcaaggtgaaactgctggagttgaggctgctgtggatttctttaaagcagataaagcatttccacttagtcagatgcaaaagatccttcctgaactgattgagcaatcaaaaggggtgtatcacaatgtgaatacaacatcttcttataagaacttggatgcctttcgtagggcatcactcaacaataaagtaaaagatcttacaaattacactgatgaattacggtgggtcaagtcgaaatcagaaattaagttgatgagggaatcagcatctattgtttctcagtctcttttacaaacaatgttgatgtcgaggacccacagagaggaaagccagttggcagctaagattgaatacgagtgcaaaatgagaggtgcccaaagaatggcgttccatcccgtagttggtggaggagcaaatggcagcattatacattattcaagaaacgatagaaaaatcaggacaggtgatcttctgctcatggatgttggctgcgagtatcatggctaccttagcgatctgactcgaacatggccaccctgtggcaggttttcacctgctcaggaagagctgtacagcctaatactggagacaaataaggagtgcataaagctctgtaaacccggcacaagcattaacgagatacacaatcattcggtaaagctgttgataaagggattccaagaactgaggatcctggagaaggggaaatccatccaatacaactacttgaacccaaccgcaataggccactcgttaggcatggatattcatgactccatgacactccccaaggacaagcccttggagcctggcgtcgtaataacgatcgagcccggggtgtacatcccggcggccccggtcctgaacgagcgcgcgccgagcaggtaccgcggtatggggatccggatcgaggacgaggtcctcatcaccgacgacggccacgaggtgctgacggcgtcggtgcccaaggaggtctcgcacctgaccaccctgatgaacatgggcaggggcggctcggctgcggacgcccatggccatgagctgcgagccgcctgcagctagctgaggcggctgcgtgcgtgaggtcatgcccgtggcggcggccggacctagtagacctggcacgacgtcgtggagcagaatctacgtgctctgcgaatacccgttgcatccattgattggactgttgtaatcacgggaacagatagcgaattgggcaggtgtttttttaaggtaatgggaggtgttatattctggaccctt

SEQ ID NO: 216 - DNA, 1888 bp, Zea mays
  Clone ID: 700050092_FLI
ctctcctccagtgacagcctccggcgcctcctcgggctgccatccagcccgtgccactgccactgcacttgctgtgccgaccccagctgcggtcgagtgagcaatggagcggcggcggcggcggcggcggccaccgaggctgccgctccttgtgttcgtcttggttgccaccacttgccccctcgggagctcagggattggaagcttcggagtcggtgcggagagcaatggagcttcgtctagttttaggaccaggagtctgctgcagattggagacagaaacgaagatggcctatttcatctgccacatacacgggctctcacgcacaagagcagatctcatagaaaagttccaacacccgcaccagcaccagcgtctgctccagcaccctcaccatccatgtctccaccggacagctcaccgtctccgtcaccacatggttcacacccaatgccacgccaatcaactccacatcgtcatccatccataacacctccacatttggtcaggcctgtgcctaggcaagatggaaatgatcctttggttgatactccagctcattctcggcataaacatttttggacaacctatggtttagttgcagcagggattgcggttttccttttggtatcagcagctagtattctctgcttccgagctaagaaaatgggaaccgtaaggccatgggcgacaggtctaagtggacaattgcagaaagcttttgtaactggtgtaccttcgctgaaacgatcagagctggaaacggcatgcgaggatttcagcaacataattggttctacctctacctgcatgctgtacaagggaactttatctagtggagttgaaatcgctgtggcctcaagcttggtaacatctgcaaaggattggtcgaaagaaaatgaatcacagtacaggaaaaagatcacaaacttgtccaaagtgagtcacaagaattttatgaacttgcttggctactgtgaggaagagcatccctttaccagagtgatggtatttgaatatgctccaaatgggacactttttgagcatctccatgtcagggaagcagagaagcttgactggatggcacggctcaggatatccatgggcattgcttactgtcttgagcacatgcatcagctgcaaacaccagctgcgctgaggaactttgactcgactacagtataccttactgatgacttcgctgcaaaagtctcggatcttgaattttggaacgacgcaaagggacataattctactaccaacaatgaactggctttctccccagacatggaggacattgtgcgcaagtacggcatggtgttgttggagatattgaccggaagagttccttcctccgaggatgacggaccactggaaaattgggtgtctcgctattttgaaggcgggatgcgtcttgaggagctgattgaccctagcatcggcttcttccccgaggacactgcacgagccctttgtgaggttgtgaggtcctgcattgatcgggatccaaagaagagaccgcagatgaaagaggtcgcagctcggatgagagagatcaccgcgctggggcctgatggggcaactccgaaggtgtcaccgctctggtgggctgagcttgagattatgacttctgagagctgagttcgacgcatgccagatgatattgtttctcctagtgtgactgagaattctttgagctactactggctgctgctaatcttgtttgtggaagtggtgattaggtagaatttgttatgtgtgcagaattgcatatagggattggtattgtacttgtacatgtcaagaaggtttaacacacaacatactgatatgcaggcattccagccaggtgagcaatagaaagcatgtgtggcttgtttttgctgc

SEQ ID NO: 217 - DNA, 1945 bp, Zea mays
  Clone ID: 700050187_FLI
cgccgctgttccccgcaacctatcgacccaatctcgtccgacccggcgcgtcgtcccctccagatctccgtcgccctctccaggtagcagaaactgttctgctgcagtctgacaaagtggagggcttaggagcttctgcttcttttatgtctgaacaatctttgctttatttgggattgttgggagagtactctcgtgcaactaggaaaaggcacaaggttccgtcccactgcatgcgtcaagagactgtctggttttcttgttctgatttgtcatttgctggtgctcaaagccggcttggtttcctcgaaggatcagcatctactcttgattgtggactttgtcgcatctgatatcaacttcataaatctttatccaagatggcgctgcaaaacattggtgcttcaaacagggatgatgccttctacaggtacaagatgcccagaatgattaccaagatagaaggccgtggtaatggtatcaagacaaatgttgtgaacatggttgacatagcaaaagcacttgccaggccagcttcctacacaaccaagtactttggatgtgagcttggtgcacagtccaaatttgatgagaagacagggatttccttggttaacggggctcatgatactgcaaagctggctggtctccttgaggtattcatcaagaagtatgtccaatgttatgggtgtggaaatcctgagacagagattctcatctcaaagacccagatgatatcactgaaatgtgcagcctgtgggttcgtctcagatgttgatatgagggacaagctcacaaccttcattctgaaaaacccaccagaacagaagaagggcggaaaagacaagaaggccatgaggagagctgagaaggaacggctgaaggaaggtgaggctgctgatgaggagcagaagaaactgaagaaggatgcaaagaagaagggttccaaggattccactgctaagggtttgaagaagaaggctactactgctactggctctgatgaggatcactcatcctctccaactcgcagccatgatggtgacaaagcagctgcagatgatgatgacgatgatgtccagtggcagactgacacttcaattgaggctgcgaagcagcgcatgcaagagcagctgagtgcagcaactgctgaaatggtgatgctgtcgactgaggagactgagaagaagatgaaacaggcaacccacaaagatggaagcactaatggttcagcaaaagaaatccctaatgacaagcctgccgtcactaagcctagtccctatgaagaactgattggagacatcaaggctagcctaggaagtgctccgacccctacccagctcaaggctgtgctggcctcatcaacccttcctccccaggacgtgatgaatgctctcctggaggctctctttggtggtgtgggtaagggattcaccaaagaggttgtgaagaacaagaagtaccttgcagttgctgtgccagatgagggtgcccagacccttctggttcaggccattgaggcttttggtgggaagtgcaaccctgaggcgctgaaggaggttcccgttgtcctcaaagccctctacgatggagatatcctggacgaggaaaccattgtggactggtacaatgatgctgtcgcagctgggaaggactcccaggttgtcaagaatgccaagccgttcgtcgagtggctccagagtgccgagtctgatgaagagggtgacgacgagtgaagaggccacgctgctctactgctaatggccgaacttgataatattatttcaataagtttgttttgcttgcctggtgtcggtgtttaaaactgttaattgtcgtgtggcgcagcatactcttctgttgctgcatgtgtcgtcgtcagtttggttgtctgttggatgtcacagtttattatggattgctactatacaagtatttgtttcgg

SEQ ID NO: 218 - DNA, 600 bp, Zea mays
  Clone ID: 700050212_FLI
gacgacttgtttcattgattcttgaagagatcgagcttcttttgcaccacaaggtcgaggatgtcttgcaactgcggatcaagctgcggctgcggctcaagctgcaagtgcggcaagaagtaccctgacctggaggagacgagcaccgccgcgcaggccaccgtcgtcctcggcgtggccccggagaagaaggccgcgcccgagttcgtcgaggccgcggcggagtccggcgaggccgcccacggctgcagctgcggtggcaactgcaagtgcgacccctgcaactgctgatcacatcgatcgacgaccatggatatgattattatctatctagcttgtggtggtggttgaacaataataagcgaggccgagctggctgccatacataggtattgtgtggtgtgtgtgagagagagagaaacagagttcttcagtttgctatctctctctgcatgtttggcgtcagtctttgtgctcatgtacgtacgtgtgtctacctgcatgttggttgatccgattgcatctgctgtaaccatatattaattggtccacgatgatatgatttgatactatatatatactaaaaccggacttcttatt

SEQ ID NO: 219 - DNA, 1059 bp, Zea mays
  Clone ID: 700050275_FLI
aggaaacagtcataatacagctcccagcaaaagctcaaaaaataaaggaaaagctggaatctcaggcaagactggaaggaatggtcatgttactggtccctgcaataatttgagaacaaatgaagaaaaaacaggtatatcggggaagtttgattcaggagacaactcttgtttggttcccttctctgaagtcatcaatgtgcctacgcgattgccacacaactttgagatgaggaagatggaatcaactagaagtcctgcgaggctacacaataaaggagggttcctgtctgcaacagtccaaattaaggagagtacgttgttacccacaggcaagccttgttggcagtcagaaatgagccatccaacaactaatgaagtgagcacttcagcgcaagctactacttggatcgacgcgggggcgtgtgccgaggagcaagaacctactccttgggtggacatcggggtctcagactaccagcctttcctggatgtgatcgacgacatgtgcggacttgagtggaggctgcagagactgaaggagaacatgctctcatctagcatagacggccaaaccgccgccagtgagagtgacaaaagaaaccagaccgtggtgctagtgccaaccgccgagctcaaggaaaagctgccgcatgacggtttattcgggcattattgcccataggtcttatatacatagcggataaactgtacagagaaccaagaagaagaagaaaacaaaagggaaacagcaaacagacaggtgcccgcttacataccggtccatactgtcaggcactactctcctttcttgggcctcgacacgactaatactgtgctagtccagaacagatgagccatagccattacctgtgtgcctcccaggttcagttcatatgttgtatgtattaatgtatatcagaagagtcgtgcttagtagtagcaagaacctagtcctgatccagaccgtgaatctggatcatcttgtcctgtggttgtaccgtgcagaacagacagatgtcggctagtcgtttggttctgaagtaagaaactataagc

SEQ ID NO: 220 - DNA, 1469 bp, Zea mays
  Clone ID: 700050281_FLI
cattactgctggatgagaccagaggacatcgactacaaaaggccagtcaccgagtgtcactcttgctcagatctagcgtctgaaatggctgctgccctggctgcagcttccatagtgttcaaggacagcaaaacctactccgacaagctcgtcaaaggcgcaaaagccctgtacaagttcggaaggctgcagcgcgggcgatacagccccaatgggtctgaccaggcaatcttctacaattccaccagctactgggatgagtttgtgtggggtggtgcgtggatgtactttgccacagggaacaattcatacctcacggtcgccacagccccaggaatggcgaaggcatgctggagcctactggtttggaagtccaaactatggagtatttacctgggatgacaaacttccaggagctcaggttcttctcagcaggttgcgactcttcctaagtccagggtacccttacgaagaaatactgaggacattccacaaccaaaccgacaatgttatgtgctcatatctgcctctattcaattcattcaacttcactaaaggaggactaatacaactcaaccatggaaggcctcagccacttcagtatgctgtcaacgcagctttccttgcttctctatacagcgactatcttgaagctgcagacacgcctgggtggtactgcggacctaacttctacaccacagaagtcctccgcaagtttgccaggtcacagctcgactacatccttggcaagaacccattgaagatgagctacgttgtgggtttcggaaacaagtacccgaagcgccctcatcacagaggcgcgtcgatacctcacaacggcgtcaagtatgggtgcaaaggaggttacaagtggagggacacaaagaaggcaaaccctaacatccttgtcggagcaatggtggctggccccgacaggcgcgatggctacaaagatgtccgcacgaactacaactacacggagcctactctcgcagcgaatgctggtctggttgcagcgctgatctctatatccgatatcaaaaccggacggttcggcatcgataagaacaccatcttctctgcgattcctccgatgttcccaacacccccgccgccgccatcagcatggaaaccatagaggcaatacctctgaatgtttttccaaagcatcgaacagggaagtggagcaaacgtgtgatcatttggtacagcgaaggccagagacaggaaagctgacagcataagtttatagagcttctatttctgtaccaatatgacagatcagtataagatcctctgtcagacatagatcggaagctgtgtgcatcgcgtggagctaatttttgggggtcttgttgctattggcactccagctcatgtgtgaagttctttttgtagaaatggtacctttacaaattgttttataggagtgacttttcattattatagtaaagaatgcgtgtgatctc

SEQ ID NO: 221 - DNA, 652 bp, Zea mays
  Clone ID: 700050382_FLI
catcgtcgccctcaaattcgttccgtccaggcaaggaagaaatcgagcagccaaggagaggagaagatggctcgtacgaagcagaccgcccgcaagtccaccggaggcaaggccccgcgcaagcagctcgccaccaaggcggcgaggaagtcggcgccgacgaccggcggcgtgaagaagccccacaggtacaggcccgggacggtggcgctgcgcgagatccgcaagtaccagaagagcacggagctgctgatccggaagttgcccttccagcgcctggtccgtgagatcgctcaggacttcaagacggatctgcggttccagagccacgccgtcctggccctccaggaagccgccgaggcctacctcgtcggcctgttcgaggacaccaacctctgcgccatccacgcaaagcgcgtcaccatcatgcccaaagacatccagctcgcccgccgcatccgcggcgagcgcgcgtaggcgtatctcgcgcccggccccagtggcggcggagggatggaggagtgcaatttgtaactttatgctgtttgttcgcttttagacggcgcggcgaagaagtagtgtaaaaacggctttacaagtctattttgtgcggtagttcgtgtaggccgcttcgtcccgaagcgatcttggt

SEQ ID NO: 222 - DNA, 1981 bp, Zea mays
  Clone ID: 700050415_FLI
attcttttgtgaagaaaaaatagtaagcacaaacttgttccatacttattcattatcataatattttttggctgagagaatttaaaaatatcgaggcttcgagcgtatccgaaggtcaacatggacaatgctagacctgatcaagcgatcgtagaccccagtcccagccaactgtcaggatatatattagtttgtttcggagcttaggttgtaaacatcaaaattaaattctctttgttaaccaccagtacaattgtagtcacatgggctgcccagggcgcactaaccactagtacaaattttgtgggtaaagaggaaactaggctcggatcatccctgaaggacaacaaaaccggaagcgctggcaaccacctcccagaactaattggtcgttgctttctttccataacaagatccagcggacgagcgagtcgacccggccttctgaggccctgtttggattcggtagagctaaagtttagttggactaaaactttagtccggctaatgttagcccattagctattagtcacggggcgtttagatactatggactaataagttgtttgtgtgtttagtcctgattagctcatatttgtggactaattgttagggaagctaaagtttagtcactctattagtcggcctgtttggcgacaaatgaactaaactttagtggctaatccttgtaatccaaacaggtcctgcctgaattgatctggcagctacaacgcatcctgggccgtcattgcgcctggtcaagcggctcgtttgacaactgtgggggttctgacgtggtcgacgcagggggctttggcttcagagcgaggatcggcaaggctccgacattagagggtgctcaagtttcagcagaggagaataaagaacttgaggataaagatgagggtccgactgaatatttatcttattggaaaccaaatgtaacagtaaatcttgtcgaagacttcacacggtataccaacaataatgtacctgccatcgttgcttcatgtatccttcaactgtaaatatagtaacatatatcgtttttgttttgtgatagttccacttttacacttacagagtgttgagtacatacttcaaattttcttttaggctgggtgagaagtacaaatcaatacatctctgtagctcactgaattaactgatttttccttttagtgcaaatatattatatatgtttgccagaagatcattttgctcttgttttaatccgtgtatggtaacttgcactgacattctaagtttgattattggatattattgcctttctttccattttccccaatactcatgagtccatggcagccatcatccagtaagttatctagctatcatttagttgcttcatgtagcagaatgcttcaatagctttggcaatatctataagcttttggattttaggttcctgagcttgtgattttcagctcttgtattaagctataaatgatacgttgttatcccattttcagcaaatcagaacattcatccagacgaggactaacctgaaggtggtcgattactccggggccaagcgggtgatgtgcatccagtccctgagggggaagaaaggagcaaggctcgggtacatgatcatcagatccgtaaaggaggcccaacctcgtggcaaggtcaagaaaggagacgtagtctacggcgtggtcgtccgcgtcgccatgaagaaagggcgcagcgacgacagcgaggtccagttcgacgacaacgaggtggtcctcgtgaacaagaagggcgagctgatcggcatccgtgtcttcggccccgtcccccacgagctgaggaagaagaagcacctcaagatcctggccctggctgaacacatcgtttgaggtgtgtcgcagagccaagagccaagtgtttgcgggaatgttttttttgtgtgttctctgtttgaataatgcattgtgaaacgatagcatggaccgtttgaactattttgatg

SEQ ID NO: 223 - DNA, 1365 bp, Zea mays
  Clone ID: 700050453_FLI
gccatttgagaaggagagggaaaatgatgacctcgtggcttctgggccgccggggcccctccggcttctcctggagttccaccgccgaccaagtcacgcagggcatctccgccgccggcctcaccgccatcgtcactggggcgtccagcggcatcggcgcggagacggcgcgaacgctggcgctgcgcggggcccacgtcatcatggccgtcaggagccttcccgctgcccaggccgtcaaggacgccgtcctcgcccaggcgccgggggccaagctcgacgtcatggagctcgacctctcgtccatggcctctgtccgcgctttcgcgtcccaattcatcgacaggggtctccccctcaacatccttatcaacaatgcaggagtaatggcaataccttttgcgctttcaaaggatggaattgagatgcagtttgcaactaatcatgttgggcatttcctgctcacacaccttctattggataccatgaagaggacctctcatgaatcaaatttggaaggaagaattgtcaacgtgtcatcagaggggcacagacttgcatatcgggaaggaatccgttttgacaagatcaacgatgaatcagtgtatagtagcattggtgcatatgggcaatcaaagcttgcaaacatattgcatgctaatgaacttgccaggcgatttgaggaagataatgtcaacataactgcaaattctcttcatcctggttccattatcacgaaccttcttcgctaccacagtatcctagatgttctccatcggacgctgggtaaattggtgctgaaaaatgctgagcagggtgcggcaactacatgctatttggcactccacccgcatgtgaagggcgtgtccgggaagtacttctgcgactgtaacctgtacgagccaagcgcgaacgccaaggacatggagttggccaagaggctctgggacttcggcgtcgagctcatcacctagctcatgcttcttgttgttagcgacttgttttcagacatggatgtaatgtaaatcccttgacagatggtaaattctgtaggccctcgaggagctcctgtgtggtaaactcattcacctcaatctatctacgtgtattaaggtggattagggggtaaattaaattaatttacactccaatcgccctcgaggagctccggtgtggataatgctttggttggatattttagtattcacctcaatttacgtgtattaagatgaattagggtgtaaattaaattaattacactccaatccatctcaatatatatggattaggtcgaatactagagtattgtaatacttcaaaatcctattttggataaattagtaaaacgtatttcatgatttaaat

SEQ ID NO: 224 - DNA, 1008 bp, Zea mays
  Clone ID: 700050488_FLI
cggcaatccggcttcgcctcgtcgcagtccaatccgcactcaccgccgccctcccgcccctcacctgcccgcggcagtgtcggagtaaaccctaccggacctatcgtcacgcgactgcgggagttgcttgcttcttctgccgctctctcgctccgtcccttccgcccatggagacctcgctgcgcttgcgcagtggcggcggcctccgcatccacgccaaggagaagctgcccctcggccacagctcgctgctgcaggctcatgcggagctcgacctccacacaagccccgccggagttactaccccgagttatctcgctctctttgtcaggcacttctactcgcagctatcagccaatctcggagctggcgtccagttgcacaacggcgatgacctcgcctacagttttcgcgccaagaaggccgtcctgttcaaaccagataatgggttcctaggtctgaaccttaaagggcgcctacttaccgataaagagttgaagccgacgaagacaactggatccgttgaactggcatggaccatacttgacttgaaacagggccaagacgtaaggctcaaagttggttacgaattgtgtgacaaggatcgtcgcacaggggctgtgattgggactggtcgttgccgtagcactgctcctcgcctctacatcctcgacagcttgcgccttacttagttcacttcatcatctacgacccgtgtgctttctgcagcctcagttcgtgccgcctcttttgcccaatggcatcaccgtctaggtcatttgtatggctcgcgtctgtccaccttaataaaatcaggttgtttaggtcatacgtgatctgaatgaagtttccattgtaagggttgtcatcttggaaaacaaatacaacttccttattttaccagtgactctcattctgctagaccatttgatcttgttcactctgatgtttggggcccaactcctttggtttcaaaaggtggaaataaatattatgttatttttgttg

SEQ ID NO: 225 - DNA, 1144 bp, Zea mays
  Clone ID: 700050514_FLI
aacgcgtggaacgggaaagccggaaaggcccccgcccgcacacgccgccgccgctgccaattcggtcaacgtacgataccagccgcgggccggcgagtccaggcggtcgcagtcgcacgtcgcgacgcgccttagcattggaccgagccgcggccacttgctttgcaattgcatttgccgggatccatgccagcagctccgtcctatatgtgaagcacccggccgcaaggctctctcgctcattcacggcaaattaagcgagcgccggccgaggcagacacaacccgcagcaacaacttgcatcggcacggacgaccgattgagagcctcggcgttcgtacgccacgccaccaagagactctgtgcaacaagtgaagggacgaaatgtatccggccaagcccgccgcctcctccagccagccagcggccgagatggcgcagccggtggtcggcatccccatcagcagccccggcgcggtcgcggtcgggccggtcgtcggcaagtggtcctccggcctctgcgcctgctccgacgactgcggcctctgctgcctgacgtgctggtgcccgtgcatcacgttcggccgcatcgcggagatcgtggaccgcggcgcgacgtcgtgcggcgtggcggggaccatctacacgctgctggcctgcttcacgggctgccactggatctactcctgcacgtaccgctccaggatgcgcgcgcagctcggcctccccgaagcctgctgctgcgactgctgcgtccacttctgctgcgagccctgcgcgctctcccagcagtacagggagctcaaggcccgcggattcgaccccgacctcggctgggacgtcaacgcgcagaaggccgccgccgccgccgccatgtacccgccgccggcggaggggatgatgatccgctaagctaagctagctacctcgtcgccgatccggcccaacctccaacgctaaactcagatgcgttgcgtcagtcagatcatcgcgtacgtacgtgttttgtacgtatggtcgtgtatatttgtacgtgatgcgtatatatataatgttatgactgaatgtctgagttttaagatttgtacgtttgaatccttttcttgttcactcggtatatctgtgtgaaaatctttttttcttg

SEQ ID NO: 226 - DNA, 1159 bp, Zea mays
  Clone ID: 700050522_FLI
ctaacatttagttgggccccaaattgcatccaggcgaaagcttgaacatcagctatttgagcccatttctgaaggcgttaggctccaattacagcaacggtgcaaatttcgccattgctggcgcagcaacgcaaccgcgagatgttccatttgcgttgcacatacaagtgcaggagttcttgtacttcagagatagatccttggaactcatcgatcaaggtctaagtggtccaattgatgcacaaggattccaaaacgctctatatatgatagacatagggcagaacgatgtaaacgctcttctgtcaaacttgccctatgatcaagttattgccaaattcccaccaattcttgctgagattaaggacgctgtccagactctatatagcaacggtagccgaaacttctggatacatgggacgggggctctgggttgcctgccgcagaagcttgccataccaaggaaaaacgacagcgatcttgatcagtatggctgtctcaagacctataacagagctgcagttgcgttcaacgcagcgctgggcagcctctgcgacgagctgagtgcgcagatgaaagacgcgacgcttgtgtacacggacctgttccccatcaagtatggtcttgtcgccaaccacactaaatatggttttgacaagccgctgatgacatgctgtgggtacggagggcctccctacaactacgacttcagcaagggttgccagtctaaggatgtggcggcctgcgatgacggctcgaagttcgtcagctgggatggcgtgcacctgacggaggcggccaatgcggttgtggccagagcgatactgagctcacagtactccaagcccagtctcaagtttgatcagttctgcagagcctgatacttgttagtacctcataccgtgcctttttagtttaggcaaatttactgaacacaacttggcacttcaaagtcaaaatggatggatccgcttctgataatttgattgccttatttacccgtcagggatgtgacccatcattgatctgtcagccatagcccataggccataactttggataggtgaaacttccaaatattgtgggccacatgtaccttcaaactacatgtcctatctgatatgttttcatcaaagagagaaatacaccatgggttatc

SEQ ID NO: 227 - DNA, 278 bp, Zea mays
  Clone ID: 700050539_FLI
ggaggcgcacacaacatggggcctcaggatggcatggttggtgctcgacggcagcctcccgcaccagaagctgctcccgccgccgtccgacttacccaaatgttgattagactcttcctccatctctatcctgccggtcgcttcaaattaaagggaattgtgaattagacaaatgtttgtttttttcttgtttactttcttcattgccaattgcaattttttcaacttgcattttaactagtccgttccgttcctagctgacctggactttttgtaat

SEQ ID NO: 228 - DNA, 766 bp, Zea mays
  Clone ID: 700050554_FLI
ggggccatcagatccaagaagagggaagagcaccaaggaccttcggcgcccgttcaggatccacatcttcccgagcgagttcttggttgacctcttcctcttcggaccacctccaaggctcttggtgtagcttgccactctcaccaatcaagttttcatgtctgatctcgacattcagatcccaactgccttcgatcccttcgctgaggccaatgctggggactctggtgcggcagcagggtcaaaggactacgtacacgtgcgcatccagcagcgtaatggtcgcaagagcctgaccaccgtccagggattgaagaaggagttcagctacagcaagatcctcaaagatctcaagaaagagttctgctgcaatggtacagtggtccaggacccagaacttggacaggtcattcagctccagggtgatcagaggaagaacgtctcgaatttcctcgtccaggccggcattgtgaagaaggagcacatcaagattcatggtttctgagcaaccgccgggtccatagcaaaccaaccctgcatgcagggccagcttattatatataatatctgaggtggagcatatctatctggctgtgtactgcaagcaggcctagtacgccgcctgcgcgttcctcctattacacatataggcccctccctgcgtgtatgcttgttaccgtcgtgtcgaaccttgtactacgaggctccatcgaacatcgatggcttgcttctttatcagaacatgtttgaataaacgctatttggt

SEQ ID NO: 229 - DNA, 727 bp, Zea mays
  Clone ID: 700050595_FLI
cgacatcgtcccttcgtccccacgagcaaccgataatccgccggcgttgagatgttggtttatcaggatctcctatctggcgacgagctcctgtcggattcattcacctacaaggagctcgagaacggcgtcctgtgggaggtcgagggaaagtgggtcacccaaggtcctgttgatgtggacattggtgccaatccatccgccgagggtggtgaggacgaaagcgttgatgacacagctgtgaaggtggttgatattgttgacacattccgtctacaggagcaacctccttttgacaagaaatcatttgtgtcttacatcaaaaaatacatcaagaatctcactgctgtgttggagccagagaaagcggatgagttcaaaaagggtgtcgagggtgcaaccaagtttctccttagcaagctgaaggacctccaattttttgttggtgagtccatgaaggatgatgcgtctgtggtattcgcctattacaaggatggtgccactaatccgacattcctctatttctctcatggtcttaaggagatcaagtgctaggcgtgcggcgaaattagttacccatgttgggtactatctatgtactattattatatccaaaactatagttgtcctggctgaattgaactcaaaagggtttgtttgagaaaaaattgtcccaagattggattgcttgttaaagctcaatattgttattgaagtgttattgctt

SEQ ID NO: 230 - DNA, 1323 bp, Zea mays
  Clone ID: 700050635_FLI
cctacctctccagcatcctcccgtctccgtcgtctcgtctccgctcctcacctcgccagccatgggcaagatcaagatcggaatcaacggtttcggaaggatcggcaggctcgtggccagggtcgccctgcagagcgaggatgtcgagctcgtcgccgtcaacgaccccttcatcaccacggattacatgacgtacatgttcaagtacgacaccgtgcacggccaatggaagcacagcgacatcgccctcaaggactccaagacgcttctcttcggcgagaagccggtcaccgtctttggcatcaggaaccccgaggagatcccgtggggtgaggctggtgctgagtatgtcgtggagtccaccggtgtcttcactgacaaggacaaggctgctgcacatctgaagggtggtgccaagaaggttgttatctctgccccaagcaaagatgcgcccatgtttgttgttggtgtcaatgaggacaagtacacctccgatgttaacattgtttccaatgctagctgcaccacaaactgccttgctccccttgctaaggtcattcatgacaactttggcattattgagggcttgatgacaactgttcatgccatcactgccacccagaagactgttgatggaccctcagccaaggactggagaggtggcagggctgccagctttaacatcattcccagcagcaccggtgctgccaaggctgtcggtaaggttcttcctgaattgaatggcaagctcactggcatgtccttccgggttcccaccgtggatgtgtcagttgttgacctcactgtcagaatcgagaagggggcctcttacgaggaaatcaagaaagctattaaggctgcttctgagggcccactcaagggtattatgggctacgtggaggaggatctggtttccaccgacttcaccggtgacagcaggtcgagcatcttcgacgccaaggccgggattgccctgaacgaccacttcatcaagctcgtctcttggtacgacaacgagtggggctacagcaaccgcgtcgtcgacctgatccgccacatgttcaagacccagtagagagagatatttctgcctccctatcgtgggtcgtccccaatggcctttggtcgcagaccatctttgctgcttgtctatgctgagaataaatgtgaacggtgcccctggacgctggatccatgctggttttggacacgttgtctttttgtgtttaacttatctgctaccgtcctgtaacgaattcactaagttctagttcttttgtgctttgttaagaatataaacaatgaggtttcaattttggtggc

SEQ ID NO: 231 - DNA, 1100 bp, Zea mays
  Clone ID: 700050721_FLI
aatctcctcactcctcagagagagccccaagccaagatctgcgcgggcaagtcaccaggcgaagcaccggctcccatggccgtggacctgatgggctgctacgccccgcgccgcgccaacgaccagctcgccatccaggaggcggcggcggccgggctccgcaacctggagctgctggtgacgtccctgtccacgcaggccgccgcgccgcacagggccgctgatcagccgttcggcgagatcgccggccaggctgtctccaagttccgcaaggtcatctccatcctcgaccgcacggggcacgcccgcttccgccgcgggcccgtcgagccgtcgccgccgccggcgcctcctgtcgtccccggtccgcccgtcagcgtggcgcagccgccgcagagcctgacgctggacttcacgaagccgaacctgtccgtgtcggccgccacgtccgtcacctccacgtccttcttctcgtcggtcacggccggcgagggcagcgtctccaagggccggagcctcatgtcctccgggaagccgccgctgtctggccacaagcggaagccctgcgccggcgcccactccgaggccaccaccaacggcagccggtgccactgctccaagagaaggaagaaccgcgtgaagaggagcatcagagtgccggcgatcagctcgaaggtcgccgacatcccgccggacgagtactcgtggaggaagtacggccagaagcctatcaagggctccccttacccacggggctactacaagtgcagcactgtgcggggatgcccggcgaggaagcacgtggagcgcgccaccgacgacccggccatgctggtggtgacgtacgagggcgagcaccgccacacgccgggcgcggtccaggggccgagccccctggcgaccgcgtcgccggtgcccgtcgccgtctccgccggcaacgggctcgttgtctagtctactaaaagctaggattagcttctcgtcttctttgttttttttggtttgagctgatggccgtgtaaaacaaggaagaaggttgtacaaagagggagaggaggacaccgtaatttcgatgccgcaaaactcaaaccttgtgtcgt

SEQ ID NO: 232 - DNA, 784 bp, Zea mays
  Clone ID: 700050756_FLI
gtctgtgcgaaggcgaccattccttcttcgctccttcgccgccgctatggttaagtactcgcaggagccgggcaaccctaccaaatcggccaaggccatgggaagggacctgagggtccacttcaagaacacaagggagacagcttttgcgcttcgcaagctgcctttgaccaaggctaagcgataccttgaggatgttattgctcacaagcaggcaattcccttccggagatactgtggaggtgttggtcgcaccgcacaagcaaagtctcgccactccaatgggcagggtcgctggcctgttaagtcagccaggttcatattggatttgctgaagaatgctgagagtaacgctgatgtgaaaggcttggacgtggacaacctctatgtttcacacatccaggtgaaccaagcccagaagcagaggcgccgcacctaccgtgctcacggacgcattaacccttacatgtcctccccttgccacattgagctgattctgtcagagaaggaagagcctgtgaagaaagaggctgacaacattgtcgcggcaaggaagcagtgaagtatgttagcctgctgataatggcatcctttcgaagcattatagccgtagctcttttatgtaccttttcaggctggtaccgataccgtggatctggatttgctatgttttgtactgtgctcgagtgtaaggtcagttcgtaatacaatcaatctgcgtggaacaatttgatatccttgaatatgttagtgagatcatttcgacaatgaaagttgagaacag

SEQ ID NO: 233 - DNA, 917 bp, Zea mays
  Clone ID: 700050816_FLI
aacaataacattatccaccacacacaaaaatggctgttggaaagaataagaaattaggtaaaaagaagaagggaggttctcgtaaagtagctgatgcatttgctaagaaagaatggtatgatatcaaagctccttcagcatttcctattcgtcaagttggtaaaacagttgtgactaaaactcagggaactaaaaatgctaaagattcattattgggcagagtatttgaatcaagtttaggtgatttaaaacctaacggagaagatgatgcttttagaaaatttaaattacgtgtagaagatattcaaggatctaattgcttaacaaacttctatggaatggatttaaccacagataaattacgttctttagttagaaaatggcatactttaattgaagcacatgccgatgtaaaaactactgatggttatactttacgtgtatttgccattggttttactaaacgtagacctaatcaaattaagaaaacttgttatgctcaaactgctcaaattagacaaatcagaaagaaaatggttgatattattactagagaaaccacttctgttgatttaaatgaatttgtaactaaaattaatttcctgaaatcattggacgcgaaattgaaaaagctactgaaggaatttatcctttacaaaacgttttaattagaaaagttaaaatgttaagagcacccaagactgatgttaataaattattagaattacacggtggtgcagaagctgctgctgttaatactaatcaacaagccaaagcagatgttggaactgctgttgaaagaaaagatcaataagcagcatcacagtcagtaatagtagtgttgataaaaaaaagccaatgttagtaaatttgtgcagtgtgtaaaatagcattgtacaaattaaataatattatat

SEQ ID NO: 234 - DNA, 1507 bp, Zea mays
  Clone ID: 700050836_FLI
aagcagaccacacaaaattaacaacacaaacaggatcgatcgagcaacgtacaatggcagctctggccccatccattgtagttcccacagacgccgagctgctgcaggcacaggccgatctatggcgaaacagcctgtgctacctcaaatccatggctctcaagtgcgctactgagctcggcatacccactgccatctacagcctaggcggtgctgcctcgcttcccgacctgatcgcctcactgtccctcccccaggctaagctacctttccttggccgcctcatgcggctgctgtcgtcctcgggcgtcttcgccgtggttgagtccccagaggctgtctactccctcacaccactgtcatacctcctggtggacggcatcgctgccgataacaatcacatggaccatgcacctttcctactcactgtgacgtcagcacactacattgacctggcaatagacctagctgactggttcaagaaggaagccaagacacctcctttcgatcacaagcacgcagcatcgctgttcgaggagagtatggagcgcaaggctcccgggttccacaagatgtcaatactaggtttgttggtccatgacaactttgcaaccagcattgccgtgcgggagtaccaggacgtattccagggggtgaagtcagtgactgactgctgttaccatggggatggcacaacagggaaggccctcgccaaggccttcccactgatcaagatcacagtactggaccttccgcaggagattcgcaagataccggctgatggtgttgttaactatgttggaggtgacatgttcaaatccatcccacgtgctcaaatggtgttacttaagatggtgctgcaccactggagtgatgaggactgcgtgaagatccttgccaactgcaggaaggcaataccttcacgggaagagggagggaaggttgtcatcgcagatattattctcgacccagcctcaggaccagtcatgtttcaaactcaactcctaatggacgtctgcatgatgctgatgaaaggaggccggcaacgggacgtgaatgactggcgtgacctcatccagaaagcagggttcagtgactacaagctgctgaagaaatttggagctcgaggcgtcctggagatttatccctaaggcatctcctccatcgatcagcaccgactttatattgtggtttggtactgcgacgaaatctacattacaaaaataaagggatcggagtgcgccatagttattttctgaatgatggttccatggaacgacagagtgtaaagccagctgtgacaagcttggttgctcaacgatctgtttaactttcgtttggagaagtatctaggcacatcatgagatgttacatatatcgtacgtattctattaatatatatgtacccaccatccaggtgtaggatatatgtattaccttgtaattggtattgtattatcggccacgtacaaaagtgaacctctccatattagccccttatacatgc

SEQ ID NO: 235 - DNA, 1554 bp, Zea mays
  Clone ID: 700050847_FLI
agacgggacaggacggatcttcgacggagcgttgcccgattcgtcgcagttcccggacaagggaggaaaggcgtgggaagagggaggacgcgcgttggtctccgatccaagagctttgttaacaccagagattaaaagatagcgccgtagcgcaatgaaggcaccatcgctactggttcggtgtttccctggcttgcttcccagcaaggacactagttgtgtgccaattgtgtccgagaaggatctgcagctaccatcactagccgttgaaataattccctcaaagagtgctcacccgtacaaatatgctggagagaaggttgatgtgcaaggttttgatattttcaagggtaaagttagtgtagcagatatgatatccttctcaccttctgaagtagcatcatcaaaatatgatggagctctgaaaagctgggagaattctattactcttgtcaacattattcgaaatgagatccgtgatggccagttgagcttcaggggcaagcgggttctagagcttggatgtggatctggcgtctccgggattttttcatgcttgaagggtgcatccaccgttcactttcaggacatgaacgcagaaaccatacggtgcagaacaatacccaatgttcttgcaaacctcgagcaggctcgggacaggcagaacagaccatcagaagagagccccgtgacgccatcccggcagctcttggatccaaacgtgcatttctatgccggagagtgggatgaactcccgacagttctctcggctgtgccgccacccgcggcgccagcagacctcagcttctccgaagacgatttcatggatggcggcagcagtagtcatgatggaagcagtgtagtcgtcggccaggactactgccccagaagatctaggaagctctccggtagccgccgcgcgtgggagagggctaataacgagaccgaccaggcagatggcggctacgatgtgattttggtctccgatgtcccctacgcagctaactctctgaagaagctccatgcgcttatttcaaagtgcctacgccctccgtacggagtcatgtactacgtggcatcgaagaagagctcggttgggtccaacggtggcgccaggcagctccgagctctgatggaagagggaggcgtccttggcggccacttgttgaccgaggtgtgtgacagggagatatggaagttcttcttcaagtgagcagatccagggactgggagtgggaacggcaggggaaatggatccttcctgacgttgaaatgaaacccagttttttttttggtttctatctgcagcgatgtacatacataccgcgaggcgtatagtacgtagttccattaattctttggcagcagcagcagcaacgttgaagcttcaagaatcaaatacctgtagctgagcttgcacgaatccttcgccgcctttgtagagatctgtctgctatgtgctgtgctagtgtcgttctgttaaagtacagagagcaaattgtagtgacctttttgtgtatatcgaatacacggtgatggcaattcggccggtgc

SEQ ID NO: 236 - DNA, 1115 bp, Zea mays
  Clone ID: 700050856_FLI
taggaagaagcatgtccaggtcaagatgctgtacaggcccaatggaaccctagggccagcggaggctcccaagcctaggagacgcaagcagtcggatgaagaggtcccgcacaatttgcaccgcctcatgaatagctcgccgaggatctctcacgctggactgcccaagaggcctcgcacgaccgctgctggggatgccaaaaatggagctgtagcacccggtggaggtaacggcgctggtgtttgtaacggttcttcagttcaggtgccgacggaggctggcggttggttgggtaatggatgctctgaggcgaaatctcatgagagaaccgttccattgctcaaccacgaggtctctggtgaagactcatccaggcacgccgcgaagagtagcggcggcattgctgacaacggagtcggggttgggaactcgagtgctggtcagaaagtgaaggtcaagaggaaggagctgctcctgaatcaaaataccggtaaagaaagagaagaaccagaagaggccacacaaacagagccctttgtacgttctatcacgctcgatgaatcgaaaccaaactcaaaaggaaaaggaaggtcaaacccaaatgggaatggaacagaaaggcttgcaggccctgcagatacgaagggccgtggcgaaggcgtgacgccaccgaagataacttccgtatggaagatcaagaagctgaagacatctcactgctcttccgacagcaaggtgctgcacaaggtctgcgtgccgcctcctacggcggctgagacctctgcttcggtgaaagctgattagcgaggcaccatagcgtatagttcggcggatgcatgtcttagctacgcttgttgtgaggtttttgtatgttcaagttgctactcggacgaggagggaaagcggaggtaaatctctcttggtagatctcacgtttgctttgatttttcatacgaatgtgcttgttttatggtatatagattattgggtatttctactgtactgtttctgcccctgcttccatttgatgtcactagtggtagggagtgtggcataatcatgtagatgtacctgctatgcatacatcgttttaataaatggcaccattgctctc

SEQ ID NO: 237 - DNA, 768 bp, Zea mays
  Clone ID: 700050896_FLI
ggaggagataagcttgtcactgttgaagatattgtccgccagcactgggccacatatggtcgccattactacacacgctatgactatgagaatgttgatgcaggggctgctaaggagcttatggcaaacctagtaagcgtgcagtcatcactttctgatgttaacaagttggtcaaggagatccggtctgatgtttctgaagtagttgcagctgacgagtttgagtacaaggatcctgttgatggctctgtgtccaagcaccagggcatccgatacctctttggagatggttcacgactggtgttccgcctctctgggaccggttctgttggtgccaccatccgtgtctacatcgagcagtacgagagggactcctctaagaccggcagggattcacaggacgcccttgctccgctggttgatgttgcgctcaagctctccaagatgcaagagtacactggacgctctgcccccaccgtcatcacataaattttgaagtgttttagaatgagttgaggcgcttacacaaactttcattccggcctcttgttccatagtttttcttgcatgttacatctcaccgatgaataaaatgtatgtatcagacttgtctcgtttttttgcccatccaagcagcaaattagccgctggcacagcatgcggtaataatcttgtcacagtgctgtagttgggagcgtttttcttgttagaagtgtttctggtttgtttgagcatttgcgtatcgatttttctttctgaagagtatat

SEQ ID NO: 238 - DNA, 390 bp, Zea mays
  Clone ID: 700050905_FLI
gctggtgcatatgagcgtgatgctgggggctatggtggttctagctatggtcgtagttatgactcttcctgggctaatactggtgatgggtttggcaccggtggactctatggtgctaggacaggctatggtggcagtggcggcagtggtgctgctggtcgttaccatccatatggaagatagaaaatctccagtgctgctgtttgctagagaagcttgcagaagatgaattctagatgtgtgctcaagagatcatctgcatctaaaagatgcactgaagttcaatatgctcagttttctgtattaggaagtactgttagatcaacttgtagaaatttaaacctttgttttggtatttggaattggaatttaagcatatttgataagcgt

SEQ ID NO: 239 - DNA, 223 bp, Zea mays
  Clone ID: 700050913_FLI
agcgtatcaagcatcccacgaagaaatcgtccttccccgctcatgcggttatcactgttgcatgcctttgcctgctaccagtatttcggcccagcgttttggtctgagctttgtgcaaagtttgttaacgccgtgaaagagttcgagatgtgcattcttgatttggtggacacattagtagcgtgtttggtttgaggaatgagatctctctcactcacttttt

SEQ ID NO: 240 - DNA, 853 bp, Zea mays
  Clone ID: 700050947_FLI
gtgtcattcacacacataattaaaagcgcagaacctgcattcagtgttttggtgtcaaggttcttccttggggagacgtttccaattccagtatatctttctcttcttccaatcattggtggttgtgctctagctgctgtcacagagctgaactttaatatggttggatttatgggtgccatgatatccaaccttgcatttgttttccgcaacatcttctcgaagaggggcatgaaggggaagtccgtcagtggcatgaattactacgcttgcctgtcaattatgtccctggtcatactgactccatttgctatagctatggaaggccctcaaatgtgggctgctggttggcaaaaggctcttgcagaagttggacccaatgttgtctggtggattgctgcacagagcgtgttctaccacttatataaccaggtgtcctacatgtctctcgatcagatttctccattgacattcagcattggcaatacaatgaagcgtatatcagtgattgtttcatcaatcattatcttccacactcctgtccgcgctgtcaatgcactgggagctgccattgccatccttggcacattcctgtactctcaggcaaaggcgtgaggcgggccatgatgacgaacgtctgcagaatcagtagcaagcactaaatccaattttgcttgttccagtggcatgtagatatcgggttagttttccgtatgagagtttgtaataatggatgaatggctctgctgtttcgttcttgtttgttggccagactcaaatccataggccatgaactgcggtcgagtgtacctgaataatactgtaacggagaattcgccgatgctgtttcttt

SEQ ID NO: 241 - DNA, 465 bp, Zea mays
  Clone ID: 700050961_FLI
ccctccctccctctgtttacatctaattcttatcgatttagctatagcaggtctcgatcggcggctatgagcggtagccgcagcaagaagtcgtggccggaggtggaggggctgccgtccgaggtggccaagcagaaaattctggccgaccgcccggacgtccaggtggtcgttctgcccgacggctccttcgtcaccactgatttcaacgacaagcgcgtccgggtcttcgtcgacaacgccgacaacgtcgccaaagtccccaagatcggctagctagctagctaggcccaatcgttttaatcagctagtttctttctttcataaataaaagtcctctctcgtacccggactgtgatgtttccctagttgtctcgtacgtgttgttttctgtcttaatggatgccatggcgcccgcgcgcgcctccatcatgaaaaggttgaaataatataaaactacatttg

SEQ ID NO: 242 - DNA, 452 bp, Zea mays
  Clone ID: 700050963_FLI
aggaaagctagctagctagcatggagagtggcagcaagaaggccgcagccggtgtgttggcgctgctgcttctccagctgatggtagcaccgacgacggcgacgtcccgcttgctgcagcaggcggatacctcccccttgtttggcctggacatcatcgcgagggagtttggccatccagatggaaccatcgtctgtagtgaatcctgtgtcttcctaccatgcgtttcgtcagtctttggttgccgatgcgaaaacaaagtctgcgtgcacgactgaagaaaccttcttcagtctctgatctttctctctcgtcatttgcgtgtgaagaaccagctccatctttgtaacgaatttgtgttgggagaaacagaaagacggtggtgttcaacttattgtgtatggtgatttaataataatatataataaacgggatacgttggatgtgtgtgc

SEQ ID NO: 243 - DNA, 874 bp, Zea mays
  Clone ID: 700050964_FLI
gaacttatgtttatatggacttcctaatgagacatgggaaataaacttgcctgctgaagaggtccctcctgaactgccagagccagctcttggaattaattttgctcgtgatgggatggatgaaaaagattggctatcacttgttgcagtgcatagtgattcttggctaatgtctgttgcattttattttggagcaaggtttggattcgataaagaatccaggaaacgtctcttcaccatgatcaataaccttcccagcatatatgaggttgtcacaggaacagccaagaaagagcccaaagaaaaaactcctaaaagcaacattaagactaacaaatctggctcaaagccctcgcgccatgcggaacccaactcaagggtcccaaagatgccacctccaaaggacgaggagagtgaagaggaggaaggggaaccacaggaagaccaggagagtgcgctgtgtggcgcatgtggcctaggttatgacgacttctggatctgctgcgacctatgcgagacatggttccacggcaagtgtgttaagatcaccccagctaaagcggaccacatcaagcagtataagtgcccctcctgcacgggaagcaagagggccaaggtttgatccacgatccaaggagcctttgacgagagctgtaagctgactcttcgtgctagggcagctaatagattcgaatgcttgttttgatacaaattatgagtactgacgaaccgtaaactgatgtagtttgtgtggccctcaaagcatctatgtcctgacttgtgtggtttaggtttcctttggcacagtttctaagagctgattgtctatgaatctaatatgagttttgtcaattagagagaagttgctatgctg

SEQ ID NO: 244 - DNA, 1143 bp, Zea mays
  Clone ID: 700051004_FLI
ggacagactagcagctttgaaggctaaggacaagaagcatggggcagaatctgcaactcctgaacccaactctgaggttctcttcctgtgcagctacgaaggatgtgggaagacattttttgatgcaggggctcttaggaagcatgctcacgtccatggggagaggcaatatatctgtcactatgagaactgtggcaagaaattcttagatagttctaagttgaagagacattttcttattcatacaggagaaaagaattttgtgtgcccacatgaaggttgtgggaaggctttttcgttggattttaatttaaaggcacacatgaaaacacattctgcagataactatcatgtgtgccagtacccagaatgtggccgaagatttacacaagaatcaaaactaagagctcatatcagggcacaacatgagaaagctgtttgcctgcagaatccaggtgcttcggctatgaaccatagtgcaattggagaacagcatcagccccctaagccagcaaaggtctcagcaacgcctccagctccctcagctgagcgcccttacgtctgcccctacgatggttgcgacaaggcatacatccacgagtacaagctgaacctccatttgaaaaaggagcatcccaaccactaccaggatggtggtccacaaggcgctgccccttcaaagcgcagcatctcgaagagttcccataggagcagaccggacatcactgctagaatgccaccagccaaggtctccaagcgcaaaggagggtacgcagcgccatcgccagctgtgaacctccctgaggagcaccttcccgaggagcagcagtggccaaggaaagtgatgtacgaggatgacagcgaggagaccgaggaagaagaggggggcaacaatgtcgaggatagatggaactacaacagagttgctagtagcgatgacgaggaaaccgaagacgaacaatgagcttctagcaggcgtccatctgttctgtagttgtgcatataccataaattttaaactttgagggttatagcttttgcatacatgtaaaattttaaaataaggcggacttgttgtagacagcataggttgtaggtggtctgccccttctcaatcagacatgccatgagttcagaaaggat

SEQ ID NO: 245 - DNA, 1020 bp, Zea mays
  Clone ID: 700051071_FLI
ttgcatactccaaatctttggatgagttccctcagaatggagcaacaattgtccactggataaaaaagttcccattcttttgcagtgaccgtgaatacatctttggaggacgcatatgggaatctgggaagacttactattgtgttacaaagggtgttccatatccatcattgcccaagaaagaaaaaccaaggcgtgtggagttgtacttctcaagttggcgtattagagctgttcaatcgcctaaacatgtgggtcagcaatctgcgtgcgaagtaactttggttcactatgaggacatgggcataccaaaagatgtagccagggttgctgttcgccacggcatgtggggtgctgtgaagaaacttcagtctgggttcagagcgtaccagcaaatgagagacacagaaaataccctgtcacacagcgccattatggctcgaatgaccaccagggtatccatcacggcttcgaatggtggcttggaccatgacctctccatcgccgataaaatcggtggcgagaatgacagctcccatgcagttcagcatggttttgactggaaatgggtggtgtttggtggtgcggtggctgcggtttgtgtgctcaacaccggattggtaggcaaggtcctgttgcttggagcagcgagaaggcaggcaaagaagtgatgtgaggagcaacaccttccagcctctgcataaaggcattcgtcaggctgtagctacaaccgtacaggcaaaaaatattgaggaaataggtggggttcgacagatataattgcaatgtgtaattttggattgtgcacttgtgcagtagatgtagcatgcttgctaccataacagattccgctgtatcaggaatcgctggctaatactccgtatatctgaagatctaagaggtcactgcatgtttgcagctttctatgttcgatatacgtataacggcactgcatgttataagagaaatccattctctgacactgaacagccttttaacatttctttctgaggctgtccg

SEQ ID NO: 246 - DNA, 730 bp, Zea mays
  Clone ID: 700051079_FLI
tccacggtatcgactccatcgcggtggacatgaaggagtccaagctgacggtggtcgggctggcggaccccgtcgacgtcgtgggcaggctgcgcaaggtcggctccgccgccatcgtctccgtcgggccggccacggaggagaaaaagaaagacggcgacaagaaggaggccggcgacaagaagggcgacgacaagaagcccccgccgcccccggtgtacccgtacccgtacccgtggcacgcgtacgccgccgcgcagtaccagtaccagtaccacccccggccgtacccgccccagtacgtcgtccacagcgccgaggaggaccccaactcctgcgtcatctgctgatctgatgccggcgtggcgcagcagtcaccatcttctttttttgcacattcctatatttgttgttgttggcctgcttgcctacctgctcgatcgaccgccacgtcgtcggtgatcgccgggaccggggcgggtgtggtggttggctgctccgctcgtctctatgctggcggtggggttggtcgttggcccgtgtccgcaggtcgttgcaatcatgcaggcgatccatccaaaaagtacttgttgccttgtcggggttctcaggctgctgaccagcgtggtcgcgtagtgtgcatgcggttttttgtccttggctatttgcctattcggggtgtttgaggcatgaaactttatatatatagagagagagatttataaagatt

SEQ ID NO: 247 - DNA, 675 bp, Zea mays
  Clone ID: 700051091_FLI
ctggagacaaatccccacgtccagagttacaagaagatcaagcttggctgtggctgcagctgtgttgcctcctcttgttggaccgaagagagggaggggagaagcagctggcgtgcagacttctactcaggtggtcttttattctctatggggcttctaggatacatcttctccagaagcaccataagtcttgtcttgggcattacaccagggctagccactctgctacttggcactctcagtctgaagttctggaggagcgacagatccagcttcctgcttatcttggctcaggcagaggtgatgctgatgtgcaagcatcttcaccttgagttctgccttgccagaatgaatcaagtttattttcccatcctgctccatttgaggcaaattgaacagggatttgtttggcttccaaatggtttgttggtcctaaaatagtcagaatcacatgacatctgtgctatagatatggacctcagtggttttctccacattaggaaagctggaagagccgttttgaactcaatttttttgctaacagtggtgttatggtgaaacagagttttgtgtgtatgtaccaacaactaaaatgtaaacacgacattatcatagttgagtacaggaataattatctcttatatcttattgcaaaatctgaaacagttctcctgt

SEQ ID NO: 248 - DNA, 1794 bp, Zea mays
  Clone ID: 700051102_FLI
ctccgctgggccaccagctttgaccgccgcctcccttcccctccgctactgctcctccccaccccactcccccgcaggagcggcggcggcggcggcggcggcgaggtcgtaccccacatcggcgagcggcggcggcaccgccggaggcaaaggcaagatgttcgggcgcgcgccgaagaagagcgacaacaccaagtactacgagatcctcggggtgcccaagtcggcgtcccaggacgatctcaagaaggcctaccgcaaggctgctatcaagaaccaccccgacaagggcggtgaccccgagaagttcaaggagctcgcacaagcctatgaggttttgagtgatccagagaaacgtgagatttatgatcagtatggtgaagatgcccttaaggaaggaatgggcggtggaggatcccatgttgatccatttgacatcttctcatcattttttggaccctcttttggaggaggtggtggaagcagcaggggaagaaggcaaaggaggggagaagatgtagttcacccacttaaagtttctctggaagatctttacaatggcacctcaaagaagctctctctttcgcgcaatgtcatctgctccaagtgcaagggcaagggctcgaagtctggtgcttcaatgaggtgccctggttgccagggctcaggcatgaaagtcactattcgtcagctgggcccttccatgatacagcagatgcagcagccttgcaatgagtgcaaggggactggagagagcatcaatgagaaggaccgctgcccagggtgcaagggtgagaaggtcgttcaagagaagaaggttcttgaggttcatgttgagaaggggatgcaacacaaccagaagatcaccttccctggtgaagctgatgaagcgcctgatactgtcactggagacattgtattcgtcctccagcagaaggatcactccaaattcaaaagaaagggtgaagatctcttctatgagcacaccttgtctctgaccgaagcactatgtgggttccaatttgttcttacacatctggacaacaggcagcttctcatcaaatcagaccctggtgaagttgttaaacctgaccaattcaaggcgattaacgatgaggggatgccaatttaccagaggcctttcatgaaggggaagctgtacatccatttcacggtggagttccccgactcgctggcaccagagcagtgcaaggctctcgagacagtacttccaccaaggccttcatccaagctgacagacatggagatagatgaatgcgaggagacgactatgcatgatgtgaacaacatcgaggaagagatgcgcaggaagcaagctcacgctgcccaggaggcgtacgaggaggacgacgagatgccgggcggagcccagagagtgcagtgcgcgcaacagtaagcagactatcatcaaggcaattgggaggggtggtgcccttaaagcatgggagtgatctctggttttgctgtcgccgagctgggaaataggaagctgaatcgacctcgcaagcggggaatgtatccttttttgctgcaacataaaaaatgctacccaggcatagctgggtaccttttaacttctgtttgtgggatttgctagagtgatggtttcgatatatagggggacttgaatgtctggaatgctacggtataacgcacatttgggtgcaatgtctgttgcattgctgtctgaatgacatcgttggtacatttattttcatgtaacgcctgtagtttgctaatcaacaagcttggaatggcctgattgatgatgcc

SEQ ID NO: 249 - DNA, 944 bp, Zea mays
  Clone ID: 700051167_FLI
gggttttgctgctctccgaccccgagctccgaaggccgcagcatcaggcgcggcccccctcgcgtgtgaccgagatggcgctgccgaatcaggggaccgttgattaccccagcttcaagctcgtcatcgtcggcgatggtggaactggtaaaactacatttgtgaagaggcatctcactggagagtttgagaagaaatatgaaccaaccattggtgtggaagttcatccgttggatttcaccactaactgtggtaagatcaggttctactgctgggataccgcagggcaagagaagtttggtggcctcagggatggatactatatccatggccagtgtgcgatcatcatgtttgatgtaacctcaaggcttacttacaagaatgttcctacgtggcatagggacctgtgcagggtctgtgaaaacatccccattgtcctctgcggtaataaggttgatgtgaagaacaggcaggtcaaagccaagcaggttactttccacaggaagaagaatctgcagtactatgaaatttctgccaagagcaactacaactttgagaaacctttcctgtacctcgcaaggaagctggctggtgatccgaaccttcactttgttgaagctgttgctcttaagcctccggaagttaccatcgacatggctatgcagcagcagcatgaagctgagcttgctgcagcagctgcacaacctcttcctgatgacgatgatgatctgattgagtagaaaggatcatgagtcttgaacttgagcaggagttgtgccttgcgtgttttaagttgttctagggtgaactcttgagttctcattgtctggatcatctttttctccttggatgtgttgcatcttttgagtgtggaaatggatggtactcctcgccatgaatttgctggctactttatacattgctttgtaactctgtttgatgat

SEQ ID NO: 250 - DNA, 1144 bp, Zea mays
  Clone ID: 700051176_FLI
aaaccgtatcgtctcgcctgttcagtttccttctcctcttcccgcagcccggtttgccgaccaggttccaccgttccagagtagccaagcgaatcccgtgtctggttcgcgcgatggcggaggagcagtccaacccccagcaccagcaagcggaggagagggaggttatggtggagcagcagcagccgaggagggccccgaagctgaggtacctggacttcgtccaggtggcggctgcccaggccgcggtgtgcctcgctgggctctacggcctcgccaaggaccacgccggcccgctccgccccagcgttgacgccgtcgagtctgccgtcaagggcgtcgttagccccgtctacgaccgcttcggcggcctgccgctcgacgtcctcgccttcgtcgaccgcaaggtggacgacacggtgcacgaggtggacaagcacctcccgggcgcgctgaaggcggcgtcggcgcatgtctacgcggtggttcggggcgtgccggaggtggcgcgcgagctggcggccgaggcgcagcggtcgggcgtgaggggcgcagcccgtgcggcgctcgcgatgacggagccggtggcgcgggacgtgtacggccgcgtggagcccgtggccaaggacctctacgtgcggtacgagcccgcggcggagcacctggccgtctccgcctggcgctcgctgaacggcctgccggtgttcccgcacgtcgcggagatcgtcgtgcccaccgccgcgcactgggccgacaagtacaacagggcggtcgcagccgccgcggagcacggctacgcgggggccaagtacctccccgccatccccaccgaacgcatcgccaaggtgttttcgtcggcgccagaggccgagccgctggcagagggccagtagtgtgtgtgtgtgtgcgcgcgcgcgcgagctcgtctttgccggtggtgactctggatttggatcaccttccgaactgaactgaaaataaggaagcgtgaatccgggggccagttaaagatggtggtatggtatggtagcggcgttgtactagatgcgtgatgggacgatggttacggaccatgatgatgacgctgtgttccatttagctctctgctgcgtgcttttgtataaaagaagtggttcgatgtcgc

SEQ ID NO: 251 - DNA, 1420 bp, Zea mays
  Clone ID: 700051232_FLI
cctgttcctatcgggtcaaatcatcaggctgaattacctgagtgcaggccatttggtggaagaactgaagaagacgaaagtgtcaagtggatcagaaacagtgttgtgccaatgcctggtactgatgcatcgtctttggtgttggagcctgttcactgcaaagcaggttgtgattgtcttgacgaaggttcaatcaattgtgtgaaaaagcatgtgatggaagcaagagaaaatttgaaggattctgttggtgcagacgccttcagggagttgggtttctatgacatgggggaagaggttgcctcaaggtggtcagaagaggaggaacgtttgttccagcaagtggtctcgtcaaaccgtgcttctctgcgcaggaacttttgggatgaacttcctcttgccttcccttccaagtccagcaaagagctagtgagctactacttcaatgtcttcatgttgaggaagagggctgagcagaacaggttcgacccagcgaacattgacagtgacgacgatgagtggcaggcaggtggtgattttgagtttccaataacaggaagaactgatgaatacatgccaatcgagtcccttactgatcaagatgatgttgcttgcaatccatttcccttggagggggatttatatggagattctgatgatgaggacgagcttgacaattccagtggaggagacaggcataatggtgtgcagagggctggtatgttgtcagagggtcatcccgaaatgtcatttatagatcatgatcaacagacgttgaagctagatgcagatgcacaagatgactcttgcacatcatttgaggctcatcaggttggttgcgatggtggggcacatactgatattggcaatcactacaggagtgacgacggcctttgtggtggtgcagaacatgggttctttggtgaccattgtgacacaaaagagtggggcttcggtttcagtactggttgggagaggcatgattttttgtcaacgaacaatgtcatagaagaggtgttcgggaagggctccagtgaagatggaagtgacactggtactggccaggaccttatctgagccagaggcggaggcttcttttcagctgcgaaacctttagcagctcccccttgttctctgaatctgtacagcagtagtagttgcctattttgatttgatgcctcacttgttcgtataggaatctctcatccctgtccttgaacatcatctgcttgcgatattggtcgcatggctaatgtaaatccgacgatgatatcatctgtcgatgatctgttgttaggctgtagcatgtacgtatcatctttgtagtgacggtgtgtcttgaccgtgtgtcttgacctgagcatttttcccatgtgccaacgagggtcatgtaataaaaggctgctgttgttccttgccc

SEQ ID NO: 252 - DNA, 870 bp, Zea mays
  Clone ID: 700051334_FLI
gcggcatggttcgacatggagcacgcgaggtggcaggaggagcacggcaaggtgatgcgccacctgcgggcggcgctggaggcggagtacgccgcgacggcgacgacgccgccgagcgctgcttcctctggatcggcggcttccgcccttcagagctcatcaagatagcggcccggcacgcggagcccctgacggagcagcaggcgatgagcgtctgcggtgtgcagcagtgggcgagggacgcggaggcggcgttggaccacgagctgcaagcgatgcacagctccgtgtcggaggccatctcctccgacgcggcggcgctgctctacccccactccgacgtgcccggcttcatggccaccatgtccctcgccatcagcaagctcgcctccctcgaagccttcgtcagacaagcggacgcgcttaggctgcagacgctgcaccggctgccgcagatcctgacggcgcggcagtcagcgcggtgcttcctcgccatcgccgactactcccaccgcctccgcgcgctcagcgaactctggcacacccggcaaggacatgagcgagcggcgagcacccaggcggccaggcccagccagacaccgccctaccaaagtagagacggtttactatagacgttacaaagtagagatagtttcaaagatacagatagaggtgatcactgatcaggaattctgatgacccatgtaactgtggagtatataaactaaatagtggctgatccagcagtatcaatatgaatataaaatagtactaggaaggaataataactgaaactgccaaattgcctagctgattgacatgcatgtcagacaatcagaagatgtagcattcaaattgatacatggtgac

SEQ ID NO: 253 - DNA, 535 bp, Zea mays
  Clone ID: 700051368_FLI
ctcataccttgtcacctaaatcggggttatactcaaagtaccattaaaattcttttgtgtgttctgttacttgtggaatatgcagcttataaaggaattggcacagcctgatgtaagacatgaaatatctcggctagtaaagcccatgactcaggccttggatgccgccttcaaccatgatttggaacagcagcagaaatcgtccaaggccggaaacaggcacaacgggttttgagcctaggagattggtttgaccaacacatgaagcgagacggacggacgggctgtgcccgaatacacaagagctgctgcagaattcttgaggcttgtacgattttgttctttttcccctcgcttattaatagctgccggaggagcctgctgtttgcagccccggaatcttgatctatgcatcaattgtttgtaactgactgaatagtgaagactcgcaacgcatgatgctgccgacgcgttgtacttgtacatggcagtaatggctattcgagatagaaccaaagctttaccattttgtttt

SEQ ID NO: 254 - DNA, 786 bp, Zea mays
  Clone ID: 700051377_FLI
gtgccggtgacgctctccgtcggcggcttcggctccggctactcgctcccgtcgacgcaggcggcgctggacctgttcgactacctctggaacgccttcctcggcgggtcgaagccgggcgtgcgccgccccttcggcgacgcgtggctcgacggcgtcgacctgttcctggagcgcggctcgcccgccgaccgctacgacgtgctggcgctcgagctcgccaagcacaacatccgcggcgggcccggcaagccgctgcacctgacggccacgccgcgctgcgggttcccgcccgccggctacctgcgccgcgcgctcgacacgggcatcttcgagcgcgtccacgtccggatctacgacgacgccgactgcgaggccaggtggcacctcgcgtgggacgagtggacggcggcgtacccggccaccaggttctacgtcggcctcacggcgtcggagatgacgcacggctgggtgcaccccaagaacgtctactacgacgtcgcgccgtccgcgcagaaggcggacaactacggcggcttcatgatctgggaccgctactacgacaaactctccaactacaccagcatggtcaaggactacgcttgattggatttctcgactcagttcagagcagacatgcatgctagctgcgtcagccgcttcgatctagctcaccgacctatataagccgaagtactgtgtagtgtgtttgcattttattgtaagaaactaagaaggaataaattggcgaataaacaagagtaaaatacaccgggttgttgagtg

SEQ ID NO: 255 - DNA, 1418 bp, Zea mays
  Clone ID: 700051430_FLI
tgttcctatcgggtcaaatcatcaggctgaattacctgagtgcaggccatttggtggaagaactgaagaagacgaaagtgtcaagtggatcagaaacagtgttgtgccaatgcctggtactgatgcatcgtctttggtgttggagcctgttcactgcaaagcaggttgtgattgtcttgacgaaggttcaatcaattgtgtgaaaaagcatgtgatggaagcaagagaaaatttgaaggattctgttggtgcagacgccttcagggagttgggtttctatgacatgggggaagaggttgcctcaaggtggtcagaagaggaggaacgtttgttccagcaagtggtctcgtcaaaccgtgcttctctgcgcaggaacttttgggatgaacttcctcttgccttcccttccaagtccagcaaagagctagtgagctactacttcaatgtcttcatgttgaggaagagggctgagcagaacaggttcgacccagcgaacattgacagtgacgacgatgagtggcaggcaggtggtgattttgagtttccaataacaggaagaactgatgaatacatgccaatcgagtcccttactgatcaagatgatgttgcttgcaatccatttcccttggagggggatttatatggagattctgatgatgaggacgagcttgacaattccagtggaggagacaggcataatggtgtgcagagggctggtatgttgtcagagggtcatcccgaaatgtcatttatagatcatgatcaacagacgttgaagctagatgcagatgcacaagatgactcttgcacatcatttgaggctcatcaggttggttgcgatggtggggcacatactgatattggcaatcactacaggagtgacgacggcctttgtggtggtgcagaacatgggttctttggtgaccattgtgacacaaaagagtggggcttcggtttcagtactggttgggagaggcatgattttttgtcaacgaacaatgtcatagaagaggtgttcgggaagggctccagtgaagatggaagtgacactggtactggccaggaccttatctgagccagaggcggaggcttcttttcagctgcgaaacctttagcagctcccccttgttctctgaatctgtacagcagtagtagttgcctattttgatttgatgcctcacttgttcgtataggaatctctcatccctgtccttgaacatcatctgcttgcgatattggtcgcatggctaatgtaaatccgacgatgatatcatctgtcgatgatctgttgttaggctgtagcatgtacgtatcatctttgtagtgacggtgtgtcttgaccgtgtgtcttgacctgagcatttttcccatgtgccaacgagggtcatgtaataaaaggctgctgttgttccttgccc

SEQ ID NO: 256 - DNA, 888 bp, Zea mays
  Clone ID: 700051487_FLI
gcgatacttctgaaatagtagtccttttcgtagaacatgccctcgatccgttgatggtgccttaaaatacgtacctgaatagctccaaaaaaaccacacacacacacacactgaacagttcacaggcattcctaatcacttctcgcgtgtgtacgtgcaggggctcacacgatcggcatctcccaatgcaactccttcagcgagcgcctgtacaacttcacggggcgcggcgggcccgacgacgcggacccgtcgctggacccgctgtacgccgcgaagttgcggctcaagtgcaagacgctgacggacaacacgacgatcgtggagatggaccccggcagcttccgcaccttcgacctgagctactaccgcggcgtgctcaagcggcggggcctgttccagtccgacgccgcgctcatcaccgacgccgcctccaaggccgacatcctcagcgtgatcaacgcgccgcccgaggtgttcttccaggtcttcgcgggctccatggtcaagatgggcgccatcgaggtcaagaccggctccgagggcgagatcaggaagcactgcgccctcgtcaacaagcactaggcggcggaattcatgcgggagatggctccattgctcgcaaaaaatccttgtgagacacacaacatgctctgcatctgcaggcgttgtcgtcaccttggtggacgtagtacatcggtgcatggattatctgttgtttaatttgtacgttcagttcattctgtttcttgtattcttttggttcctttcctcttgtttattcatggatgatgaggtgtttctgttttattctctggttcagctgtaaccatgtaacatgtaaggtgcgcgttttgtcctcgtgatctctgcaactgtatttatttt

SEQ ID NO: 257 - DNA, 332 bp, Zea mays
  Clone ID: 700051501_FLI
cctagatgttctccatcggacgctgggtaaattggtgctgaaaaatgctgagcagggtgcggcaactacatgctatttggcactccacccgcatgtgaagggcgtgtccgggaagtacttctgcgactgtaacctgtacgagccaagcgcgaacgccaaggacatggagttggccaagaggctctgggacttcggcgtcgagctcatcacctagctcatgcttcttgttgttagcgacttgttttcagacatggatgtaatgtaaatcccttgacagatggtaaattctgtaggccctcgaggagctcctgtgtggtaaactcattcacctc

SEQ ID NO: 258 - DNA, 717 bp, Zea mays
  Clone ID: 700051632_FLI
gcagagtactccgtctgatctcggtgatctgtctccacgacaaggagtgcactgtcagctctagcttgctgcagaacaagggcaagatggcaagaggtggtcggctactgatcctctccctggggcttgtgctcctctacttcgtctcaggaagtgttgctgctgctgctgcacagaaaacgtggtgcgttgccaagccgtcggcgtccaacgatatcctgtctctgaacctcaactacgcgtgctcccaggtgagctgcggcgtgatccagaagggcgggccgtgctactacccggacaacctggtgtcgcgcgccgccgtcgccatgaacctctactatgccgccaatggcaggcacccctggaactgctacttcaacaactcggcgctcgtggtgcagtccgatcccagctatggatcctgcacctactactgatgtctgtctgatgctcttttgtagcagagatcggtcgatgaaaggaaatataatccctgtgtatgctgtgctgtgttgtgtctagagatgacaatagggacctgattcccccgtggggaatttcctattgctatccctagttgcgtcctagtagaagtgtctcttgttccatccagttgatatgcatgataacatttggagatgcatgcatgtgattttgtattcgaggatatggtgtgatcgcaaatgaacaaagtgatgcaaggcagcaatcattcat

SEQ ID NO: 259 - DNA, 622 bp, Zea mays
  Clone ID: 700051635_FLI
tcgacttcgggtccatttaaatctttcatcttcacttcttctttcttcttgagttgttgttggtttttgaaccaaaggacccttcctaaacctttctcttttattacttttcaataatacataatggctgatgatgaatttgaatccgttggatcaggagcatccacctgcttcccaatgcaatgctctgccatcaagaagaatggatatgctgtgttgaagaacagaccctgcaaggtcgtcgaaacctctacctccaagaccggaaagcacggacacgctaaggtccatatggttggtattgatatcttcaccggaaagaaatacgaagaaatttgcccatccacccacaacatgatggttcctaacgtcgacagacgtgacttccaagtcatcaacatcgaagagggctttgttagcttgttgaaggatgacggaagcaccaaggacgacttgaaggtcccagaaggcgagctcggagataagttaaaggaagcttttgatgatggaaaggatgttgttgccaccgtcttggctgctatggacgaagagtgcatcatctcctggaaggaagcctctaacaagtcctaaacatatatataaaaaaatactgttgtttaat

SEQ ID NO: 260 - DNA, 1612 bp, Zea mays
  Clone ID: 700051638_FLI
caccctcgcattggtttctcttgatcgctttgtcacttgaatccgtgcctgctctaacagagagcggagacgaccacgacgacggcgaggccaggctctgcgatggagcaggagccgcaccggcccatggagctgcccccgggcttccgcttccacccgaccgacgaggagctcatcacgcactacctggcccgcaaggccgccgacgcccgcttcgccgcgcttgccgtcgccgaggccgacctcaacaagtgcgagccctgggacctgccatgtaagcaacgcacgcgccggcatagctactagatcatgtttctgcacggatcgagtcatgcatggcttcataaaggaagaagaagaagggagttatgatatgtgatttggttgcgccagcgctggcgaggatgggggagaaggagtggtacttcttctgcctcaaggaccgcaagtacccgacggggctgaggaccaaccgggccacggaggccgggtactggaaggccacgggcaaggacagggacgtcttcaggggcaaggcgctcgtcggttccaagaagacgctcgtcttctacacggggagggcgcccaggggcgagaagtccggatgggtcatgcacgagtaccgcctccacgccaagctccacggccacggccacggccaaggcgcagccgtcgtcgtcgtccccaaggccgccgggtccaagaacgagtgggtgctgtgcagggtgttcaagaagagcctggtcgtaggtggtgcagctgcagcagcagcaccaaccgcaggcaagaggggcggcacggagacgtcgtccaactacaagacgggcgacgtagaggccatcgcccacctccctccgctgatggacgtgtccggctccggctccggcgccggcgccgccgccgcggcggcggcacacgtgacctgcttctccgacgcgctggagggccagttcttggaccagacgacgaccacgccgccgccagaagccgccaccgccgccacggacgacgacggccacctcggcgccctcggcgcctcctcctcgcccttccagctgcccggcttcgcgcactactactacggcggcgggccgccgcacctgcaccagcaccacggcgccgccagcctggtgcagctcctggagggcagcgtgccgccgtgcaataagggcggcgagcgggagcgggagcggctgagcgcgtcgcaggacacggggctcacctccgacgtcaaccccgagatctcctcctcctccggccaacgcttcgaccacgaccacgaccatgaccaccacctctgctgctggggctactgatcgtcgattcgatgagcctacgacgactaccgagcgcgcatcatgcatgcgtcgcgttattactagcgattagtgtatagcacactgctgtaaataaaacatctactagtactacatctgcgtgaggtcgacgatcggccgtgtggtggtggtggtgcgtggcatgcatgcgtcgagctgcctacgtttcattatctgctcgtgtgatttgttactgtagacgagtgtgggggtgtgtaattagcattgttgatgtattattattcacgatttggtggaataatatctccttggtt

SEQ ID NO: 261 - DNA, 1014 bp, Zea mays
  Clone ID: 700051679_FLI
gcttgtctctgctcgcccaagcacaggtgttggcttcctcccatcgtatcaaccatatgtggagtccttgcttatcccctgcgcataggaagccagctccctcacgttgcctcatccctagacgcgctcgcccagatcgagcgtcgtcgctcagctcgcccagccctccccatccttctctagccatggtgctgctcccagtcttctgctcgcccctgccctcagccttggcgtctggccgccactgccccagctttccatggcggcattttctgcttcctggtggccgacgccctccctaaactgagcaccgccgtcaactgcgccttggcgctaatcctccccaacctcttctttgccggtggtcgtctccagccccttccatggcacctagttttattcccatggcgagctcgcccaagcaatcacctccatcacagctcgccgtgcctgcgcagccccgacaacgactccctcttctgcgtcgcgccattgacccgctcgatggaatgccgcagcgagctctacccgatctgcaacgcctgcgcgccgtcgtcgaaatccccgcaaccgtgttggtccgcaacaacacgtcctcgatctgcaatccctagccttgtggtcgaccttgccctccgtcgatgtcctgccttgcgcatcgcttgctcaacgaaagcctcactcgtgaacgacatgcgcgactcatccgatcccgccaggtacgctagatgattatgcgaattggagggcatggatcaggatggatcacaaggtggctttgatggacccatctcgatatggacgacttgatcaagtgtcaggattgttgatgctcgccaagcggacttcatctaaccacactaacctagtgtatcccaggcaagccccggtgcatttgccacctccttgctgtttttaaacttttatcatttatatgatgcattaggtggtaggagttgaatgattaaacctttgttgcataacttccttgaactattgattaccatccttgat

SEQ ID NO: 262 - DNA, 520 bp, Zea mays
  Clone ID: 700051709_FLI
gccgcttcctccggctctcgatctcgacctcttccatcgggcggccgccgtgaacgcagtctccaccggcatgcggtttccgttcaagggctatcctgtcgcctgcccgacgccacagcagtactttttctacgagcaggcggctgccgcggcatccggataccggatgctcaaggtcgctccaccggccgtgactgtggccgcggttgcgcagagcgactccgactcgtcgtctgtggttgatcactccccttcgcctcccgcggtgacggcaaacaaggtgggcttcgaactggatctgaactggcccccgccggcagagaactaggcaggccggagtttttggctgacgacttagtagcttccttttcccttttgccttcatcaggaatgttacttgtggttgttttggtcctgtatggctgtattcttgttctgtagactaagagatggggagtcttgtaaatattttttttccgtcgagacggaaatgaactgagatctgttcgtctgtctgatc

SEQ ID NO: 263 - DNA, 1771 bp, Zea mays
  Clone ID: 700051726_FLI
aaaggaaaaaaatcaaacgagaaggaagccaccgctccccaatcgcctgcttgccttcccatcctcctcgtagatctccggcaccgggcaccatgagctcctactccggcgaccgctcctcctcctcctccttgcgccccaccaacacctccttcgactcctacaagttcgacttcggcatcaactcctcccgctcctccggctctcgccccctccgcgaccagcggccgggcgcggctaccaaccctccaacgaggcccgccaccggcgccacgtggatgcaccagcccgccagcgccaagccgtcgtggacccaccagccttcccccgccgcggcgtcggcgcccaccatggcggggcctggatccgggccaacctccatggtcggcgacatctttggccggagctggtcctccgccgcgccctcctctgggttcggcatccctcaggccaacaaccccggcctcttcagcgatctcctcggctccgcgctcggctcctcccgctcccagtccaacgcgccgctcagatccgccgccgcgccacaggcatccaggccagccggtgagaagcccaatgtcaacgctagcagctctcccttctcgatgggcggcatggcgggcgcgctcccgaaaactacgggagcaccgatgggctccggtggatacggcgttggtggccggccgatgaaacccgtgggcatggccgcgacggctgctgcgcagccgatggggcagcagagggatccatttggctcaatagacccctttgccgcaaagcctgggtccatgaacgcggtgaagcaggccaattcggtcaagccggatcagggatttggagctttccagggtgtgaattccagtgtcgctgctggatttgggagcttccagagtactgatgctggatctggtggtttccaaagcgctggcacgaccacaccttctaactttacaccaccgccagcaccagcttcaatgcctactcctgtgtctgcagcagttaactcaagcatggatcctctggataatctttttgcttcaaccacaagtgcaccgactgcagctgccgctagtaatggtgacagtggcggtgacatgtttggtgagatggatggttgggtcgatgtggaggcagagtttgctggtggtgatagtggtggcacaaccacagagctggatggcctgccaccgccaccatccggattgacaatatcagctgccaaggccaaagggatggatagctacaagggagggcagtatgctgatgctatcaagtggttgtcatgggctgttgttctaattgagaaatcagggaaagatgctgacattgttgaggtgttgtcttcaagagcttcttcatataaggaggttggtgagtacaagaaggccatcactgactgctcgaaggtgctggatcaagataaggataatgtctcagtgctagtgcagcgtgctctcctttatgaaagcacagagaaatataggcttggtgccgaggacctgcgtttggttctgaagattgatcctacaaataggcttgccaggagtacaattcaccgcctgaacaagttggctgactagtgatgtctttctagcgccctgatgtaatattgtactaccactgtactgcatccttctcacatgagatattgagatctgtgagttatttgaactctttagtctttattactatacttgtggctttgggggaatagtttgcaattgtgttgttataaagtatgaaatacgaatttacatacaatatatttttt

SEQ ID NO: 264 - DNA, 1031 bp, Zea mays
  Clone ID: 700051738_FLI
ggcagaagccctacaaccacgccggctgcaaggcctccaagtcgtcccggcccttctgctcgcgcaagaaccctgacgcggcatggtacgacaagatggaggcctgcataacgccgctgccggagatctccaaggccagcgacgtcgccggcggcgcggtgaagagatggccgcagcggctcacggccgtgccgcccagggtctcccgcggcactgtcaggggcgtcacggccaggtcgttcgcgcaggacacggagctgtggcggaggagggtccggcactacaagtcggtggccagccagctcgagcagaaggggcggtaccgcaacgtgctggacatgaacgcgcgcctgggcgggttcgccgcggcgctggcgctggccggcgacccgctgtgggtcatgaacatggtcccgaccgtggcgaacgcgaccacgctcggggccatctacgagcgcggcctcatcggaagctaccaggactggtgcgagggcatgtctacctacccgaggacctacgacctcatccatgcggattcggtgttcaccctgtacaaggacaggtgtgagatggaccgcatcctcctggagatggacaggatcctgaggcccaggggcacggtgatcgtcagggaagacgtggacatgctggtgaaggtcaagagcctggcggacgggatgaggtgggagagccagatcgtcgaccacgaagacggcccgctcgtcagggagaagatcctcctggtcgtcaagacgtactggactgcccaggaccaagaccagtagcaggaccggacttgtcaagcgaagttcagcaatgttgataagcatttttcttgcttcgaattgcattggatcgccatttctagctccttgagctagtagtgttctctgtttgtttgctgttccttttggactgtacttgctcagataggaaatttgtatcctaaggccttgttcggttattcccaatacacatggattggatgggattggaaaaaattcttaagaagtttgacttgtgtgggattc

SEQ ID NO: 265 - DNA, 861 bp, Zea mays
  Clone ID: 700051754_FLI
gttgctgatccgtgctctgcttatcgaatctcctccttggccgcagggtccggcggcgaagggaaggcaagatgtacaccgcgaggaagaagatccagaaggagaagggccttgagccctccgagttcgaggactccgttgcccaggctttctttgatctggagaacgggaaccaggagctcaagagcgacctcaaggacctgtacatcaacaatgctatccagatggatgttaccgggagcaggaaggctgttgtcatccacgtcccataccgcctgcgcaaggccttcaggaagatccatgtcagactcgtcagggagctggagaagaaattcagcggcaaggatgtggtaattgttgctacaaggaggattgtgaggccacccaagaagggttcagctgttctgcgccctcgcaccaggactctgactgctgttcacgatggcatcttggaggatgttgtctacccagctgagattgtggggaagcgtgtcagataccgtctggatggttccaagattatcaagattttcttggacccaaaggagaggaacaacactgaatacaagctggagacctgcactgcggtctaccgcaggctgtgtgggaaagatgtggtctttgagtaccctatgaccgaaaatgcataaatatgatgccctctggatatctccactctatttcgttgattctgaatgttatgttgggtctccctatgtacttcaaaaacatagttttgatgctaaagttgcctagcaatttggtacggggaagtggcagtggacgtgaacaatgttaagttttgagcatttaaattaaacctttgccctgataacgttgctgagttatttaatttcttgc

SEQ ID NO: 266 - DNA, 814 bp, Zea mays
  Clone ID: 700051775_FLI
gtggaaaactcaagggctacaagaagatcctggtactctacaccaactacgggaagcagcggaagccggagaagacaaactgggtgatgcatcagtaccacctagggtccgatgaggaggagaaggacggcgagctcgtcgtctccaaggtgttctaccagacgcagccgaggcagtgcggcagcggttcggcgacggctaaggacgccatcccgctcgctgccaacgcagcgactgaccaccaccaccaccaccaccatgacggtggcaatggcggcggcaacaacatgttgaaggaggcaggcattgtagatttctacagcccagcagcactaattagctacaaccaggcagcttctaacagcagggttgccgcttctgctcacctggtgcctaactttgaggtgcacactacatcgggggctgctggctttggtccctgaccaagacgcgcaagaggaactattcgactgatataggttagaggggagggaaatgcaggcagataatggcaacttcatgaatgcaataacttactacaaatggtcgacgagtttactgaaccgtaatggtggacaataagaggatgagtacgtgttgagtgagtggttggacatacaaatactgaagtgtaggaatccatacaactatacattgttcattaattgttacacatatatgtaacttgatgctatcaattttttgtttaatgatctttgttccataataagaatggagtttaatattgtacatcagttctttattacctaaaggacttgtatatgtatacaaatcattgtacacctttttttgg

SEQ ID NO: 267 - DNA, 1216 bp, Zea mays
  Clone ID: 700051781_FLI
cccgaaccccgcgacgattcaccgagccggcgcccagtgacccttccagaagcttccagaaggtcaccgccatggccgcgcccttcttttccactcctttccagccctacgtctaccagagccagcaaggatctgtgacggcgtttcagatatccggtggagatgtgcaggtcctgcaggtgatgctgaagtctcaggagaagctgactgcaaaaccaggtgcaatgtgctacatgtctgggaatatgcagatggacaacaattacttgcctgaaaatgatggaggcgtgtggcagtggatttttgggaaacgtgtaagcagcaccattttctttaattctggatctgatgatggatatgtcgggattgctgcaccatttcctgggaggatactgccggtagatctaacaaactttagtggagaacttctttgccaggcagatgcttttctatgttcggtcaatgatgtctccgtctctagtacagttgagccaaggccacggaatattgagattggtgcagagatgatccttaaacaaaaacttaggggccaggggatggcttttcttgttggtggtggatcagtcatgcagaaaatccttgctcctagagaggtgataactgttgatgctgcttgtattgtggctatgtcggccaccattaacttccagttgaagagccctaaccagcttagaagagcagtttttgggggtgataaccagctaacagcatctctcacgggaccaggtgttgttttcattcaaagtctgccattccatcgactctcacagagaatcgccagtagatcagtggcaggcccaagcttgagggacaacccaaagttcttcatccagattgtcatgttcttcttcctggcctatgttatgattgtatcatccataattctgacagatgtttaggcgattcagtgagcttttggtgtattcctagacaagttatcgaagagttaaagctacctccccaatgttaatgtagatgtaagagaacgaatttcacaagctgttgttagaaaccttagcagaaggttcttcatttttttttctctaacagtttggagggggcggggcgggtttcttggttagcgtgtaaagaggaagacagcaaaatcaagttgcacagcgtatggtgaatatacagtaattttcctcctaaactggtgcgatgcattttgaataattgaatcagtgatttggct

SEQ ID NO: 268 - DNA, 596 bp, Zea mays
  Clone ID: 700051804_FLI
cgcgatctcaacttcatcgaccacacgagtaacatctcctggaaagcgtttgcgagggcgatgccggtgatcatagacccggcgctgtacatgaagaaaaagggcgatctgttctgggtgccggagaggcggagcttgcccacggcattcaagctgttcactggtgcgtctactgctctctcactctccacccgtgattgttaacctgacattgacagagcacactcatttattcagtgctagcacccaactacagtactacccatcgcacggtagcagtgcctatttctgtcatctttctctgtatacagtagttgattggtccacaggagaactaatcccagcattcagctagattgttttgagttgtcgccattgtaagaaactgaactgtctgaatcatgaagcgattagcactgccggagttggttgagcagcaggtagttgcaaagccctagcgtgctttgaatgcttttgatttcgctctcggtggcaaactcgctagagagtctgttccttgtggacaagagcctgtaccctttctctctgttctttttggataagagaagaatcgaaataaagatgaaacgcatgct

SEQ ID NO: 269 - DNA, 911 bp, Zea mays
  Clone ID: 700051819_FLI
gcgaccagccagtgatcgaccgaggcagatactgactaggagcagagagcagcggagatggtgaagattccgagccccaggaggctgttcaggagccggtccaggagcaccaccatcatcggcggcggcggcgcggacatctgcgccatggtcgccgagcacgagaggatcgagtgggaggtgcggcccggcgggatgctggtgcagaagcggcgctcgacggaggacgacgcggcggcggccgtggagtacatcctggtgagagtctccaccaccgggtggcagtggcacgacgtctccatcgacgccaccgcaaccttcggcgacctgaaggtgatgctgtcgctggcgaccgggctgtggcccagggagcagaggctgctgtacaggggcaaggagagggacgactgcgagcacctgcacatggtgggggtccaggacaaggacaaggtgctgctcctggaggacccggccgtcaaggagaggaagctcaggtcaaccaccttggcgcagctcatgggcgtgccctgtcactccttcatccaagtgtagagagaaacccccggggaatatttcttgccatttttctcccgtctcgtcgtcgtcgttctccaatttgcctgcgtgagcgaagggtttcagtccagtctaaccgcgtttgttcagagcctgctgagttccatctcagggcttgaattcggccaatcgaatcaagacagtcgcaaacgataggatataaagatgatggatacatggcgtaaattactgtgaacgggtacgtaatgtcatcccagtgccagtgtgcgtgagccagtagttctttggttccttgctctgtatatattctctctttttttttcttcctgagatcagcaaaacagttcggaattcaatagatgctgctgtaaatc

SEQ ID NO: 270 - DNA, 889 bp, Zea mays
  Clone ID: 700051838_FLI
acgaggacgccctcaactccgggcggtgggaggcgcggttcgcgcgcgcgctgcggtactacgccgcggcgttcgacgccgtggaggcggctgggctggcggacgccagccccgcgagggccaaggcggaggagatgttcgcgcgggagatccgcaacgcggtggcgttcgaggccgcggaccgcttcgagcggcacgagaccttcaccgggtggcggcagcgcatgcaggaaggcgggttccagaacgccggcatcggcgaccgggaggcgttgcaggggcgcatgatcgcgaggatgttcgcgccgggcaactacagcgtgcaggtgcagggcgacggcgaggggctcacgctccggtggatggaccaggccatgtacaccgtgtccgcgtggacgccggtcagcgacgggggcagcacggtgtctgcgtctgtctccaccacagcatcccattctcagcatagctgaatggggggaagacacaaggtgaagtgaagaagaaaagaacatggtttttcagtggttcttttgctgttactgaaaacttagttcattatacagtctgacaattcttttatacaatcagaagaacaaaaaaaaagaagcaaaggagtaagaaagatttgtttgtagctttgtttttataggtgataggataaaagattcaattgttagtagttgtaattctttattctttatgtacacttgtcattctttcaccatgtctgtttagcttgtaatctctgttccgagttagaaggaaatggaataaacaagtatggttttcattcatctgaacattttgtcaggtgggaaatcggctatgccctctctattagtgatcttgctgtaatagtgaaagcaaaggattttttagaccaatactc

SEQ ID NO: 271 - DNA, 1215 bp, Zea mays
  Clone ID: 700051842_FLI
ctaggccgtcggtcgtcgtcctcgcggtggccgtcgccgtggcgtccctcgcgcagcccggcgcggccgacctgaagctggactactacgcgagcacctgccccaacgcggaggccatcgtgcgcggcgtggtgcagcagcgactgcaggcaacaatccgggccgtcggctccaccgtccgcctcttcttccacgactgcttcgtcgagggttgcgacggctcggtgctgatcgaatccacgcccggcaaccaggccgagaaggacgcctccgacaacaagtccctcgcgtccgaaggcttcgacaccgtgcggagcgccaaggccgccgtcgaggccgcctgcccggacacggtctcctgcgccgacgtgctcgccatcgccgctcgagacgccatctccatgagtggcgggcctttcttcccagtggagctgggcaggctggacggtctgagctccaccgccagcagcgtgccaggccagctgcccgaggccaaccagaccatggaccagctgctggcagtcttcaaggcacacgggctcaacatgtccgacctcgtcgcgctctcagagcagcggcgcacagcgtggggctggcgcactgcagcaagttcgcgagccggctgtacagctaccagctgccggggcagccgacggacccgacgctgaaccccaagtacgcgcggttcctggagagcaggtgccccgacggcgggcccgacaacctggtgctcatggaccaggccacgccggcgcagttcgacaaccagtactaccgcaacctccaggacggcggcgggctgctcggctccgaccagctgctctacaccgacaaccggacgcgccccatggtggactcgctggccaacagcaccgccgccttctaccgcgccttagccgacgccgtcgtccggctcggccgcgtcggggtcaagtccggcaggcggggcaacgtccgcaagcagtgcgacgtgttcaactgacaggaaaactgcacgcgcgcgcgcacgagcacgagattgtccttggcgtgcgtggtccagggaagcgcgcgcggaagattatattcatttcgtttgggcgttttgtttgtaatgcatctgttgttctgtttgattcgttgcatctcatgcggttgattccttaaatgtgtgtgtgtgtagtaattatcccgcaattaattgtacaaagtggcgaataaaacatcctccagaat

SEQ ID NO: 272 - DNA, 1072 bp, Zea mays
  Clone ID: 700051846_FLI
caagctatccacataaaggaaaagaagaaactagtactagatctggtttgaatgatagggagagaggggacttgaaatataaccaggctggttttaatagtaaaacacattcacttcaggaatcaataaattcacaagaagaggtgaaagtgacaaaagtctcaccaccccggagaaaagctaacagggatgagaaatcagaaaggcaggtcaactacatgaaaaaagaaagtgggcctgaaattagtcggactggtgttaagcagcaacagcaacttaaacagctgcaaaggccatcatcaacctcatcgtcgcaggttttatccaagcaatctgagaaggaagatatggaaataaacacaatacttgaggaagaggcgctgatagcagctcacagaaaggaaattgaaagtacaatggagatagtacgagaagagatgaatctattagcagaggtcgatcagccaggtagtcttattgacaactacgtggcacagctaagctttctgttgtcgcggaaggcttctggtttggtaagccttcaggcacgcttggcacggtttcagcagcgcctcaaggaacaggagattcttagccgtcaaaaaccattgagatagtttaaaccgcccaaaatggaaacctttcggtttgtcgttgatcgcgagaagcctcggatactggaaactgccatcgattgcgacagcctcggatcatggcctccaacatcgccttttagggatctaagggtgaaaggatgggagatggaaatgtgggctgatgaagtgcgcattcattattgattttgaggttttatgaaccagtttactaatttttcttttactgaaaagggtgcttgagtgtattttctatcgatgtcatgggtttgtcaacgtttgccattttcttttgtacgagtatagttgtaactgttgttcgaataccggtagtgaagtgctgcgagtgaggaaataaccttgccttgccgttatggtgttgtatcttttgttgatatttatttcgcatcaacaaaagaaaagcagcgttcgataaatgtctacaggatttgctttgt

SEQ ID NO: 273 - DNA, 945 bp, Zea mays
  Clone ID: 700051861_FLI
gcacctgctagggtcaacacccgctctctgcggactgcgtgaagcaccagcggcggccaccgggcaggacgagccccctccccaaacagagaggggcggggatcagtgcgtgcgctcctggtggagggcgtggaagagcttggcaggcggcaagcaggggtttgggaggatggtttcgctctcgacttggttccgctatgccgcacaaaagttcgagtactgcgtttccctctcgttgaagaaatataatgacgtgggccggatcagcagcacacagctaactgatgtgttaaacaaaaatttattccaaggcaagctcacctacgtgtgtccgaccaaaggggaagaagccatggctcccatcgcatctccaactggaggagccgtccttgtcagaaaactcgcaaatttgagccccacgcaagtgtttgtcggggacgttgtgttgttaaaagacccagagaaatctgatgatttaattattcgacgactggctgccttggaaggctatgagatggtctctaatgatgagaaggatgagccgtttgtgcttgagaaagaccaatgctgggtcctggcagacaacctagccctcaagccaaaggaagctagagatagccgcttgtttggacctgtcccaatgactgacatccttggcagagtgatttactctttaagaaccgctgttgatcacggtctagtcgagaacagcggcatggccatgaaacaggatggtccagtactggcagttgagcttgatgtggaagagatggcgaagaacattaagccctagacagttgatgttttcgacatgctgcgctgtaactcaccgtcacaatggatctttttttgttgttgtttatgatctgttgcttcaagtagaactgcattggaatgttttttcacggtttgcctttggagcagtcaataatggtcttgacagat

SEQ ID NO: 274 - DNA, 1051 bp, Zea mays
  Clone ID: 700051863_FLI
ctgagatcgtccacggcgacaagacttacactattaccgaggccaccaccctcaccatcactgattgcccttgcactgtcaccaagcctgtcatcaccacctccgctgtcgtctgccacgactgccctgctcctcccgcccaccacggcaacaactccaccctggtccccgtttaccctaccggtaagcccggccacggtggtgagagcggcaagcctggctctcctgctggtcccggtgctacccccaccgctggtgctccttccgaggtccccaccgcgggtgccggcaaggtcgccgctctctccggtgccggtctcgctgcggtcgtcggtcttgctgctttcctgtaaatcaacagctagcaagcctgctccacgtcgtgcctacgatgctttacgctcagtaatacttaattcacgtgggggcttccgtcattcctgatggagtggtgtggaacagttagcgatggtttggtttcagttggggatgcaagcgatctttcggggaatgtatagaactttttattttgggttacgaacatacgtcacgggagaaccggtatacccttgcaacgctctatggagtcttgtctaatgatggccacgctttgcaggagttgagacattcttgtatatgagttttgtctcggtgttcggaaggagctcgcatattccctgtgtgtgagatcttctttcggggctgggaatataatgtgttttattgccttgagcaaaacaggacgatcttgtctagcttcactcgcggttcgtctttgtttctgctcccatcaataacttcaagagacgcatttccaacctcgaatcccgtttcctcttcttgatacatatttttgggttgccaaacgtctttaatatttgcggtcaggttactggtgcatatatatatatatatatatacacaaagccgggcgtgtttatggtctcttgtcaatcagattcaatgttattgcgagcctctgggaaaccatgtatcatagtcaaggcaaaagcaagcattgctgagaggccagttttggtccggcattatt

SEQ ID NO: 275 - DNA, 937 bp, Zea mays
  Clone ID: 700051881_FLI
ccacgaagttgtggtaacatggggctcaccttcacgaagctcttcagccggctcttctccaagaaagagatgaggatccttatggttggtctcgatgcagctggtaagaccaccatcctctacaagctcaagctcggagaaatcgtgaccaccatccctacaatcgggtttaatgtggagactgttgaatacaagaacattagcttcactgtctgggatgttggaggtcaggacaagatcaggccattgtggaggcactatttccagaacacccaaggccttatctttgttgttgatagcaatgacagagatcgtgttgttgaagcaaaggatgagctccacaggatgctgaacgaggatgaattgagggatgctgtcttgctcgttttcgcaaacaagcaagatctaccaaatgcaatgaacgctgctgagatcaccgataagcttggtctccattccctgcgccaacgccactggtatatccagagcacttgtgctaccacaggagaaggtttgtacgagggtcttgattggctctccaacaacattgcaaacaaggcctgaatggacaattctgctgtttcacggagcacatctgcacatggcgaggcatggtcattttgaccctcagacgatcattgtttcattggaaagtatcgtatttctatgctaggcttttcagagagattactctctaagaaactgatccgatattaagacactataattggcattggcactagtagatcgtttactgagtaatgcagtttattttaatgtatcccaattgtgttgtaagatacaactatgcgtcggaattacccattcaatttgaatctagatacgtagtttttgttatatacttatacttggatatatattgtttaatacatggtaaaagtaacatatcaagaaaaatattttataatttgaagat

SEQ ID NO: 276 - DNA, 1212 bp, Zea mays
  Clone ID: 700051884_FLI
ggagatcgagacagctagcaagcaacaagcaagctgaaatggagcgctactcttgctgccgttgggtgcttgcgtgttctatccttgccctgtgcctcggtgggcagggcgcgaggtgccagctgacgtcggatttctacgacagcacctgccctcagctgtactacgtcgtgcagcagcacgtgttcgacgccatgagagaggagatgaggatgggcgcctccctcctcaggctgcatttccacgactgctttgtcaatgggtgtgacgcttcgatccttttggacggcgacgacggcgagaagtttgcgctgcccaacctcaactccgtcagagggtacgaggtcatcgacgccataaaggctgacctcgagagcgcgtgccccgaggtggtgtcgtgcgcggacgtcgtagccctcgcggccagctacggagtactcttcagcggagggccttattacgatgttcttctcgggaggttggacgggcgggtggccaatcagtccggagccgacaacggtttgccgtcgccgttcgaacccgtcgactcgatcatccagaagttcgccgccgtcggcctcaacacgaccgacgtcgtggtcttatcaggagcccacaccatcgggcgagcccggtgcgcgctgttcagcaaccggctgtccaacttctcggccacggattcagcggacccgacgctggaggccagcctcgccgacagcctccagagcctctgcgcgggcggcaacggcgacggcaacgagaccgccgcgctcgacgtcagctccccctacgtgttcgacaacgactactacaagaacctgctgacggagcggggcctcctgtcctccgacctgggcctcttctccagccccgaaggcgtcgccgccagcaccaaggatctggtggaggcctacagcagcgacggcgaccagttcttctacgatttcgtctggtccatgatcaggatggggaacatcccgctcgccgccggctccgacggggaggtccgcaagaactgcagagtagtcaactaaatagcatgtggcgatcagcaaatttcgatcgccgttcactgttatttatttattgtgtgtgtgtgtgaggggtacttgaactgttaagagtcacctatatatgtaatgaaaggtttatgggcgcaacgttgagcagctacatgcttacgaagatgaggaataagaattgtacactgcc

SEQ ID NO: 277 - DNA, 951 bp, Zea mays
  Clone ID: 700051889_FLI
cccgtgcccatcatcgccgaggtggacctgtacaggttcgacccgtgggacctgccggagcgcgcgctcttcggggcccgggagtggtacttcttcacgcccagggaccgcaagtaccccaacggctcccgccccaaccgcgccgccggcgacgggtactggaaggccaccggcgccgacaagcccgtcgcgccgcgcgccgccgccgccgacgcccgcacgctcgggatcaagaaggcgctcgtcttctacgccggcaaggcgccgcgcggggtcaagacggactggatcatgcacgagtacaggctcgctgaccccggcggacgcgctaagaaggggtcgctcaggttggatgactgggtgctgtgccggctgtacaacaagaagaacgagtgggagaagatgcggctggggaaaggggcagccgccggcgtcatcggcgcagccaaagaggaggaggccatggacgtgagcatctcccactcgcagacccactcgtggggcgagacgcgcacgccggagtcggagatcgtggacaacgatccgccgccgccggcgatgatggtgcccaagaagaagcgggtggacgacggcggcagcgccaggaccagcgacctgttcgtggatctcagctacgacgacatccagggcatgtacagcggcctcgacatgctgccgccggccggcgaggacttctactcctcgctcttcgcgtcgcccagggtcagggggaaccagcccaccggagccgcggggtcttgggccccttctgagtgagctcaggcgaggatggaggcatggagatgaggagagaagacggacggcgttgcgaactctgtaaatacaggcagcataggaggagtcgaacctgactggacctggtcggggttacaagtcgagtgtgtcggtgtttcgtacatggtacatacagagaacatattctttgcaatc

SEQ ID NO: 278 - DNA, 1309 bp, Zea mays
  Clone ID: 700051902_FLI
gttgggggatgccacactagctcctcacacatggacgatgagtggaggccggtgatggccatgctcgtcttcaacctcatctctgctgtgatgacggcgctggtgaagaaggcgctccagcaagggctcaacgccctggtcctcatcactcttcgccagttggtggccactctcttcctagcaccaatagcctacttcaaagaacggaacacaaggcctaagctcacgctagagatctttgtgtaccacttcttcagtgcagcgcttggtgcttccctgtcgcagtacagcttcttctacgggctcaagttgacgactgcgacgttcgccataacatttgccaacatggctcctgtcctcaccttcctcattgccatagctctacgggtggagtcgctcaacatgaagagcaaatcagggtctgcaaagatggtggggacgctcatgtcgctcggtggagtgctgctgctgagcctctacaagggcatggccgtgacacaccacagcagcggcactcctccgccctctcaagtacaactaggcaacgacggcgacaggaaggtctggatgctggggactgtagcgttactggccaactgcctcgtcttctccctgtggttgctgctgcaaagcaggctgacgaacaagtacccggcgctctactccagcaccgccttcatgttcttcatcagcacgctgcagacaggatcgctgacggtgacggtcgagtggcaccacgcgtcggtgtggattgtcacaaagaagctggagatggtcacgatattgtattcgggaatcatggcgtctgcagcaggcttcctgataatgacctggtgcgtccacaagaggggtccagttttcactgcagccttcatccccatcgtccagatcatggtggccatcatcgatttcttcttcctccatgagcagctataccttggcagtgttctgggatccgcgctgatgatatttggactttaccttctgttgtggggaaagaagaaggatgcaatggcggcatgctctgcaggtacgaccaaacatgacgaagaggccagcatcaacaagtagcttagtgaaataatcagcagtcagcatcatcgagtggtggcaaacacagacatgtactagtggcggcatctgcaattgtttgaagaaaagaaaatctacgatcgatccagaccccttttgccatgcatgcatgagatgtgtttccagcaacactaattaacagaactgccgatcgatgatatcacgagtttattgttcataaccacttgtcaataaaaacttttgcttttatatagtc

SEQ ID NO: 279 - DNA, 640 bp, Zea mays
  Clone ID: 700051909_FLI
caggggcaccgtccgccgcttcctccgcaacgtcttcgcctgcttcgggcgcggccacgcctcgtcctcctcgcgctcccacgccgtgcctgagctcaacgacgacgcgttcagccatgggtccaggagccggagcaccagctggaggctcgaggacgggcatgccgacgccacggtgcagagttgacggacgaaccaactcctgctgcctgcctccctgtctctagtacagcacgctgcaagaagcgaatcttgttgcttttgtttcataattcattcgtcttgtattgtgtttaccatactgctgctcctactcctgcctgctacttagaagaaaaagaggaaggggaaggggaaggcgaaggcgaaggaggaattggaggatttgtagaacaggtcgattgcaaggagaccatgcaagggttttcattgtaggtgggggattgtttttttttttttttttgcttcttctgtagctgtatgtatccatgctagtcctatcctttcctatgttgcagcaggatacttgtgctggctgcttgcttggcagggcagcggcatcactgtcccggccgttgtctgtcctggcttggcaatgaagcagcagagcacagaaagtcagaaagtggcatccccatgg

SEQ ID NO: 280 - DNA, 760 bp, Zea mays
  Clone ID: 700051948_FLI
ggtccgccatcgccgccaggctgcccgggcggacggacaacgagatcaagaacgtctggcacacgcacctcaagaagcggctggagcccaccaccaagcagctggagcaggagcagcacggggcgcatgcaggtggtggcgccgccaggaagcgcagcaggcccaagcgcgcgggtgccaggaagacgacgacggccgccgtcgccccggccaccaccgcgccggcgtcgcctgaacggtcggcggcctcgtcgtcggtgaccgagtcgacggagcaggagcagggaaacacggggacgagctcgcccgggttccccaaggaggagagcttcacctcgtcctcggaggccgccgaggagttccagttcgacgacacgttctggtcggagacgctgtccatgccgctggacagcttcgacgacgtccccatggagccctgctccggcgcgttcggcgacgtggccgcctcctcctcctcgtcgtccgttggcgccgacgccgacttggactactggctcggagtgttcatgaagtccggcgacgcgcaccaacaactgccgcaggtttagagcgcgcacgcgcgcccgagaattttcagttccctggctaattgattcatcgttctttctctctccctgcacgtcttgcaatcggaattcggaggggacagtcacaatagcagctaattaatagaggggtgtgtgtgttgaggaccacgacgagattaggaagaaacaacgcgacatgccattgcatcaac

SEQ ID NO: 281 - DNA, 1886 bp, Zea mays
  Clone ID: 700051950_FLI
atcaagctgcccattccctcgtgacagcagctgcctgcctgctccgaggcgccacccagctcttcctcgccccagcagccgcttcccgagatccttttcactttcaccaccagggtacatagaccgcatctgcggtgctctgcgctcctcggactcgatttgttggttcatccatccagctgccgccggacgtcgatcagctacctatcttgaaaccacaggaccgagcgtggaaactcccggaccggacattccattttccattccgaagggggggtgagaaggcggggaatgagtacaaccaaggtgaagagacgtgtgggcaagtatgagctcggccggaccataggcgagggcaccttcgcgaaggtcaggttcgcgagggacacggtcaccggcgaggccgtggccattaagatcctggacaaggagaaggtcctcaggcacaagatggttgagcagatcaagcgggagatctcgacgatgaagctgatcaagcaccctaacgtcgtccgcatatacgaggtgatgggaagtaaaacaaagatctacattgtgttagaattcgctaccggtggcgagctctttgatacaattgttaaccatggtcgaatgagggaagacgaggcaaggaggtacttccaacagttaatcaatgcagttgattattgtcatagcaggggtgtgtaccaccgggatttaaaacctgaaaatttgctgcttgattcatatggtaacctgaaggtctctgactttgggctcagcgcgctatctcagcaaatcaaggatgatggactgctgcacacaacttgtgggactccaaactatgttgcaccagaggtccttgaagatcaaggctacgatggagcaatggctgatctgtggtcatgtggagttatcctgtttgttctgctagcagggtatttgccgtttgaggattctaatctcatgactttgtataagaaaatatcaaatgcagaatttacatttccaccatggacatcttttcctgccaagaggttgttaacaagaatccttgatccaaatccaatgacgagaataacaatcccagaaatattagaggatgagtggttcaaaaagggctacaagcgcccagaatttgatgaacaatatgacaccacattggatgatgtggatgccgtcttcaatgattcagaagagcaccatgtgacagaaaagaaagaagaagaaccagtagctctgaacgcattcgaactgatttcgatgtcagcgggcctaaaccttggaaacttatttgactcagagcaggagttcaaaagagaaacaaggtttacatcaaaatgtccccccaaagaaattgtccgcaagatcgaggaagctgcaaaacctctaggatttgatgttcagaagaaaaattacaagttgaggctcgaaaaggtaaaggcagggaggaagggaaacctcaacgttgctactgagatactgcaagttgcgccctctctccacatggtagaagtccgaaaagcaaagggtgacactctggaatttcataagttctacaagaacctttccaagaccttgaaggacgtcgtctggaaatccgacgatcttcaaacgcaacatgcttcttagcagaacctcagagaggaggaatggcaaactattttgtgcaccatcctttcaagcaaactattctgcatgtaacggtgggtgcccaggaaattgcgctggtgctccaccatcgttgtatatgctgcgtcttgagttgcttgctgtagctgaagggaagttcattcagtaggttttgagtatgagttttgtatatccgtatatgcctatgactatgagccgtgctggaacactatgatcagaaactgcgaaatggagcccagaatgttcttgcc

SEQ ID NO: 282 - DNA, 1250 bp, Zea mays
  Clone ID: 700051980_FLI
agcacgccgagaggtacttccctctcagcagcagcggcgccggcgacaaaggcctcatcctgtgcttcgaggacgacgacgacgacgaggctgccgccgccaacaagccgtggcggttccgctactcgtactggaccagcagccagagctacgtgctcaccaagggctggagccgctacgtcaaggagaagcagcttgacgccggcgacgtcgtgcgcttccagaggatgcgtggtttcggcatgcccgaccgcctgttcatcagccacagccgccgcggcgagactactgctactgctgcaacaacagtgccccccgctgctgctgccgtgcgcgtagtagtggcacctgcacagagcgctggcgcagaccaccagcagcagcagcagccgtcgccttggagcccaatgtgctacagcacatcaggctcgtactcgtaccccaccagcagcccagccaattcccagcatgcctaccaccgccactcagctgaccatgaccacagcaacaacatgcaacatgcaggagaatctcagtccgacagagacaacaggagctgcagtgcagcttcggcaccgccgccaccgtcgcggcggctccggctgttcggcgtaaacctgactgcggcccggggccggagccggagacaccaacggcgatgtacggctacatgcaccaaagcccctacgcttacaacaactggggcagtccataccagcatgacgaggagatttaagattatgcctgcagaatccaaacagccaaagtagtagcagtagtagttgctagcagcagcagcagccgcctagtactacttgcacacgaagtgacaggattgaattgacctgtacacggggagaaaaaaaaaggaaggaaggaagtggagagagatcccttgtttcccgggcaatcttccttccatccccgcccccagaagaatgctgctgcctttttgctgttccgtttttttttttttaatttttattttcttctccatggcttccagaaaaccctacttactgtaggggatctggtagcagggggccgggcatgcgtgggaggtttgcaggaagcatcaagctgccaaggagctggaacgagagacaacagacagagagagatgtgtgtgtatgtatgtgtgtgtcatctgtacctatatgtcttaatttgtgggtccgatagagaacaaactgtgaagttgatgtgtgtgcctgcctgcctcctgaagaaacaatgcaatatccccatgg

SEQ ID NO: 283 - DNA, 838 bp, Zea mays
  Clone ID: 700052124_FLI
catcaacacctttggttgagctcgctgcaactgtcggcacaagtgaacttgccattggtgctgagttcgggtttgatagtacttcagctgctgttaccaaatacaactcaggggttggatacaacaagtctgatttctctgcttccttgctacttgctgataaaggggagactttgaaggcatcttacgttcatttattcaatccgaccaacggggctacagttgcagctgaggtaacacacaagctgaaaaccaaggagaactatttcacacttgggagctcccatgcacttgatccttcaacattgctaaagacgagattcagcaactcggggaaggtcggtctgctctgtcagcatgagtggaggccaaagtccctcgtgactctttcagctgagtatgatccaaaggtggtaagtgcgccttcaaggatcggcgtggccatatcgctcaagccttgagatatgggtcaagtcaccttctgtaaaacagtacaagcgttacgtactgatactcgtgtccaagaacataaacttttggagcgatacctagaacaaccctctccattttagccttgtttttggtaagagccttgggcaaagaagtgttgtcagggagttggacttgttttgtggaatgtttccattaagagccaaccccacaccgaggattgcaaacacagaagtttgtattagtgcagaagtttcactctgcgatattttttccccatgttttcctattcgacgcaaaatgattttggaggtgattgaacacctaacgtcttgagttgatggtagctttaacagctgtgatgataaaggggccacttgtacccagc

SEQ ID NO: 284 - DNA, 583 bp, Zea mays
  Clone ID: 700052149_FLI
cgaacagaagctctcgatctcaccgacaccgaggaagaagagatcaatggcgtccgagcagggagtcgtgatcgcgtgccacagcaaggctgagttcgacgcccacatgaccaaggcccaggaagccggcaagctggtggtcatcgacttcactgccgcctggtgcggtccatgccgcgccatcgccccactgttcgtcgaacacgccaagaagttcactcaggtcgtcttcctgaaggtggacgtggacgaagtgaaggaagtcaccgcggcctacgaggtcgaggcgatgccgaccttccacttcgtcaagaacggcaagacggtcgcgaccatcgtgggtgccaggaaggacgagctcctggcccagatcgagaagcatgccgcgcctgcgcctgcgtctgcgtctgcctaaaggagatcagtcgtcgccgtcaataagggccagcacgtatggctgtaaatgttgtcgttatcagttctggctttgtcgtttgtgggcgattgtgaactagtagtatgtttgtttctatccgagccggaggcgatacttaaccatggatacttgttgtgagttcgtttc

SEQ ID NO: 285 - DNA, 951 bp, Zea mays; identical to SEQ ID NO: 277
  Clone ID: 700052158_FLI

SEQ ID NO: 286 - DNA, 786 bp, Zea mays
  Clone ID: 700052216_FLI
agccagggtttcttcggaggctttatttatcgtttatccacggaacttccggtgccggcggcgaccacttgtggcgatccatccctcaccatgtcgtcggagaaggaggcggcgctcgccgccgtgctcgatgacagcccaaccatatttgacaagatcatcaaaaaggaaataccttctactgtggtttatgaggacgagaaggtactggctttcagggacataaaccctcaagctccaacacacattctcatcatccccaaagtcaaggatggactaactggcctggcaaaggctgaagagaggcacatagaaatacttggctatctcctctatgttgccaaggttgttgcgaagcaggaaggacttgaagatggctatcgcgtcgtcatcaatgacggcccaagtggatgtcaatctgtttaccacatccacgttcatctcctcggaggcaggcaaatgaactggcccccaggctaagaatatcttgtgattgatcagtgctaatgccaaggactgctactccatttctctagaataatccctgtaatttccataaaagctagtgcgcagtgcgctgaccttgtgctatatttgtggaattaccggaagcatgctgctgtgatctatgattggacacaagaaacttgtaactggtactcctatcatcgattgacttgtccttattgatcagctgatgggggttgcccactggccttgctgatctgcagaatcttcttgccagtctttctaccttttttttaatctaagaacaatagcttcgat

SEQ ID NO: 287 - DNA, 994 bp, Zea mays
  Clone ID: 700052228_FLI
gccaaaaaggccaaacctgacgtaacatcaccaataggttctttatcagaacacaaaagaagtttaccccctgaaaagcataccaatgataggttgaacaaggagacggggaatgttagccgtgatgcttcacgagatagcagtcctgccatgaaaggaagaccttcagctcctggaaatttacagaggatagatcagagcccaaatttacctatcccaacaatgcattctgagggaacaaaaggaaatgctgttaaatcaagttcaaagaaaaaatcagataagatgcagaaaccatggcatggtattgatggtgactttggctcatgttattcacatggtgtagatcaccatgccaattttgatggctctgatgattcttccacaagaaaaaggagtagacatgagaatcctcttattgatgataaaatgcttaagcattcgaaggacactaatgctaatataaattccatgaatttaaccaaaagttccagagaaattgttgtgcctgatgaggtaactgcttttcctgaatctaatgaaagtaatggtgagccatcaaattcacaaagagataatgttgagaaatcaccttatggtaaaaaaaagctccagagagagctttctgatcttgagttgggtgaacttcgcgagacttctttggaaaatgatgatggaaggataaggaagcaatttgagagaaatagttcctccaagtcgcttgatgctaaactaactggtgtaaataacttctaccccagtataaatgacaggaagactcctgtaaccgtctttcatgataagaggaaaccttcacctcaagaatatggaaatagaggccatgtaaaccaggaagggtttcagaggaaggcagcagtgtacgcgtttgatgataataggcctcaacaaagagagaattttccagagagcctgcatttgccaaagattgataattcagattctgagaacataatgtatccagataggtcaggag

SEQ ID NO: 288 - DNA, 678 bp, Zea mays
  Clone ID: 700052230_FLI
atcgaatcgtctcgctagtggctgccctactcgtgctgcttgccctcgccgccgtttcctccacgcgcagcgcacaaaaggagtccgcggctgacaacgccgggatgttggcaggcggcatcaaggacgtgccggcgaacgagaacgacctccagctccaggagctcgcgcgcttcgccgtcaatgagcacaaccaaaaggccaatgctcttctggggttcgagaagcttgtgaaggccaagacacaagtggttgctggcacgatgtactatctcactattgaagtgaaggatggcgaagtcaataagctctatgaagctaaggtctgggagaagccatgggagaacttcaagcagctgcaggaattcaagcctgttgaagagggtgctagcgcctaaggatctgtcgtctccctgtgcaatttgctgcctgaagcgcaaaactaagttgcagaataaggagctgcttcggaacatgccagagcatgcaccctcgcgtattttcataaaatcagtgctcttaatgtaatatcttgaattgccgtgccatgtgtaataagtaatatcatgaataacagttgctattatgggttctaaatgtgtattaacagccatccatggcagagttctcatattactttgctgaagtctttgttggaatatacatgacagaattctc

SEQ ID NO: 289 - DNA, 702 bp, Zea mays
  Clone ID: 700052243_FLI
agattatcgaactaccaactcataggtttttcgtcggagcacagtttcaccctgaattcaagtcaaggcccggcaagccatctccgcttttcttaggattggtagcagcgtcatcaggccagcttgaccacttgctccaacgtggccttaccagttcagcaggcagagacatctgcggcaaagggggagcgcagaaaccaaaagcttgccagaacgggcatgtcatgaagccactgaatggcctggtgcacgggcactattcagcgactcgctgcaatggcgtcattcccatctagcaggctgttttcgcttgttctttttctttccgttctacctacctgcagggcaaccaggaagagaagggctgtttgctctagcgacacggcagccgtttccgatgttttaacgaggaagcaattggcatgcaaagctgtcgcgcgcattaagaggcaaatctagcagcttattagctagggttcgattagtagtagtagtaatccgatgttgctggtttatttgttagtttgtttgctaagaaagattacaagggttagtgatgtgcagctagctccagtgtagcctgccgtctcgccccatttgtacattgtaaaaccactgctactctccatgattgactgaatggatgagtataaacgtattggaccaacatgctcggtgttataaaaatctaagttgcaatcc

SEQ ID NO: 290 - DNA, 1613 bp, Zea mays
  Clone ID: 700052248_FLI
ctcttctccctcttgccggtcccgaataaagagcagcagcgcaagaggtcggtagagcgagaagaaggcaatggcggccgagagcttccttttcacctcggagtccgtgaacgaggggcaccccgacaagctgtgcgaccaggtgtcggacgccgtgcttgacgcatgcctcgcgcaggaccccgacagcaaggtggcctgcgagacctgcaccaagaccaacatggtgatggtgttcggcgagatcacgaccaaggcgaccgtggactacgagaagatcgtgcgcgacacctgccgcgagatcgggttcacctccgacgacgtgggcctcgacgccgaccgctgcaaggtgctggtgaacatcgagcagcagtcccccgacatcgcgcagggcgtgcacgggcacttcacgaagcggcccgaggagatcggcgcgggcgaccagggccacatgttcgggtacgccaccgacgagacccccgagctgatgccgctgagccacgtgctggccaccaagctgggcgcgcgcctcacgaggtgcgcaagaacggcacctgcgcctggctgaggcccgacggcaagacccaggtgacggtggagtacgtgaacgagggcggcgccatggtgcccgtccgcgtgcacaccgtgctcatctccacccagcacgacgagaccgtcaccaacgacgagatcgccgccgacctcaaggagcacgtcatcaagcccgtgatccctgagaagtacctcgacgagaagaccatcttccacctcaacccgtccgggcgcttcgtcatcggcgggccccacggtgacgccggcctcaccggccgcaagatcatcatcgacacgtacggcggctggggagcccacggcggtggcgccttctccggcaaggaccccaccaaggtggaccgcagcggcgcctacgtggccaggcaggccgccaagagcatcgtggccagcggcctcgcccgccgctgcctcgtgcaggtgtcgtacgccatcggcgtgccggagcccctgtccgtgttcgtcaactcgtacggcaccggcacgatccccgacaaggagatcctcaagatcgtgaaggagaacttcgacttcaggcccgggatgatcagcatcaacctcgacctgaagaagggcggcaacaggttcatcaagaccgccgcctacggccacttcggccgtgacgacgccgacttcacctgggaggtggtgaagcccctcaagttcgacaaggcatcggcttaaggttgggagtgtcactgtggacatgaggactaccttcctctggctctgctgttacctgcaagcattgctgctgctggatgtgtgtgtttgatcagtgactggctgctgctccatagaagatgaacggagagaaggatgatgaagggctttggcaatcgccgctgcaactgcaacccatgccatgccggcttagtgattgggtataatttggcttggcagcagccagcattattatgtgctgatctgttatcttttactagtttggtcgtccgatatctttctttctttttccccccttttcgactctgtactgaaactgctgagagattcgcagtattgttgtatcgtattcatatgct

SEQ ID NO: 291 - DNA, 1792 bp, Zea mays
  Clone ID: 700052292_FLI
tttggccataatgaaattgatgagccgtccttcacccaacctaagatgtacaaggtgattaggaaccatccaagtgcgcttgagatttatcaaagaaagttgttagagtctggaaagatctcaaaggtagatattgataagttaaacaagaaggtcagcactatacttaatgaggaatttcagaacagcaaggactatgttcccaacaagagggactggctttcagcttactggactgggttcaagtcaccagagcagatttcgcgtatccgaaacactggagtcaagccagagattctaaaacgcgttggggaagccatgactactctgccagaaaatttcaatcctcacagggctgtgaagaagatttttgatcagaggcgtcagatgatcaagactggagaaggcattgattgggcagttggtgaagcacttgcttttgctactcttatcattgaggggaaccatgtcaggttaagtggtcaggatgttgagagaggtacatttagccaccgtcattctgtcctccatgaccaagaaactggagaccagtactgcccactggatcatcttgttatgaaccaagatgaggagctttttactgtgagtaacagttccctgtcagaatttgctgttttgggctttgaattgggttactccatggagaacccaaactcattggtcatatgggaagctcagtttggtgatttttccaatggagctcaagtgatatttgatcagttcctgagtagcggggagtcaaaatggctccgccagactggccttgtcgtttgtcttcctcatggatatgatggccaggggcctgaacattctagtgcaagattggagcgctttcttcagatgagtgatgacaacccttatgttatacctgagatggacccaacactgcggaagcaaatccagcagtgcaattggcaggtcgttaatgtaacaactcctgcaaattatttccatgttctgcgtcgccagatacaccgggactttaggaaacctttgattgtgatgtccccaaagaacctccttcgccacaaggactgcaagtcgaacttatctgaatttgatgatcttgcgggccaccctggattcgacaagcaagggacacgctttaagcggctcattaaagaccagaataatcacaaggacctcgaggagggaattaaccgtctagttctttgctctggaaaggtgtactacgaactggatgaagaaagaaggaagacggagcgcactgatgttgctatatgtagagttgagcagctctgcccattcccctatgacctcatccagcgcgagttgaagagatatccaaatgctgagatcgtgtggtgccaggaggagccgatgaacatgggagcgtacagctacatcaacccccggctgctgacggcaatgaaggctctgggccgtggtggcatcgaggacatcaagtacgtcggcagggccccgtcggctgctactgctacgggcttctactcggtgcacgtgcaggagcagacggagctggtgcaaaaggccctgcagcgcgaccccatcaactacccgttctgaaagaaacgagacccctgtaaattcttggaaaattgggcaccttttgattttgatatacctctatagagagagcaggccttaaggtatgcctgtgctgctgtgcagccatttgttgaaataatcgtttcggactctacagtaccgcattatatagtatataatttcatgataaatattgtataagtaattattgattaattaatattatttactccctccgtcc

SEQ ID NO: 292 - DNA, 1798 bp, Zea mays
  Clone ID: 700052368_FLI
ccgcccgctaattcctcctagttctagtcccctctctcctgcgccgactcatctttttcctcgtgtcactcccctgctgctgctgctgccgggaagatcaaatcccgtcaaaaggctccaaaggatcagagttctgtcaagatggcatgcccaagagctccagcagtggaaggttcaggtgtaagtggcgttctttatgctgtggaacctaaggatgcatgcagtccattgagagcgaaagcgattcaaggctctgtctcaccttttgcgttgattataagaggcggttgccaatttgatgacaaaattagaaatgcacagaatgctggattcaaggctgctgtagtatataataatgaagataatgacatccttgtttcaatggctggaagctcgcttggtgtccagatatatgcagtgttcatctctaaggcatcaggggaggagctgaagaaatattcaggccaaactgatgcagagttatggataataccaacatatgagaactcagcttggccaatcatggcaatttcattcgtatcactgcttgctatgtctgctatcctagttgcatgtttctttgcgaggagacaccagatcagacgggacagggcaagacttccccgagctcaggagtcccatggaatgagcagtcaattagttaaggcaataccaagccttattttcacaaaagtgcaagaagacaactgtacatcagcaacatgcgccatttgcttggaagactacagtgttggagaaaagataagagtgctaccttgtcgacacaagttccatgcggcttgtgtggacctatggctcacctcatggagaacattctgccctgtatgcaagcgggacgcaagtgctggaacgtcagacccccctgtatcagagtctacccctttgctttcatcatccgccacacgcttgccggaatcaactgtgttggcttccttgcggtctacagcagcagcgtctccccccaggacgatcagccggcatcctttgttgcggtcaatatcccgcaattactctgtttcaggttccagtatccttcgcacccccgactctaggtttgatgcaaactcatctatctgcacaagtggaagcaacttggaccttgcaaatgtaccatccccatggtctggcacttggcaccgtgcgtctgctcactctttgtgcaggggctacttgtccccaccgatcggcatcaggaatacctcagcacatgtctcgcgttctgccaatggatctcccagtcgttacgtaggctcatcacgcatgtcccatggatcttcagggcagcagcatcctcacctgaggcactgcacattgtcaggcccgagcctgttcaccatggtgccccagtcaccgcaacagaaccagttgcagcatggtggatactcggaaacaaatctgtcggctgccgcatcggctcaatcattccgtcagctctacctgcagcattgccctgattctgacacgtcgtctcagtcacttccagggtgctgatctcttgctgcaatattcactgattcttgcgcccatgagaaatcttgcctggtgctgaattgacatgtggattttgagctcgtcagcatagttcaccatgatgataaaaaaaagagaaagaagtttggagtagttttacatgtggaaacaaaactgcttgtaagaagagagaatgtgcagccccagagtgtgagcaattttacatgcttgagtgtacaggggtttggagtagtcttggacttgcttattttgaggcatgtattgcagtcataggttacttctgctc

SEQ ID NO: 293 - DNA, 867 bp, Zea mays
  Clone ID: 700052387_FLI
aattcagctacgttgaacctgcggaacacaggcgcccacggcccacgagatctccgtaagaaggcggaacctgtagaagacatggccggcgagatgagctgggtgggcaagaagatccacctctacaacgtcaccatgggcctctacatgctcgattggtgggagcgctgcctattcagtatccttccgccgtgtcttgatccaattcagtttatgtattactgtcccctttgcagattccgaccttgcttttctcgacttcgtcatcaactaaggcttatgttagatccccgtctgattctggcggggtatctttgcctctgtcccggcagggcttaggtttgggtaggcacttgttggatccgttctttggggaaacgttttgtcggccaggcaatccgttgattccgcgttcggcgccagcatttcttcgaatttgttgggcaatgtttctgatccggtgttcctttcgaagtaactggattttatgttcatcctttaactagagtagacatactggtgctgatcctgctctggttcatctgcttcaacggatcccgcttcgccactgatgtctacgaaagccacctgaaggcacggattttccaaggcgcaaattacggcatgggaattggcatgccctcctcctaagccttcaacgcaaaacacagaagcagcaaaatctgctagttctggaatctgaactgggttccaacaagctgtagtgatgtgtatgatgtagttccaatatgtaagattcttaacattattctttattttaatgtactttgtgtaagtgtgtaactaaggtttgagcgcacgatatcacatcctgagttctactgtaattatatccatttccttggt

SEQ ID NO: 294 - DNA, 444 bp, Zea mays
  Clone ID: 700052490_FLI
caataagcaagcttcaggctgatctccccattgccaggaggcactctctccagcgcttccttgagaaacgtcgtgacagggtcgtgagcaaagctccgtacagccccgccaagtcgttcgatggcatggagtcagcgggaatggagatgactgcggacggcaagcagggcgcaaggcccagtatcttgaaaggttggggagccgcgaagtctgaagtctgaacggtgaaaggctggctgacgctgtggggaggaagggacagggacgtgctgttggttttattatattggtatttatgttattatatactgtatgtggtagcagcagcgtggaaccgcactaataatggggaccttaacacctctattttactgtcgttgctttgttgtcgcgtgctaggttgtattctgaagtggattcctcaataccgcataccgtactgct

SEQ ID NO: 295 - DNA, 1053 bp, Zea mays
  Clone ID: 700052493_FLI
ctcagcctcatgctcaactccgtcggcttctaccagatctccaaactgagcatgattccggtggtctgcctcatggaatgggtgctgaacagcaagcactacaccaccaaggtcatctcggcagtggttgtcgtggccgccggtgtcgggatttgcacggtcacggatgtcgaggtcaatgccaaggggttcatctgcgcttgcgtggcagtgttctgcacgtcgcttcaacagattacaattggttcctttcaaaagaagtacaacattgggtcatttgagctgctgagcaaaactgcaccaatccaggcaatttcactcattatactgggcccctttgtggactactatctaaatggacggtcattgttgaactaccctttttcgggaggggcaactttcttcatcttgctttcctgctccctggccgtcttctgcaacatgagccaatacctatgcatcggccggttctcagcgacctcgtttcaggtcctgggccacatgaagaccgtgtgtgtgctgatcctcggctggatcctgtttgactcggccctcaccgtgaagaacatcctcgggatgctgctcgccgtgatgggcatggtggtctacagctgggccatggaagcggagaagaaggcggcagcccctgtcccccggatcaagagcgaaatgctcgacggcgaggacgtacccctcaaggccagggtgagcggcgtgcccgcggtcgacctcgaggacggcgagatgaagagctagctgctgctgccgccgctgattcgttcattcttcttgttcttttgtaactgtgcgcgcgcgatcgctcgatccaaagttgcttgtccgtcagctctcagctatcgacactacactgttaattttggccccttgttggggagagtccagttcctaggtgacgacgaccacccccagttcggcgtagatcaaacacacactagcagaatgcagatttttaggatttttttcaggcggcggggtggatccattcattgtcatgttgacaagactcataatagaaatacaggtaacatatgt

SEQ ID NO: 296 - DNA, 2682 bp, Zea mays
  Clone ID: 700071604_FLI
cagaaattcttcctgactctactgtttctcagccaaaaccgcagaagactttgtcaggccaatttaggataggggggatgacttgtgctgcatgtgtgaactcggttgaggggatcttaaaaaaattgccaggtgtaaaaggtgcagttgttgcattagcgacctcattgggtgaagttgaatatgatccttctgccattagcaaagatgaaattgttcaggccatcgaggatgctggttttgacgctgcactgttgcaaagtagtgaccaagacaaggtcctattaaatgtccaggggttacatttcgaggaagatgtagatgtattgcatgatatcctgaagaaaatggaaggcttgcgtcagttcggtgtaaattttgcaaactcagaagttgacattgtatttgaccctgaagtagttggtttgagacagattgtagataatatcgagacggagagcaacaataggctgaaagctcatgtacagaatccatatatacgagctgcatcaaatgatgcgcaagaggcctctaagacgcttcatcttcttcgctttagtttattcctaagtattcctgtatttttcatccgcatggtatgccctcgcatacctctgattagttcattcctacttatgcactttgggccatttcgtataggagatctgctgaggtggattctggtgaccatggtacagtttattgttggcaaacgattctatgttgcagcttatagggccctaagacatggctctacaaatatggatgtcttagttgttattggcactactgcttcatatgtctactctgtttgtgcacttcttatggggcattcactggatttcatcctccaatatattttgagacgagcgcaatgataattacatttgtgctatttgggaagtatcttgaagtgctcgcgaaaggaaagacatcagatgctatcaagaagcttgtagagcttgctcctgctacagctattctacttctgaaggacaaagagggaaaatattcaggagagaaggagattgatgcatcgttagtacaacctggcgatgcgttaaaagtgcttcctggttcaaaggttcctgccgatggtatcgtcatttggggtacaagtcatgtcaatgagagtatggtaactggtgaatctgtaccaatctccaaggaagtatccagtctagtcattggaggcacaatgaacttgcatggtgttcttcatatacaagcgacgaaagtaggatctggaacagttttgagccagataatttctctcgtggaaaccgcccaaatgtctaaggcccctattcagaagtttgctgattatgtagccagcattttcgttcctattgtcatcaccctgtccttcttgacattccttgcatggtttctatgtggatggttgggagcatatccaaactcatggtctgctgaaagtagcaattgctttgttttctccctcatgttctccatatctgttgtggtgattgcttgtccatgtgctcttggtctggcaacaccaactgctgttatggtagcaacgggagtcggggctagtcatggagtacttgtaaagggcggagatgccctggagagagctcagaatgtgaagaatggatctgggggactttctcacgttggtagcgtcagcagaggcaagcagtgagcatccactggcaaaagctatcttggattatgcattccatttccatttcttcggcaatcttccctcaggaaaagacagcatcaagagaagaaaagaagagatactttctcagtggcttctggaagtcgtggactttgctgccttgcctggcaaagggattcaatgctggatcaatgggaagaaaattttggtagggaatcgtgctttgataactgaaaatggggtaaacattcctgaagaagctgaacgtttcctggtagacatggagctgaatgcaaagactggtattctcgtagcgtatgatggtgacttcattggcttggttgggataaccgatcctttgaaaagggaggctgctgtggtcatacaaggtctaaaaaagatgggtgttcatccagttatggtcactggggataactggaggactgcacgagcagttgcaaaggaggttggcatagatgatgtcagagccgaggttatgccggccggaaaagccgatgtaatccactccctgcaaaaggatggcagtgttgtcgcaatggtcggagatggcatcaacgactcgcccgcccttgctgccgccgatgtcggcatggccatcggcgcaggcactgacatcgctatcgaggcggctgactatgtgctcgtccggaacaacctggaggatgtgatcacggctattgacctctcacggaagacgttcatccggatccggtggaactacttctttgccatggcctacaacgtgatcgccatccccgtagctgctggcgcgttgtttcccttcaccggggtccagatgccgccttggttagccggcgcgtgcatggcgttctcgtccgtcagcgtggtgtcgtcgtcgctgctgctgaggaggtataggaaacccaggctcaccaccgtgcttcagataacagtggaataagttccttttttttggcaatctgttgtatctcactttatcggagagaaatagatacaaacgtgaatgctggtgtggtgcagtattgagggtc

SEQ ID NO: 297 - DNA, 1342 bp, Zea mays
  Clone ID: 700071637_FLI
cctttgttcgcatggataattggatatacacttggctgcattgctagtcttcctcttatttattggcggtatgttcatcgaaacagacatttggatcaagaacctcagcagccacctacaacatatcctactttgactccttctcagtcatcagaaggacgcaaccatcgtaccagtggtattgttttgcatcttggatgtatctcaatttcttgcccaaggcttagtgtgctggcttatcacttcaagacaggtgttgactgtttctttgctgtatggtttgttgttggcaatgtgtggatttttggtgggcgcagtatttcatcagatgctcaggacgctcccaatatgtacaggttgtgtttggcattccttgcgcttagttgtgttggatatgccattccttttataatgtgtgcagcaatatgctgctgctttccatgcttgatttctgttttgcgtcttcaagaagatttgggtcaaaatagaggagctactcaagagctaatagatgcattgccaacctacaaattcaaaccaaaacgtgtcaaaaactgggggattgaccatgcttcaagctcagagcatcttgatgagggtggcattcttggcccaggaactaagaaggaaagagttgtttcagctgaagatgctgtgtgctgcatctgtcttacgaagtatggagatgatgatgagcttcgtgagcttccttgcacacacttctttcatgttcaatgtgtagataaatggcttaagataaatgcggtgtgcccactctgcaaaacagagattgggggtgtggttcgatctttctttggcttgccatttggccgccgccgtgtcgataggatagcggcaagaggtgtagctagctcaagattcagtgtatagaacaatgctgtttttccgcataaagagctctgctctgttgcaatggtttgattgattgtcaaggaaagcgctgtgtgcatgacttgaagacaatgacacctggtgggagacctgatgcttgtaggggcaaatttctaagaaatgtaacggactgaaggtgctgctatactctgatgaacattttttttccaagtatgtaaataaggaacacgaagttcgcttgccaggtataatgcaactttgcaagcaacttcacaggtgctctagcatcggccttggtgttctttccttccttctggttctgtgattctcttcataacggcaatgcactgcatgcattgtaaggctgtcttcagtagcttactcattctagtttctatcatcatatattctattttaaacttcaccttgtaaacagtgtaatttataatataaaatagttatttataat

SEQ ID NO: 298 - DNA, 1753 bp, Zea mays
  Clone ID: 700071662_FLI
gggcaccaagagctgctggcaccaccaaaccaatcgctggatttgtccagagtatttccggtttcaccgccctagatctgacccgagacgccgcgtcttcgctgagatggcgattactgtgaggcggtcgacgatggtgcgcccggcgcgggagacgccgcggcagcggctgtggaactccaacctcgacctcgtggtgccgcgcttccacacgcccagtgtctacttctaccgccgcgacggccccgtgccggcggcggaggggttcttcgacggcgagcgtatgcggcgcgcgctggcagaggcgctcgtgccgttctatccaatggcgggccgcctcgcgcgggacgaggacggtagggtcgagatcgactgcaatggcgagggagtgctcttcgtcgaggccgacgcgcccgatgcctctgtcgatgactacggtgacttcgcgcccaccatggagctcaagcgcctcatcccgaccgtcgattacaccgacgacatctcggccttcccgctactcgtgctccaggtgacttatttcaaatgtggaggcgtctcccttggtgttggcatgcaacaccatgcagcggatggcatgtctggcttgcacttcattaactcatggtctgacctctgccgtggagctcaaatttctgtcatgcccttcattgaccgcacccttcttcgtgctcgtgatccaccaactccatcttttcaacatatcgagtaccagcctgccccagctatgttgtcctccacaacccagttccttgcttccaagtcaaagccacctgccactgctgtggacattttcaagctcactcgctcagaccttggccggctgcgctcacagcttcctgcaggggaaggtgcaccccggttcagcacatatgcagtgctagcggcacatgtctggaaatgtgtctcccttgcacgcagcctacctcctgaacaacccaccaagttgtattgcgccactgacggccgacaacggctacagcctccactaccagatgggtactttggcaatgtcatcttcaccgcgacaccacttgctgaggcgggcaaggtgaccagtgagctggcagaaggagcagcagtcatccagggagcactggataggatggacaacgactactgccgctcagcgttagactacctggagcttcaaccggatctgtcagcacttgtgcgtggagcgcataccttccgctgcccgaacctagggctcaccagctgggtgcgccttcctatccatgatgctgacttcggatggggccggcctgtgttcatggggccaggtggcattgcgtatgaaggtctggcgtttgtcctcccaagtgcaaatggcgacggcagcctgtccattgctatctcgttgcaagctgagcacatggagaagttccggaagctaatcggtgaagcttaaacggtgccaactgttgaaggaggatgttattgggcgagaaggattatgctctgcccaaattctcagataaaatactgaagtttcaagtgaatccagtggctgcactttcactttgaagacttgcagaggaaattcatggtcacttcattttgtgcgattaattatagagaaagggtagaaattatatgaagaaacatagtaaaaaatcattgttaggaacaaactccaatagcaggctctacttgtacgtcgcagacataagctgagactgagctgcgattgcaacagattatactcttctatcaggttgactgaagttccctc

SEQ ID NO: 299 - DNA, 1201 bp, Zea mays
  Clone ID: 700071665_FLI
gtggagtgtcagaacttgggaggcacaaattaagtacaaagcagtctaattaatgacgggcccgatggagattccggtgatcgatctcggcggcctcaacggcggcggcgaggagaggtcgcggaccttggcggagctccacgacgcctgcaaggactggggcttcttctgggtggagaaccacggcgtggacgcgccgctgatggacgaggtcaagcgcttcgtctacggccactacgaggagcacctggaggccaagttctacgcctccgccctcgccatggacctcgaggccgccaccagaggtgacactgatgagaagccctccgacgaggtggactgggagtccacctacttcatccagcaccaccccaagaccaacgtcgccgacttcccagagatcacgccgccgacacgagagacgctggacgcgtacgtcgcgcagatggtgtccctcgcggagcgtctggccgagtgcatgagcctcaacctgggcctccccggggcccacgtcgccgccaccttcgcgccgccgttcgtgggcaccaagttcgccatgtacccgtcctgcccgcgcccggagctggtgtggggcctgcgcgcgcacaccgacgccggcggcatcatcctgctcctccaggacgacgtcgtgggcggcctcgagttcctcagggccggcgcccactgggtccccgtcggccccaccaaggggggcaggctcttcgtcaacatcggggaccagatcgaggtcctcagcgccggcgcctaccggagcgtcctgcaccgcgtcgcggccggggaccagggccgccgcctgtccgtggccacgttctacaaccctggcaccgacgccgtggtcgcgccggcgccccgcagggatcaggacgccggcgccgcggcgtaccccggtccctacaggttcggggactacctcgactactaccagggcaccaagttcggcgacaaggacgccaggttccaggccgtcaagaagctgctcggctaagcgaacagctgcaagtaggcagaggcagcttagctcgtggactatgcatagtttcaagcttgctgcttgcttcttgttcgatccattgtctgcatgcgtactgttgcgtgtttaaatttagcaaatcttatacgtagtcgttactggtactacgtattctgtggttgacaatacattgttgcggtttaagggccc

SEQ ID NO: 300 - DNA, 2706 bp, Zea mays
  Clone ID: 700071667_FLI
cacctatcatcgccgctgcgccgtctcctccgctcccgtcgtccggaaagatggcgtcccacattgttggataccctcgcatgggccccaagagggagctcaagtttgcacttgagtctttctgggatgggaagagcaccgctgaggatctggagaaggttgctaccgacctcagggccagtatctggaagcagatggctgatgctgggatcaagtacatccccagcaacaccttctcgtactatgaccaggtccttgacaccactgccatgctcggcgctgtccccgaacgctactcatggactggaggagagattgggtttgacacctacttctccatggccaggggcaacgccactgtccctgctatggagatgaccaagtggtttgacaccaactaccactttattgtccctgaattgggcccaaacaccaagttctcctatgcttctcacaaggctgttaacgaatataaggaggctaaggcgctcggtgttgataccgtgccagtacttgttggaccagtctcgtacctgttgctctcaaagcccgccaagggtgtggagaagggattccctcttctttcccttcttagcagcatcctcccagtctacaaggaggtcattgctgagttgaaggcagctggggcttcatggattcagtttgatgagcccactcttgtcctcgaccttgattctgacaaattggctgcattctctgctgcatacgcagaacttgaatctgtactttctggattgaatgtgcttgttgagacttactttgctgatgttcctgctgagtcctacaagaccctaacatctctgagcagtgtgactgcttatggttttgatcttgtccgtggaacccaaactcttgggcttgtcacgagtgctggtttccctgctggaaagtacctctttgctggtgttgtggatggacgcaacatctgggctgatgatcttgctacatctctcagcactctccagtctcttgaggctgttgttgggaaggacaagcttgtcgtatcaacttcctgctcgctcatgcacaccgctgtggatcttgtgaacgagactaagcttgacagcgagattaagtcttggcttgcttttgctgcccagaaggttgttgaggttgatgctcttgctaaggcattggctggtcaaaaggatgaggcttacttcgcagcaaatgctgcagctcaggcctcgaggaaatcctcaccccgtgtgaccaatgaagaagtccagaaggctgctgctgctctcaagggctctgaccaccgccgtgcgaccaacgttagtgctagattggatgcccagcagaagaagcttaacctccccatccttcccaccactacaatcggttcgttcccacaaaccgttgagctcaggagggtccgccgtgagtacaaggcaaaaaagatctctgaggaggaatacgtcactgccatcaaggaggaaatcaacaaggtcgttaagctccaagaagagcttgacattgatgtgcttgtgcatggcgagcctgagagaaacgatatggttgagtacttcggtgagcagctctccggttttgcgttcactgccaatggctgggtgcagtcttatgggtcaaggtgcgtcaagcctccgatcatctacggtgacgtgagccgccccaaccccatgaccgttttctggtcgaagacggcgcagagcatgacgtctcgcccaatgaaggggatgctgactggcccagtcacaatcctcaactggtccttcgtccggaatgaccagccgaggtttgagacttgctaccagatcgctcttgcgatcaagaaggaagtcgaggatctcgaggctggtggtattcaggttatccaaatcgacgaggctgcactgagagaagggctgccgctccgcaaggctgagcatgcattctacttggactgggctgtccactccttcagaatcaccaactgcgagatccaggacaccacccagatccacacccacatgtgctactccaacttcaacgacatcatccactcgatcatcgacatggacgcggacgtgatcaccatcgagaactcgcggtccgacgagaagctgctctccgtgttccgtgagggtgtcaagtacggcgcgggcatcggccccggtgtctacgacatccactcccccaggatcccgtcggccgaggagatcgccgaccgcatcgacaagatgctggccgtgctggacaccaacatcctctgggtgaaccccgactgcggcctcaagacccgcaagtacacggaggtcaagcccgccctgaccaacatggtctccgctgctaagctcattcgcacccagctcgccagcgccaagtgagcacctttttttgcctttttcgtttccgaggagggcgtcgtcgatgccaatttgtttccaataaacagggctccccccctgtgcccgccgttctgttgtgctccgtctgtggttaggttactagttttcttgatctcgcccccacgcggtacctgttttactatctgtttggtggtttctgaggcaagttgcccgtgtacttgtatcgtaaaaaccgagtgggacatctgcatcgtttcatctgccaccactcccccgaggtgtgttgtttcacggctcaaagaaagatgtcgtatcggcaagctaaatgctccactgtgtgcaactatatatatacacttgcattgccaggttt

SEQ ID NO: 301 - DNA, 711 bp, Zea mays
  Clone ID: 700071675_FLI
catccctcgctctctctcgcgcgcgcgctcgtgctccttcgtgctgctcgccccgcccccgccgccctgccctccccaccgtcgtcaccggcgtggggggaacgacatggtaagcgactccgacgtccgcggcgcgacccactactctccttcgcctagctcgccaatgattctggtagtagtactagtatccacacaagctagctgattctgtttggggggcagactacttccaggcgccttgcggacaggaagacagccaagttccagaagaacatcacgaggcggggttccgtgccggaaaccgccgtcaagaaggggaaggggaacggctacgctgccggccccgtagtgctcggcttcttcgtcttcgtcgtcattgggtcatgtacgtcattgggtcgttaattctctaaggccagagagatgaagaattgtactactaacacacttttgcctctctgcctctttcttctgcctgccttggcagcgttgttccagatcatcaggaccgcgaccagtggcggcatggcttgagaacccgtccccggtgcagagcagagagatctgtttgtcgtttgtacatgcatgcgtccagctagaatcgagtttaatttcgaactgaaccgtaatgcagaaccatgtatgtaaataaagtgctattaaatgggtaactggatatagtgctatatatatacagtgttggaatac

SEQ ID NO: 302 - DNA, 713 bp, Zea mays
  Clone ID: 700071688_FLI
caactcctccccaaatccacgctgccaccaactcgccgtcctccgcgccaagcaccaaagctccgatggcccgcactaaacagacggcgcgcaagtcgacgggcggcaaggcgccccgcaagcagctggcgaccaaggcggcgcgcaagtctgcgccggccaccggcggcgtgaagaagccccaccgcttccgccccggcaccgtcgcgctccgggagatccgcaagtaccagaagagcacggagctgctcatccgcaagttgcccttccagcgcctcgtccgtgagatcgcgcaggacttcaagaccgatctccgcttccagtcctccgccgtcgccgcgctgcaggaggccgccgaggcctaccttgtggggctctttgaggacactaacctctgtgccatccacgccaagcgcgtcaccatcatgcccaaggacatccagctcgcgcgccgtatcaggggcgagagggcctgagcgaggctggctcctctcaccgcaggcggcgtcgttgttgcttcgggcctgcttgtaggacttgtgcttctcttggtttcctttctggtggcagtggcatcttggtaccattgtgcttgttcttagaatcttagggatagagagttgttcagttgctgggtaacctgattgtttatcttgcattcctgcctctgtaatggttgtctgctgtcttaatggaaatgatatttgcttttt

SEQ ID NO: 303 - DNA, 1827 bp, Zea mays
  Clone ID: 700071715_FLI
cctcttcccaccttccctcctcccttctccaatcatccctttctggctttctcctcccccctgagaccccgagtcctgccggattccgagatcccggaggcagcttcccacgggctcctctcactacggtagctggatcaaaccatcgtgctctcgtctcgacagaaaccccggccgaaaacccagccggacccagccctgttcgccgcgcgcgcggtgcccaggccgtgccagatctgcgagatccgcgccgacaccgctacgactatcaccaggtggatgctctcgtgatctctcggaggccgcggggactgagcagcgtctcggcggcggcgtggcctgcatagccgtcggcgtgccgagatgcaacggaacggggtggtggaatgcagcgtgtgccgctcccgggtggtggtgccgagcccccggagcgtgtccagggcgtacgacaagcaccgcaacaagatgtcgtccaagttccgggcgctcaacgtcttcctcgtcgtcggcgactgcatccttgttggtctccagcccatcctagtgttcatgtcaaaggttgatgggaagtttcagttcagtcccatcagtgttaactttctgacggaggttatgaaagtcatctttgctgtcgtcatgctcataattcagtctagaaagcaaaaggttggagaaaagccacttttggcacgttcaaccttcatacaggcagcccgtaataatgtacttctagctgttcctgctcttctatatgcaatcaacaattacctaaaattcatcatgcagttgtacttcaatcctgcaactgtgaaaatgctaagtaacctaaaggtactggttatagcttttcttctgaaatttataatgagaaggagattctcagttattcagtgggaagctcttgctctattgcttattggaatcagcatcaatcaactccgaactgtacctgtgggcaacacagcatttggtcttcctgtcactgctattgcgtacatatatacattgatttttgtaactgttccttcagtggcttctgtctacaatgaatatgccttgaaaagtcaatatgacactagcatctatctccagaacttgtttctgtacggatatggagcaatattcaacttgcttggcattcttgggactgtcctattccaagggccagagagttttaatattcttcgaggccattcaagggccacaatatttctcatatgtaacaatgctgcacaaggcattctatcttcattcttctttaagtatgcagacacaattttgaagaaatattcgtcaactgttgccacaatatttactggcctagcttctgctgcatttttggggcattccttgaccattaattttctcctgggcatatcagtggtgtttatttcaatgcaccagttcttctctccgcttgcaaaagtcaaagatgacaaaccagctgactcaatagagttggaagatacacaaaatgaccgcccatctgaatcttcttttgtaaatatgactgctggtgccgctgatgatgcaagccatcggattggaactgatgagaggcagccgctattgcctatatgaacttgtttgttgaggtaggacagaagagaggggatagaagaagaggctcctttttgccgtgtgagcaacagatttgatgtagcattgttaggcgaataaacagctattgtacactgtagaggcaaaagaaacaaataaacgtggtttccattttctttaaattttttggggataccttgggagcggcagaaatcatacattttgatagacataattcaatagggatttctagatacgatacttgtc

SEQ ID NO: 304 - DNA, 1178 bp, Zea mays
  Clone ID: 700071720_FLI
gacagaggagagaagagatgacaagctcccccaaaatctccactcccggagtgagctccccaccaccacctccgtccccaaatgtcccgtcaccatcaccacgccgccactatcgctgctgccgtgctcttcctcctcacagcgcctccttgcgccgccgaccctaacgacgagcgttgcctgactcacctccaccagtccctctccgattcctccggaaggctcaactggaccaaggcggcgatctctgcgccgtgcgacggcttcttctcgcacctccaaggcgtcacctgcaacaacgggcgcgtgtacaagctagccctcccggatctctcgctcgggggcaccgtcccgccggagctctccaactgcaccaacctccagtcgctggacctgtccgcgaacgcgctgtccggcgccatcccgacggagctctccgcgctgctgaacctcgccgtgctcaacctctccgcgaacgcgctctctggcgccatcccgcgggagctcgccagctgcgcctacctcaacgtcatagatctccatggcaaccagctgtccggccccatccccgaggaactcggcctcctcgtccggctctcgaccttcgacgtctcctacaaccgcctctctggccccatccccgtgctcctcgccaaccgctccggcgccggcacggcagccgtcgggacggcgaggttcaacgccagctccttcgtagggaacaagggcttgtacgggtacccgctgccgccgatgcggacgcgggggctctccgtgctcgccatcgttggcatcggccttggcagcgggctgctcagccttgtgcttagcttctccgccgtgtgtctgtggctccgcgccacggaccggcggactcccaccacccctggcgaggagggcaagatctcccagcccatgccgaactactgaatccatcaaaggttgcatctttggacatataattcctcgtaattgaactgaacacgagatttttcagctgggcttgcaacaaaggttccaccttgaatagattttggttggattcttgaagccagtattggattctggaacgggatccgaggagcataccagacatcttgctgcaggctggttgtgtcagtagtggatcttctaatcgctgtagctttttaataactaatgattttgttgttgctctt

SEQ ID NO: 305 - DNA, 1614 bp, Zea mays
  Clone ID: 700071806_FLI
ggagtaggtgggcggggttctcctccactcccgctccagctttctctggcccgatcgatgctacattcccgcggcgagccgctcgccttcctccgcgggccttgggctacccaacccatcgccgagccgcctcgcgcggtcccccctccatcttcgcccggctctctcgcctcggaggacggacagagaaagagaggatgagaagggactcctcgacccgcgtcccgcgctcgggctattggaccgaggggttgcggtggatttggagcgcggggtggactcgtcgctgatggtattctccgatgcaagaggcagggagagagcgggacagggcggcggatctcggaggcgtcgccgctagcgtcaggccaacggatacagcagctgtaagcacaaagccagcaaagcgatacccactggccttatggatagccatattgggcctgataatgttagtcgctgtgtacatcttctcgttgtctctaaagcaaaatgggatgcttttcgggctgatgcagacaaatttgatagaaaaggaaagggagaagccttgtcatgatcccagtattccagacgcagaaatcccttacttgcactacccgatgccaaatacttatgataggaaagaatgtgcgtgcacaggggttaggttctttgctatcttgtcaatgcagaggtccgggagtggatgggttgagacgttgttgaatagccatcctaatattagctccaatggagagatcttctctgtcaaagaaagacgcagcaatatcaccgcgatcacgaaaacactggacagattgtacaatctggattggtatagcagtgctgctaagaacgaatgtacggctgccgtggggctgaaatggatgctcaatcagggtctaatgaagcaccatcaagagatagttgaatacttcaaccgaaggggtgtttccgcaatttttctactaagaagaaatcttcttcggcgttacgtctctatattagcaaatgctcatgatagtgccatgaaacagttgaatggaactcataaagctcatgtgcactccaaacatgaggctgaaatccttgctcaatataagccaaccattgacaaaaaaacattgattactgaactaaaacggtctgataagttggcagctgatgctctggtgaatttcaagaacaccaggcacgttgtcctgtactacgaggatgttgtcagcaatcgcacgatgctcatggatgttctggattttctcagattgccaaagaggaagctgttcagtcgacatgtgaaaatccacacaaaacgattgtgcgatcatatagataactgggcagatgttactgattttttgaagggcacaccgttcgagagttttttgaatggctcaagaagatgacatggctagctgatgtatatagtgctatagtgagttgtccttctggcgcctcgtagggttttttttttgataccatgatgaaataagtatgggccactgagagaagtagttaggtagagatgcttgatccaggctattagtctcatagatatggacttcagagctgtagaataaagattaaaaacaatacatttgtgattatcagatatccaatgcaagaacttgc

SEQ ID NO: 306 - DNA, 874 bp, Zea mays
  Clone ID: 700071826_FLI
gacggcaacgacaactccgtgtccgacgtcgtcatcttctccgcggccacggggatcatggtcaccgcgccggccaactccatctccggcgtgcactgctacaacaaggccacgggcttcggcggcaccggcatccacctcaagatcccgggcctcacgcaggcgtggatcagcaactgctacatggactacaccagcatcgtcgccgaggaccccgtgctgctccacgtctccggatccttcttcctcggcgacgccaacgtcgtcctcaaggccgtcagcggcgtcgccaggggcgtccaggtcgtcggcaacatcttcagcggcagggacaagggcgtcgacatcgtgcagctggacggcgccttcgccaccgtggaccaggtgtacgtgcagcagaactccgccacggggatgaccgtcaggtccacctccgcgcgcgcatcgctccagggcaacgggacctcctggacgctcgacttctcgccggtgctgctgttcccggaccgcatcggccacgtgcagtactcgctcgtcgccggcgacgagttcccgggccacacgctccggaacgtgtccgggaaccaggtcgtggtcgccaccgacaaggccgtctcggccacggtccacgtcttggtggaccagaacagcgactgagataagataagagacactcgagagtgcctgcgtgcacgcagtatgcgtgctgctgcctgctcgcgcggctgctgcggagcaaggcgttattccttcgtttctttcttcttctcggaaatttcagccattcatgtcgtcgggaagatgacaattgtttgatgcgacaaaatgctccagaatgtatcattcttttgctgtatgaaatgaaatgattcag

SEQ ID NO: 307 - DNA, 1077 bp, Zea mays
  Clone ID: 700071884_FLI
ctgcaccgagctcactggcaatggctaccagcaccaagctcgtggcccttggctttgccgtcctcctgagcatcggcttctccgatgcagcgagggtagttaggcttggtagccatgcgtccgcgggaggtggaggtggcggtgggggaggcggctccgggtcgactgggggtggctttggcggtgggtctggcggtggcggtggttacggcataggtaagggtggcggggactggtggaacaatttcgtctctagtatagcaggtggtggaggaggaggacaaggcggaggcggtggcaccaatggtgggtccgggtccggcggtgggtccggttatggttctggcagcagctcgactgcagcctctggccccagcagtggcaactacgccgacgctgagggcaagggcgccggtggaggcatgggcggtggtgccaatggtgcatatggttctggtgctggtggaggcgttggcaagggcgagggtgtgagtggtgtggcactcgcaccatcgtccaacggctactacaatggcggtgccgccgatgctaccggtggcggttccggcgccggcggtggacatggtggtggcgcagccggagctccaagctatggaaccggaggcggcctcggcggaggcaagggtgaggccggcagcgatggatcgtgggggtcaggttatgctcagggaatcggtgctggcacaggcggcggtggcggcggcggatcccaaggcggctctggtggcggtggaggctctgggtccggatccggcagcggtggaatccactgagcttgcacttcagtagctagagcctagagccccgcattagtgtcagtccattctgtggttttttgctgtctttgttacgagaattaatcaggaataaagcgtaatgggcttcgtgattgtagttcgagtaggtagcaaagcatgcaactgatatgaatgcatgtaatggctatctacgagtgtgtgcccctagctgtaatctgtttctcatcgatcgttaaggtcgttgcatccggttttatttatcttctgaaaccaaaatacattggaactcttatagtct

SEQ ID NO: 308 - DNA, 1814 bp, Zea mays
  Clone ID: 700071919_FLI
gcctacattcctgacttcccctcctacgcgcagacgccgtcccaccgccgggatgccgccggcgatcccaagcctggtccacccgtcccgtgtgcggattctccacccgggcggaagccatattcacgggccggtggtgtactggatgctgcgggaccaacgtctcgcggacaactgggccctcctccacgcggccgaactcgccgctgcgtccacccccgcggcgccgctcgccatcgctttcacgctattcccacggcctttcctcctaggcgcgcacctccgccagctaggtttcctcctccgcgggctccgccgccttgccgccgatgcgcacgcccgcggcctcccgttctttctactcgagggcggacctgcggagctgccgtcgttggtgcggcggctcggggcttcggcgctcgtcgccgacttctctccgctgcggccggtgcgggaggcattggatgctgtcgtccaggagcttctgcgtgacgccgccaacatggccgtgcaccaggtggacgcacacaatgtagtgcctgtctggacggcgtcagggaagctcgagtactcggccaaaacctttagaagtaaggtgaacaaggtgataaacgagtatctggtggagtaccctgaggttccgcagtgggcgccttggtgcatggagcagccgaagagtgttgactgggatgcactgatcaatagcatcttcagtgaggctgagaatgtgccggagattaactggtgcgagcctggggagtcctcagcgatggaggtccttcttgggagtaaggatgggttcttgacgaagaggattaagaactatgacactggccggaatgatcctacaaagccacatgcattgtcgtgcctttcaccgtacttacattttgggcacatttctgcacaaaggtgtgctcttgaagcaaaaaaacgccgtcatcttagtccaaagtcagtggacacgttcttggaggagctgataataaggagggaactagctgacaatttctgctattaccagcctcaatatgattcactggctggtgcatgggagtgggctagaaagacgttaacggatcacactggtgataaaagagagcatatctatacgagggagcagctcgaaaatgccaaaacatctgatccactttggaatgcatctcaattggagatggtgcaccatgggaaaatgcatggatttatgcgaatgtattgggccaaaaagattctagaatggaccagtcaacctgaagaagcactttccatagcaatatatttgaacgacaagtatcatatcgatggcagggatcccaatggctatgttggttgcatgtggtctatttgtggcctccatgaccagggttggaaggaacgtccggtatttggaaagatacgttatatgaattatgctggttgcaagagaaaatttgacgttgatgcttatatttcgtacgttaaaagattggttcctagggccaagaagaggaaaactgaggaaggtgaatccacggtcaaagaatccaatgtctgagttggctcagcagttcaacattgtctaaaacattggtataatttaaatttggcgcagtcaagtgacatacttttcttttgctggtagatgtttatacggctaactgaagagttgctaagtagagatagacattatacaaggttgtgctgagatcagtttgcctcgctgatattataggaaaaacatattaacatatatgttttataatagttttaaaaatactaatgttattctgtcgacgtttgattttattttttaataaatttggttaaactttgtg

SEQ ID NO: 309 - DNA, 1164 bp, Zea mays
  Clone ID: 700071935_FLI
gttgccctcgtgcgagactctggtactcaatttctgaaggtcgaggcgtgaaagaaaaactccggaggtcgaaatggcggcggcggtgcggcgagcggaggagctggtggagagggagatgggcgggcgcgatgcctcccacgacgccgcgcacgcgctccgcgtccgagaccttgcgctctcgctcgcagccgaagagggcctctccgctcccgaccgcctcctcaccgtggaactggccgctctcctgcacgacgttggagattacaagtataccaagaacaatgtggaggatataagcgtcgttgagatgtttcttcaagaggtaggattggatgaaggccaaaaggatgaaatagtggcaattattaaggggatggggttcaaaaatgaagtttcaaataaatctattgttgagcccactcttgaatttgcaattgtacaagatgcagatcgcttggatgcaattggggcaattggtattgcaagatgttttacatatggtggtagcaagaacagcgcattacatgatcctagaattctgccacgtgatagcttgtcgaaggaaaagtacatgtccaaggaagagaagcagacatcaatcaatcattttcatgagaagctttttaaactgaaggacatgatgaagacagaggccgggaaaaggagagctgagaaaaggcataggttcatggaggaatttgtggctgaattctacgaagagtggagtggcagggcttgaggttgaacaaccagattttgagcctgtgtcaaagtgtgcagttggcgaaccatttctcaacaacccatgatgatgttgtctacctggcctacttttttgccgatgaagccaggcaaataaacaatggtttgtccagcctattagattggctggacaaatcatacggtcctgtgataagctatcaacccactaccaattccgtggatgaagctggatttttttttccaaacagatgccatggcatcttgctgctgttgtattgaaataatactgctacaatattaccggttacatcacctgaaggtcaagcgttttgccaacacatatacatatgtatctatacatatatatagaagttctatactagatgtaaatgaaacaaatgaagagccctgcttctttcatactgtatatctctcttc

SEQ ID NO: 310 - DNA, 751 bp, Zea mays
  Clone ID: 700071985_FLI
tctcggcagccacaagaaaccacccccttccggcacacgggctcgaccacctgactccatcaccgtgcctgtctgtgttctagggacaagaagagcagagatatacaggagcgagcagaggcggggagaagaggatgagcaccacaacggcgtcgtcgctgaaccccaacgcgccgctcttcatcccggcggcgtaccggcaggtggaggacttctcgcccgagtggtgggagctcgtcaacaccaccgcctggttccgggaccactgcttccggcagcgccagctccacgaggccgcctgcgacgacgtcgccgcgctcctccccgacgacctcctcgacaccaacgacctcttctacgcgcccgacgtcgtccaccaccaaccagcgacggcgctgctgcccgggtacgatgtcctcgacgtgctcgcggcgctgagcctcagctcccccagggccatccgccagcctcgctaggagaagcctgctcatggcgcctggcgggccaccacctccaccacggctgctgtgcctagtgtaaccccaagcaaggctagtctgtttctgtgtatacaatacgactgaaaaactaggagaggggggattcggccaaggcggccggtgctctctcctctcctcgtagctagtttttcctcctgttccagctcagttcttgttcatccagccgtgttaggaaaacaaacccagccccgtgcccatgttgttgaaaaatatattagtctggtatttac

SEQ ID NO: 311 - DNA, 1197 bp, Zea mays
  Clone ID: 700072026_FLI
agccatcaacctctgcagctacaggacagcgtgcttgtgagtggctgtgcttccgtaggggtagtagggtgcttgcgttgcgttgcagtgcagaggacactgacggacggcgaagaatcgaagatggaggcgtacgctgctggagccaagttcgactgcttgctgttcgacatggacgacactctgtacccgctgagccttggcatcaacctagcatgccgcaagaacatacaggagtacatgctgaagaagctgcggatcgaggagagccaggtccccaggatgtgcctggacctgtacagggagtatgggaccacaatggccggcctcaaggttttggggtacgatttcgactacgacgacttccacgcctgcgtgcacgggacgctgccgtacgagaaggtgaagcctgacccggtgctcaggcagctgctgctttccctgccgcagaggaagatcatcttcaccaactccgacaaggcccacgcggccagagtcctggagaagctcggcctccaggactgcttccaagggatcgtctgcttcgagacactgaacccgccaccaccaaccgagaccgagaagaacagtggcagtgctgggacgatcctgtgcaagccctcgctggcgtccatggaagccgtcatcgagatcgccaagctcgacgccgagagaacggtgttctttgacgacagcgcgcgcaacatcgccgcagggaaggccgccggtttccgcaccgtcatcgtggggagctcggcgctggtgccaggggcggacgtggcgctggagagcatccacaacatcaaggaggcgctgccggagctctgggaggttgccgccgccgctgccgccggcgaccgcgtcgacgccgtcctccggtccaccaccgccgtggagaccacagtgattgcctgagcaataataccatatgacaaatgacattaaccgtcacggactcacggccacgtaatataatgctggcgtgtagtatttcttgtgacgtgcaaattaaaatgacttggaatgtggtgtgcctgattaagtaccgaccgaggtaactaatactactgtatatgacagaccagaactttactggtaataaggtttgtatagctcatccctgtcggcccgtgcttttttatggcgcggtccgtggtgcaaatggatgccacgtactgaatacaaataaatatatat

SEQ ID NO: 312 - DNA, 1054 bp, Zea mays
  Clone ID: 700072074_FLI
tactagattcacccctggtggaggaggagaagaaggtaagcgaagatgctacggcggaacatacgtcagcgtcgggagtacctgtactccaagagcctcgagggcccccagcgggcgctgttcgagaagaagcgccggatccgggcggcgctcgaggagggcaagcccatccccaccgagctccgcaacgaggagcacgacctgcggaggcagatcgacctcgaggaccaggagcgtcaagttcccaagagcatcgttgacaacgagtacgctactgccaccattcgggagcccaagatactattgaccacttctcgcaatcctagcgcgcccctaactcagtttgttaaggagctcaaggttgtcttcccaaactcacaaagaatgaaccgtggtggacaggtcatatcagaaattgtggaggcctgccgctcacatgatataacagatcttattctggtccatgaacaccgtggtcaacctgatggtttgattgtctcccatctaccacatggtccaactgcatactttgggttgctcaatgtggtgacacgtcatgatatcaaggacaggaagacgatgggcaaaatgtcagaagcttacccccatttaatactggacaacttctcaacccagattggcgaaaggactgcaactattctgaagcacctctttcctgtcccaaagccagattcaaagcgaataattacatttgctaacagagacgattacatctctttcaggcatcatgtatatgaaaaaccaggtggccccaaatcgattgacctgaaggaggtcggcccccggttcgagttgcggctgtaccagatcaaactaggaaccgtggaacaaaaggaaggccagagcgagtttgtgctgcggccctacatcaatactgccaagaagcaaaagacgcttggagcgtgagctacactgcagtacagaacttaatttttttttggtcttcatcgtttatgctgtagtagcaacattcacagggtgattagatcaatatctgtcaatctaatagaagccgcaatgtacccctgactcg

SEQ ID NO: 313 - DNA, 953 bp, Zea mays
  Clone ID: 700072089_FLI
aagtgaggctgcactagagaagcaaaatgaacagctacttatcttacaggctgggcttgacaacttgaaggatgaaaatgaaactctccaagggtcacttgctgatcttaattcaaaactttctgagaaagattccttgttgcatcaggcagaagatgagcttgctaaagcacaattggtactctcagaagcactgtcacaaaaaggagagttggagctgaatctgaactctctcaatgagcagcatggtgaatccaaagcttttggagaaaatgcaagtcagaagattattgagcttgaagcacaaatacaggcaatgcgtgcagctgaagaggcactcaacctagagctaaaagaagctgaggcaagtgtcaaagctgctgagaagaaaggctcagaccttgagcaacaactcagtgagattgagaataaattagttgcatcaagtgaagaaatagagttgctgaaagagcgtattcaacaagaagctgctgtatcagcagaaagaggaatgcagcttgaagaaacaatgaccagtgcagagggatacaaagaaaaaattaacgagctacaatgctccctagattcctcgatgtctaaaaaccagctacttgaacaagaagtcaaggagctgactgataaatgttcagagcatcaagaacaagcgcattcagttcagcaaagaagtctggagctggaagatctgcttcacacatcaaagactcatgctgaaggtgcatactctcggacacaggagttggagcaggagctgaacggcacatatgaaaagctcaagggggttgaagaagaacttgagcagtacaaaagcaaggcttcgcagctctctgatgatctagaagcttatcagacaaaagcagctagtcttgaagctgtggtggaagcagcaagcgagaaagagaaggagcttatggagtcattgagccaaataactg

SEQ ID NO: 314 - DNA, 1095 bp, Zea mays
  Clone ID: 700072142_FLI
agcagcttctgcttgctctggggggaaggagagagagagagcgagagagagagagagatctagtagagaggctagtaggtggtcctcgaacgaagatgttggcggtgttcagcgggcaggtggtggaggtgccggcggagctggtggcggcgggcagccggacgccgtcgcccaagacgaaggcgtcgcagctcgtggggcgcttcctggccgcgtccgagccggccgtgtccgtgcagctcggcgaccacggccacctcgcctactcccacaccaaccaggcgctcctccgccccaggtcgttcgcggccaaggacgaggtgttctgcctgttcgaaggggtgctggacaacctgggtcggctgagccagcagcacgggctgtcaagcaagggcgccaacgaggtgctcctcgtcatcgaggcctacaagacgctgcgcgaccgcgcgccctacccggccagcttcatgctcgcccagctcaccggctcctacgccttcgtcctcttcgacaagtccaccaactccctgctcgtcgcatctgaccccgagggcagggtgccgctcttctgggggatcaccgccgacggctgcgtcgccttctccgacgacatcgacatgctcaaaggctcatgcggcaagtcgctcgcgccgttcccgcaaggctgcttctactccaacgccctcggagggctcaagtgctacgagaaccccaagcacaaggtcaccgctgtccccgccgacgaagaagagatctgcggtgccactttcaaggtggtggaagggtctactgtcctgacggcgctgcactgatcgatcatcatcaggcggaggcgatgcgacgatacagaactttgtacatgcgtggtgggtgtaacatagtggctggcaacaagccatgctcatgcaaaccgatgaatctatctctgtatcatgcatcgatctcggttgcttgctagtccagactccagactccagacatggctatatatagctggtgctaataaataggagtataatcgtcatatcgatcggttgcgtgtggaatgccaatcaagtgtgtaatctgttccaaataacaaacctatgttcctcc

SEQ ID NO: 315 - DNA, 1017 bp, Zea mays
  Clone ID: 700072185_FLI
cctccgggcggtgttcatcaactcctccctggacctggcccgcgccaacggcttcgacggcctggacctgtcgtggatcttcccggccacgcaggcggacatgcagaacctcggcgccctgctcgcggagtggcgggcgaggatcacggaggaatccgtcgccaagtctttgcctcctcaaccccttctcctcaccgcgacgctctacttctccaaccacctgttcggcacgcccgacggcaacctcgactaccccgtggacgccatcgcgagcagcctcgactgggccaacgtcctcaccttcggcttccgcggggacagcggcgtcaccgcggccgacgcgccgctctacgacacgtcctcgcacttctcggccagctacggcgtggtctcgtggctggacgcggggctccctccgtgcaggctggtgatggggatacctctgttcgggaggtcgtggttcctcaggaacaaggccaagaacgggctaggggcgccggccgccgccgccgggacgaagcagaggaggagcaaccagactgggataatcgcgtacgcggagaccgaagagtacctgagctctcaaggcaccgtcgtcacctatgacgaccagtcggtggcggagtatttctctaacggcgacctctgggtcagtttcgacggcgcgcgggtcgtgcagcggaagctggagttcgcggcgaggtctcagttgctcggctacttcctctggaccgtcggcttcgacgattcgaacagcacaatctccaggaaagcatcggagtcatggcaccagtatgctcagggtggttttggaatcatgcacgcaggaggttcaaaccaatacgttgcatttaactcgtcttcagtatcacttggtagctgctattcgagatctctcagctgtttgctgtcttcagtacttctgttggttattctgtttcgttaaagcgtatcagtaaacaggccagaaatgtaaaataatagtttcaggtgatatattcatcaaagcgaacgtct

SEQ ID NO: 316 - DNA, 886 bp, Zea mays
  Clone ID: 700072230_FLI
gttctctcgtgaccgccttccctcctctcctgcgtcccaactgggcaattccccaaacctaactaacctttgccaccgcgggagccaccatgggtggccagatgccggacgccgacgggaaggcccgctcggcggactcctcgtcctcttacgggtacccgccgtcggcgccgccgcagcaccagtacggcacctttggtcccccatccggagcctccggggagtttccgcagccggcggtcgggttcccccagccggcggcgccgcctgggatgcagcactacccgcagcctcctccggcgtcgtatgccgtctacccacccccgcagcaaccctactcggccgccgcgccgtactacgcccaaggctaccagatcgctcaaggttatattcctgttgttgaaggaaggcctgttagaatccgtcctcttccatgttgtggccttggcatggggtggtttctgtttataattgggttcttctttgctgccattccatggtatcttggagcttttgtgctgatttgtgtccgagtacgtgattacagggagaaaccaggatatgttgcttgcactattgctgcctcgcttgctgcaattgctgtgctgcttggcgccacaaaaggagcggaggtgtggtgagcattatgccttcaattaccagcagtccggttaatgtaaatgtccgttgctcggctactttgttacctgtgttgtacatgtgttgtgcgtacaaaggatagggtgtaacgaaaatgatgtatgctcctatttgtagttggacatatacatttgacaaacggagtagcatgaatgcacaccctcattaatcatttgatgtaaaatttactggaatgccaccatgttatggtagtctggtcgacaat

SEQ ID NO: 317 - DNA, 965 bp, Zea mays
  Clone ID: 700072258_FLI
cccactgcactgctgctccgctgccgctaccctttccctctcccttctcgtcctcggtcctccccaacccatggccacggccaccaccacccactgccccttctcccaccacgctatttatcgcggctgcacgactcctgcccatcaggcgccatagagacgcgtgggaccgaagccgccgatcaagcgctgctcggggcggagcagcggccggcggtggtgagtgctggcagacaggccggcaggtcaggcagagtgaccagctggtgagtcgaagcttgagcggggagctggactttggcgggttccggcgggctccggagcggagatggtgctggatctcaatgtagcgtcgccggcggactcgggcacgtcgagctcgtccgtcctcaactccgcggacggcggcttccggttcggcctgctcgggagccccgtcgacgacgacgactgctccggtgagatggcgcctggcgcgtccacggggttcatgacgcggcagctcttcccgtccccgaccccgccggccgagccggagccggagccggtggcggcgccggtgccggtgtggcagccgcagcgcgccgaggatctcggcatggcccagaggccggtggcgccagcgaagaagaccaggcgcgggcctaggtcgcggagctcgcagtacaggggcgtcaccttctacaggaggacgggccgctgggaatcgcacatctgggattgcgggaagcaagtctacctaggtggttttgacactgcgcacgcagccgcgagggcatacgatcgagctgcgatcaagttccgcggcctcgacgcggacattaacttcagtctgagcgactacgaggatgatttgaagcagatgaggaattggaccaaggaggagttcgtgcacatactccggcgccagagcacggggttcgcgaggggaagctccaagtaccgtggcgtgacgctgcacaagt

SEQ ID NO: 318 - DNA, 1258 bp, Zea mays
  Clone ID: 700072325_FLI
gaccgcccatagaattttcatttcgccgcattattttttttcccttctcactccctccttcggtccttcgccttcctcatgtccccgactctccgatactagtcgagtagtccggtacatcacaccgcctcgcaccgcggccatgttgacaccgcgcgtcctcaaggcttcgctgctccgctgcttgcgcgctaccgccgagctgcctccgttgcggcgaccccggatcctacctgtgcgggtttaccattccagaggctattctagtgggggaagctccaagtatgataggccaatgagacagttttctgaacagaatgagtcaacctctcagccattaatatattacattgctccatctgctctgcttgcttttgctgggatagccacatttgttcattacaatgatgagaggcgtgcagttcccttcgctaaagtaccaggacagaccaatgttcccaaaagatgtactaccaatagacctgcaataggagggccatttaagctgtatgatacagaaaacaatgaggtgactgaatcaaagcttcggggaaagtggaatctgatgtactttggctatacatcatgcccagatgtgggtccagctgaagttcagaagatagctgatgttgttaaactgttagagtcaaagtacgatatcaatattacaccactctttgtcacaattgatccacaacgtgattcacctgctcagcttaaggcataccttactgagtttgacccaagaatagtaggactaacaggccccatcagtgcagtaagacagatagctcaggagtaccgtgttttctttaaaagagtagaggaagttggtcaggactatcttatagaaagctctcacaatatgtacttgctagatccatgcttggagacagtaaggtgctttggaagtgagtacgaggcatcagaccttgctgaggctataacaacagaggttcagaaagcatctgcctcatcaacaaattagtctagcggtatggcagcatcagcagttttccaatcttgccgtgaagcacctcgcctgttgcatagccctcacagaagggcgtgactcacagtgggctggccattcagctctgcctgcaaccaaccgatccaagttttcctattctcgctcttgttgtgtcagatctgagtttaactgtacagaatggtcttcttgcgacgaaatctcctggcagttccagatcacttacaattctgcgacatgagaatgatcttacaatttccagcaaac

SEQ ID NO: 319 - DNA, 501 bp, Zea mays
  Clone ID: 700072344_FLI
gctgtacggcacacgggtggctgtgctcgctggcgattttatgttcgcgcagtcttcttggttcctagcaaacctagaaaacattgaagtcatcaagctcatcagccaggtaattaaggatttcgcgagcggcgagataaagcaagcgtcgacgcttttcgactgcgacgtgaccctggacgactatctgctgaagagctactacaagacggcctccctgatcgcggcgagcacgaggtccgccgccatcttcagcggcgtgggcagcggcgtgtgcgagcagatgtacgagtacgggcggaacctgggtctggcattccaggtggtggacgacatcctggacctgacgcagtcggcggagcagctcgggaagccggcggcggggagcgaccttgccaagggcaacctgacggcgcccgtgatcctggcgctgcgggaggagccccggctgcggggcatcatcgagtccgagttctgcgagcccgggtccctggcggccgc

SEQ ID NO: 320 - DNA, 1674 bp, Zea mays
  Clone ID: 700072352_FLI
gtccggctgtccctgtccctgtccctgcgcatcaatcaatcccacggtcttcctgccgcttcctcggctgcccccatcctccgaatcctgcctcgcctcgatctccccgttcctcgtgttccgacggagggtggcgggcgactaatggggacgggggcggggagcgcgcgggctctggccgtggcgttcgccgtctcgcttctcgcctgctctggcgccgtcgctgtcgccagggcgcaggacaccgagcggatcgaaggaagtgctggtgatgtgctcgaagacgatcccgttgggaggctcaaggtgtatgtctacgagttgccgaccaagtacaacaagaagatggtggctaaagactctaggtgtctcagccacatgtttgccgcggagatcttcatgcaccgcttcctactgtctagcgcgatccggactttaaatccagaagtagccgattggttctatactccggtatacaccacgtgtgatctcacaccgtggggtcatcccttgcccttcaagtcaccacggataatgcggagcgcgattcagttcatttccaaccggtggccatactggaacaggacagagggagcagaccacttctttgtcgtgccacatgactttggcgcatgcttccactaccaggaagagaaggccatcgagcggggcgtccttccgttgcttcgccgtgctacactggtccagacttttgggcagaaggatcatgtctgcctgaaggaaggctccatcaccatcccgccatatgctcctcctcagaagatgaaaacccacctcgttcccccagggacccctaggtcgatcttcgtgtatttccgcggtttattctatgacactgcaaatgatcctgagggtggttactatgcaaggggcgcccgtgcatcagtctgggagaacttcaagaacaacccgctcttcgacatctcaacggaccacccacccacgtactacgaggacatgcagcgtgccgtcttctgcctgtgcccgctgggctgggccccgtggagcccccgtctggtggaggcggtggtgttcggctgcatcccggtgatcatcgccgacgacatcgtccttcccttcgcggacgcgatcccgtgggaggagatcggtgtcttcgtggccgaggacgacgtcccgaggctggacaccatcctgacgtccataccgatggaggtgatcctccggaagcagaggctgctcgcgaatccgtccatgaagcaggccatgctgttcccgcagcccgcccaggctggggacgccttccaccagatcctgaacgggctggcgcggaagctgccgcacggtgaggacgtgttcctcaagcccgggcagaaggtgctcaactggaccgagggcccccgcggcgacctgaagccatggtaggtgtactggaaaaaaatgccatggcaccgtcagcgtgtccgctgttcttgtgtacgctacacagcacaaccagatgggaagctgatcgacgacgaggacgatgagtactcccatgtcactgatgtaaatgtaaagcgtcttccagcccaccaggcactgtgcttcttcaggcgacgtgtctggtttgcttgtgttgtgtctgttctgaactttactttagcgttaacctattaacgatcggagatcatgtaatttatggctgttgtattc

SEQ ID NO: 321 - DNA, 1990 bp, Zea mays
  Clone ID: 700072384_FLI
gagagatagaacacacaaggggagaggggtggggaagggaaggcgaagggaggcgcactcgtcccgtctggtgctctggtatcgtctccccccggcagggaaggagtagaaggaaggagagtacgtaggaggaggaggggagaatgcgtgtcggcggcgggcgggacgacgacgacgaggtgtcccggaagctcaagagcatggacgtggacaagctggagaacggcggcagggaggagagcccgcggcccgccgtcaagtaccacggctggaaggccatgccgttcatcatcgggaacgagacgttcgagaagctggggacgctaggcacgtcggcgaacctgctggtgtacctgacgcaggtgttccacatgcggagcgtggacgcggcgacgctactcaacgggctcaacggcaccaccagcctcgcccccatcatcggcgccttcctctccgacgcctacctcggccgctacctcgcgctcgccatcgcctccgtcgcctccctcatcggcatgttcctgctgacgatgacggccggcgcgaacagcctgcacccgccggagtgcagcgtgggcgagacctgcgagaaggcgacgtcgtaccagttcgcggtgctcttcgtggccttcgcgttcctggtgctgggctcggcggggatccgcccctgcagcatgcccttcggcgccgaccagttcgaccccaacacggagtctggcaagcgcggcatcaacagcttcttcaactggtactacttcaccttcacggccgccatgatgatctccgccaccgtcatcatctacgtgcagagcaacgtgagctggcccatcgggctgggcatccccacggcactcatgttcctggcatgcgtgctcttcttcatgggcacgcgcctatacgtgcgggtgacgcccgaggggagccccttcaccagcgtcgtgcaggtgctatcggccgcgctcaagaagcggtcgctgaagcagcccaaggacccgaagcaggacctcttcgacccgccgcgtccttcaccgtcttcgccatgctcgcgcagacgctgtggatccccttctacgaccgcctcctgctgcccaagctccggaagataaccggcaaggaggaggggttcacgctgctccagcgccagggcatcggcatcgcgctctccactgtcgccatggtcatctcggccatcgtcgaggaccggcgccgtgccatcgcgctcagccagccgacgctcggcaccaccatcactggcggggcgatctcggccatgtccagcctgtggatggtgccacagctcatgatcctggggctgtcggaggccttcaacctcatcagccagatcgagttctactacaaggagatcccggagcacatgcgcagcgtggccggggcgctcgccttctgcaacctggcgctcggcaactacctcagcggcttcctggttaccatcgtgcaccggacgacggggtccgggcagaactggctggcgcaggacctcaacaagggccgcctcgacctattctactggaccatcgccggaatcggcgtctttaacttcatctacttcgtcatctgcgccaggtggtacaggttcaagggggccagcaactgatccgccgaggtaaccgtcgtctcaggatcacgacgagtgcgggcatgaatgggactcagctctatgcggtcctgatgacagtttgcttggtggcttgggtaattatgttatggccttggcagagcaacaggaaaaaaaagggccttaaaataaggtcatgataattattttgtatctaccatagtagttgtttgatatcgacgcctctctctctctctctctctgttattactttatatttttgttactgtcctttcatttgaatctataggatggtcaaagtggctgatgaaagaggagaaagaaacaaaacagttggtttcttgttacttgtaagtggttaaactgaaatacaaatggatgtaagattgaatg

SEQ ID NO: 322 - DNA, 526 bp, Zea mays
  Clone ID: 700072404_FLI
attctcgcgatgggagcggaggaagcagagggtactcccccgccgctgcccgccaccggcgagcccgcaaccacggcaagggcgcagccaatatctgcagcacaattcctctcctggaagcagcgcaaggatgcagaggtagccgcaaggaaagctgaagcagctgagaagcgagctgatgatatcgcttcgggagcggcgcagatgaacggccgcgagctgttccaacatgagccctgggtgttcgacaacaacatttactgagatcgtgtcgggctactgttcctgcattagtccaagctccagcggtggtttcattttgtactgctatatcagctttgcgaaactgtggattttatttcaccgtttctaagattattctctcaataggtaattgaacttgtttcaaatacgttttgccaaatctttgtgcagtcaccgaatggtatctagtgtcgctattctttttctaaaactcttacaaacaaagagtattggtcggaagagaattctcgatcttcagatt

SEQ ID NO: 323 - DNA, 1565 bp, Zea mays
  Clone ID: 700072444_FLI
tcataaacgaagtgctgggccagacgagttagattctgatgagaaggcttaccgttgtgcctctcatgagatgcatatatttggtcccatcggtaatggtgcaagcagtgtagtggagagagctatatttattccagttcatcgaatcttggccttgaagaagataaacatattcgagaaggagaagaggcaacaaattctgaatgagatgagaacattatgtgaagcatgttgttatcctggtttagttgaattccagggtgcattttacatgcctgattctggacaaataagtatcgctcttgaatacatggatggtggttccttggcagatgttataagggtcaagaagtctataccagaaccagttctttcacatatgctacagaaagtattgcttggtctgcgatacttgcatgaagtaaggcatctagtgcatagagatataaagccagcaaatttactggtaaatcttaagggcgaggcgaagattacagattttggtgtgagtgctggtttggacaatacaatggctatgtgtgctacctttgtaggcacagtcacatatatgtcacctgagagaattcgtaatgagaactattcttatgctgctgatatttggagtcttggactaacaatattggaatgtgctactggaaaattcccatatgacgtaaatgagggccctgcaaatctaatgttgcagatacttgatgatccatcaccaacaccaccagtagatacttgttcattagaattctgctcattcatcaatgattgcttgcagaaagatgctgatgcaaggcccacatgtgagcagcttctgtcacacccattcatcaagaggtatgcaggaactgaagtggacttggcagcatatgtcaaaagtgtagttgacccaacagaaaggctaaagcaaatagctgagatgcttgctatacattactacctcttgtttaatggacctgatgggatttggcatcatatgaagacattctacatggaacaatctactttcagtttctcagagaacgtgtatgttggccagaatgaaatttttgatattttgtcaaatataaggaaaaagctaaaaggtgataggcctcgagagaaaattgttcatgttgtcgagaagctacattgtcgtgcaaatggtgaaactggggttgcaattcgtgtgtctggatctttcattgtgggaaaccaatttcttgtatgtggcgaggggataaaagctgaagggatgcctagcttggatgagctctctattgacattccaagcaaacgcgtaggccagttcagagagcagtttatcatgcaaccgggaaacttaatgtcatgctattacatatcaaagcaagatctgtacattatccaatcctgattgaacatattatttgtaagattattctctgaagcacatgtatagaggatttagaagaattcctttcggacctggttttgaatcttatttactttgtggaactgaaattttgggccaaacctctgacaagaattgaaaagtttaagtcttcaactatattcatgtttagaactgtttttat

SEQ ID NO: 324 - DNA, 1513 bp, Zea mays
  Clone ID: 700072490_FLI
gtccttggattcgatgtctttagtttaattgtttggatacggtacaagttacatacatacgatcgaaattgcatgctaaaattaatttcctcgcacccaaaaattacagttcgcatgcagtacacaccgcacacgacacagttggcgctgcacacgccgggaacgcgcaagtgcaaaggtgggtcgacgtggacggccggccaaatggcaaatgaaatggtcgtccggacgtcggacgtgcggctagagggagtagagcttcctgaggttcatgggggagatgtacttggagtcgccgtcgacgatgtacttggcgagcagcacgttggcggcctcgcttgggtggtacgggtcccagaacacgtgcttgtcccgggcgtcgcacaggctcgtcgtcggcccgcacggcaccagcccgtcgtacgacccgccgttgccgcagcacgccacgctggccgtctggaacccgtagttggggtagttggtgatgagctccatgacgaggtcgtagacgttggcgaggcagaacctggcgccggggaggccggcgttgaggtcgatgatgagctccctgagccgggagttgtactgcccaaccagctggcggcgcagtacaactcccggctcagggagctcttcttcgccctcaacgccgtcctccccggcgccaggttctgcctcgcctacgtctacgacctcgtcctggagctcatcactaactacctcaactacgggtttctattgagttgtattagttttttgtttatacatggttattaattgtttctttgataatttttttttcttcttatatttttttttttcgttcttttattttatttttttttttttatactatctttatttatattgtttttttattacttctttttttttttcattttattttttttgattttttttcttaattttcttgttttttattgtttctttttgcttctttatgttttatagtccttctatgttattttaatttctcttctccctcttttcttcccatcttttttgcccttttctttcttcctcttcctcttcctctcttttttccctctttctttttttcttcatctttctccccctcttcttccttctctctttctcctccaccctcctctcttcttcttttctttttcttctttctttttcttttctctctttctttttcttttcttctttcttctcctcttcttatttttttctctttttttactttcctgtctctcatcttctttcttgtcctttcactcttctctcctcccctctctcctttattttatcttctctttgtctcccttcctcgtcctcccatctctcacctttcctaacaccggattccacgtcctttatccctctcttcttctccttttatctctttttcacattcgtcctccttccttcttcacccctcttctttttatccttctctcctaactcatgccctgtcttcacctctcctttcatcttctccacttccccttctcccccacttttt

SEQ ID NO: 325 - DNA, 2848 bp, Zea mays
  Clone ID: 700072496_FLI
aggtggtctgacatagactatccacaattcagcgccaggtctcagggagcgacctaccccaaggtggggagttcgttccttttccagtaacgaggagggcaaactcatattccatcatgatggaagaggacatggaaaatggaaggtcgtatcaagaaagaccaaggactttttcaacagtacgaagcaagtcatctatcccgctggccttacgtttgttgatgaggataaatccccgtgccttgattattctttctcttttggtattcagtggtgtgctatatgtgggagccagtacatcaccaattgtggtctttgtgttctgtatatgtactctcagtctattcttctctctctaccttacaaagtgggttcttgctaaggacgaaggaccaccagaaatgtctgagatatctgatgccataagagatggtgctgaagggttttttaagacacaatatggaactatttctaaaatggcatttattctggcctttgtcatccttggcatttatctctttcgcactactaccccacagcaggaggcgtctggcttgggaagggcaacactagcctatattacagttgcttcttttcttcttggagcattatgttctggaatagctggctttgttggaatgtgggtgtctgtgcgtgcaaatgtacgagtttcaagtgctgctcggcgctctgcaagggaagcattgcagattgctgtccgtgctggtggtttctcagccatcgtagttgtttgcatggctgtatttggcgtggcaatattgtactcaacattttatgtttggcttggagtagattcacctgggtcaatgaaggttactgacttgcctcttctccttgtgggatatggttttggtgcctcttttgttgccctttttgctcagttgggtggtggaatatacaccaaagctgctgatgttggagctgatctggtcggaaaagttgagcagggaatacccgaagatgatcctcgtaacccagctgtcattgctgacttggttggtgacaatgttggagattgtgctgcccgaggcgctgatctttttgagagcatagcagcagaaattatcagtgcaatgatacttggaggaactatggcacaacgctgtaaaattgaagatccctctggctttattttgtttcctcttgtcgtccattcatttgatttggtggtgtcatcagttggaattctctcaatcagaggaacacgtgactctggactcatttctcctatcgaagatcccatggcaattatgcaaaaaggctactctgttactattatgcttgctgttcttacgtttggggcgtctactcgttggcttctgtacacggaacaagcaccttctgcatggctgaattttgcattgtgtggcttggtggggatcgtcacagcatatgcttttgtttggatttcgaagtattacacggattataaacacgagccagtccggcttttagctctttcgagttccacaggacatggaactaatattattgctggagtaagcttgggaatggaatcaacagcactaccagttctagtgataagtgttgccattatatcagcatattggctggggcagacctctggcttggtggacgagtctggcaacccaactggtggtctttttgggacagctgtagcaacaatggggatgcttagcactgcagggtatgttctcaccatggacatgtttggtcctatagctgacaacgctggtggtattgttgagatgagccagcagcctgaaagtgtgagggaaatcacagatgttctagatgctgtgggcaacacaactaaagctactacgaaaggatttgccatagggtcagcagctctggcttccttcctcctgtttagtgcatatatggatgaagtagcttcttttgctcaattgccattcaaggaggttgatatagcagtcccagagatttttgttggtggtttattaggctcgatgcttatattcctgttcagtgcatgggcttgctcagcagttggcaaaactgcacaggaagttgttaaagaggtcaggagacaatttattgagaggcctggtatcatggactacaaagagaagccggattatggacgctgtgttgcaattgtggcatctgcatccttgagagaaatgataaagcctggagctctagcaattatatcacccatggccgttggcgttgtcttccggattttgggccactacactggtcagcctcttcttggagctaaagttgtagcctccatgctgatgtttgcgacggtcgctgggattctcatggcactcttcttgaacactgctggcggcgcctgggataatgcaaagaagtacattgagactggcgctcttggtggcaagggcagcgagtcccacaaggctgcggttactggcgacacggttggagacccattcaaagacactgctggaccgtcgctgcatgttcttatcaagatgctcgccacaatcacgctggtcatggctccgatattcttgtgattaaccaaccactcatcaagcttgctattaaccctgcggagatgtacctatgcgaccaggtagatgaggtgtgtgtgtgtgtgtgttacctgcatgtgatgatgtaacggtccaatcggtttgtgtcacgacatgctgtacccagagaaagaagcggcgatctatacccatgtctcacggtagatattatactgatgatgcaaatgccgtgttttgttactgaattagtggcctgaaagttgcgcttgttgattgatgaaacattatggtagcgtacttgtatgctgcatcccacaatggattttatgatgtggaccccgaatgttttgctt

SEQ ID NO: 326 - DNA, 1094 bp, Zea mays
  Clone ID: 700072504_FLI
caccgggcacaccccccgagctcagcttagctccactccagctccaatcacagtcgtgaccagagcgcgagagctagctagagggccgtgaaaatgccgatcaataggatcgccctggggagccaccaggaggtgtaccacccgggcgccctcaaggcggcgttcgctgagttcatctccaccctcatcttcgtcttcgccggccagggctccggcatggccttcagcaagctgaccggcggcggcccgacgaccccggcgggcctgatcgcggcggcggtggcgcacgcgttcgcgctgttcgtggcggtgtcggtgggcgcgaacatctccggcgggcacgtgaacccggccgtgaccttcggcgccttcgtgggcggcaacatcaccctgttccgagggctcctgtactgggtggcgcagctgctggggtccaccgtggcgtgcttcctgctccgcttctcgacgggcgggcaggccacgggcaccttcgggctgacgggcgtgtcggtgtgggaggcgctggtgctggagatcgtgatgaccttcgggctggtgtacacggtgtacgcgacggcggtggacccgaagaagggcagcctgggcaccatcgcccccattgccatcggcttcatcgtgggggccaacatcctggtgggcggcgccttcgacggcgcgtccatgaaccccgccgtgtccttcggccccgccctcgtcagctgggagtggggctaccagtgggtgtactgggtcggccccctcatcggcggcggcctcgccggcgtcatctacgagctgctcttcatctcccacacccacgagcagctcccctccaccgactactaaaagccgaagccgaccgacccaggggtgcgcagcgcagcgcagctagcatccagcgctctctccccgctcgccgccgtttagtttctctcgtgcacgtgcatgcatcgtagactgtctcaggccgccgctgcgccggcgccgctcgcatcgtttgcttccttggaccagcagtcgtcgccgtcaggctgaactgcttgtaaccgtgaattccggacccgtttgcttctgtaagatttgtgcatttgcct

SEQ ID NO: 327 - DNA, 2446 bp, Zea mays
  Clone ID: 700072506_FLI
gatgttttcacgaaacctgaccagtagccgtcctcgtcttccacgttgtgtttctcgcccacctatctatatttatcataaaaaacagccaaatcgagcgaggcgacgagggcgagtagtagttggcgagttggagcaggtctgggtctggccgtgtgagttatttcccagccaggcatctgagagctttggtcttgacctcgacagagatcgccatggacgcatcggcggaggtggaccacctcgccgccgagaggtcggccgcgcgcttcgatgtcgaggcgatgaaggttgcatgggctggctcgcgacacgccgtcgaagtcggcgaccgcatggcccgactcgtcgcgtccgaccctgtcttccgcaaggataacaggaccatgctctccaggaaggacttgtttaaggacactctaagaaaggcagcccatgcatggaagcgtattgtggaactacgtctcacagaggaggaagcaggtatgctgaggctatacgtcgatcagcctggttatgttgatctgcattggggcatgtttgttcctgctataaaaggtcaaggtactgaggagcagcagaaaaagtggttaccaatggcttacaagttccaaataattgggtgctatgctcagactgaactcggtcatggctcaaacgttcagggccttgaaacaactgccacatttgatccaaagactgatgagtttgtcatccacagtccaactctgacctccagcaaatggtggcctggtggcttggggaaagcttccactcatgcagtggtgtatgctcggctgataactgaaggaaaggactatggtatacatggtttcattgtgcaactgcgaagcttagaggatcactcccctcttcctggtattactctgggtgatattggtggaaaatttggcagtggtgcatataacagtatggacaatggtgttctgcgatttgaccatgtgcgcataccaagggatcaaatgttgatgaggctttcacaagttacaagggaggggaaatatgttcattcagatgtcccaaagcagctgctttatgggacaatggtttttgttcgccagacaatagtcgcagatgcttctaaggctttgtcccgtgctgtttgcattgctgtacgatacagcgccatccgaaagcagtttggctctcaagatggtggccctgagactaaggtccttgattacaagactcaacaaagcagactctttccgttgctggcttcagcatatgcatttagatttgtgggtgactggctgaagtggctatacatggatgtcactcagaaactggaagctaaagactactcaacactgcaagaagcccatgcctgtactgctggtttgaaggctgtgacaacatctgcaacagctgatgccattgaagaatgtagaaagctctgtggcggacatggttacctgaacagcagtgggcttcctgaattgtttgctgtctatgttcctgcttgcacttatgaaggagacaatattgttctgcttttgcaggttgcaaggattctaatgaagaccttatctcaattgacatctggaaaacaacctgttggtacaatggcttacatgggcaatgtacaatatctgatgcaatgcaaatgtgctgttaacacagctgaagattggcttaaccctgttgccatacaagaggcgtttgaagccagggctctcaggatggcagtaaactgtgcccagaacataggccaagcagcaaaccaagaagaaggtttctatgagcggtcccctgatttgctagaggctgcagtagctcacatccagttggtcattgtaaccaagttcatttcgaaggtgcagcaggacattcctggacctggagtgaaggaacagctccagaacctttgcaatgtctatgccctctacattctccacaagcacctgggcgacttcctggcaaccgggtgcatcacacccaagcagggagcgctggcaaacgagcagctgggcaagctttacgcacaggtgcgtccaaatgctgttgcgctggttgatgccttcaactacacagaccactacctggggtctgtgctggggcggtacgatgggaatgtgtacccagcgctgtacgaggaggcgtggaaggaccctctgaacgagacggtggtgcccgaggggtaccacgagtacctccgccccttgctcaagcagcagctcaagctctccaggctctagtctgatcggctaccccccctggaattctccatggcggctgccttctcagaaaatctcacgcgacctccgaatgaaagtgatgtaagctactaacgattcttgttagagccaggaaagaggctctccagccaattataaatttattcctcaagctctgaggatcaagttcaagctgtggattatataggaagcacgtttaataattaataaagagggagaggatgagc

SEQ ID NO: 328 - DNA, 494 bp, Zea mays
  Clone ID: 700072523_FLI
gctaccgttccactctcgtgcgctcttgttttcttctctccgttgccgccctacgtcaggtgcccaattctccattttcgggcccttctccagcgacgagcacccgccagaggattatggattggctggggcagaaacgcgcggagatgctgatgcaggtgctgctggtggcgtctgcggtggtggcgttcctggtgggctacgtgcgcgcggacttccagctcatgctgctcgtctacgccggcggcgtcgtgctcacggctctggtcaccgtccccaactggcctttctacaaccgtaacccgctcaagtggctcgacgctgccgaggccgagcgccacccgcggccccaggtcagcgccgcccccgcggcagggggtaagaagaggtccgggaagaacaagtagttggtcgatgtgtgtgttcttggtcgacctgactcaacctgtttaagatctattcgcagaactaatcaattataaaaagagatattg

SEQ ID NO: 329 - DNA, 1937 bp, Zea mays
  Clone ID: 700072524_FLI
aaaagatacaacatcttttgagactacttctggagtgtacccttctcctgatgatgcggatatagaggattctgttgcaggtgaaactaatgaagcaataagtcgtggtccgaacaaacttaaacatgtttggaaccttcaaaaaggaaaacgaattgtagttaactgtaacgagctcggccaacctattggagaggaggcaggagtcttaggaaaattccttggcatggttgctaggaatggctgcttatgtagcttaagcttcaaagattggagattactgataggaaagaaggacaggaacaatgaacaaaaaaacaagcaagatgtactaaagcaagtaaagatgagattcctataccctgcccgcatggaaaagtggatacttcgaactattggtgagagatggagacaacacaagtccaatctaaaatccttacattttgatgcgcataggagcaaggaaaataatctaaaaaatgttccagaaggcgtcttagatgatcaatgggtcgctcttgtgaataattggtttacaacaaaatcacaggatatcagtgaggcaaataggataaactgcgcaaaaaggaaggcgacccatacatcaggaacaaagagttttgctcggaacagggaagatatgagggaacaagatccagaaaagaaatacccccatagggctgtattgtatatcaatacacacaagagtaacatcacaaagaacagaaacccacatgtggttgcattgaaggaactattagtgcagcaaccaagtttagctgacactagtcatggaaaggttgcatggaaaggagatgcgcttagccaaattttaggagaagagaagcctggccatatccatggtcttggccttgttccgaatccagatcaagtgtttggtggatcaacttcaaggcatctaaaacatcttaatttaacctctttggatgcaacatcaagtgaagatgtagtatctcttcgacttcaagtggaaaaacttatagatcgtgtccagaagcaagatgatactatactaaatttgcaaaataccttggaactgcaaaaaagtcaccatgaatgtctagatgaacctttgtcggcatcaaaagatcttcagccgactatgaatcaaaaagttaatcttcttgacgaactgaatagcacaatggcggatgaaatcgaacatgatgggtacgaggagctgcaggcccagtgcaaaaaatctaaaattcaagaaaagggcaagccaccaatgccacgaggaggactccaaggtggtagagtttctacatcgttaaatgtaaaaaatagaagtaatgcagccaaggtgatgaaccaggacactgctcgaaattcctctaatcatgaaccatacaagagcaagggatctctagaaaattatttgccaagtactaaagacgatcagtctacatcaaaacgaaaagttggttctcatattttcttgatgagttggaggaatcaaaataagaaggttgcattaggtacaataattggttgtgatccaaagcaacaagttggaggagatccattgggcaaagaattttggaaggttcgtctcggtcttgtacttgtgcgtgatgaaccactaatacggccctacaacaatttcgtggttctaggagacataaacaacgaccctatagcatggccttcaagttgtatagaaaaggcagctctttaatgtcaaccattgaacaacagcagatctacatgagggctatgactttgattcttctttaaattagcgttattagtgatgagagcgatgagtctactgagtccggtttatgagtcaacctttgtttgtttcatactatcatagaaaaaatgtcaattcacacattgtgtaatgaattaagttgtggatgatattttataacgacactactatttttaatatagactgattccagatt

SEQ ID NO: 330 - DNA, 713 bp, Zea mays
  Clone ID: 700072550_FLI
gaagagttctcggcttctcgcgagtcgcgacagagagaggcggagttgcggagaatatgcagagcagcagcatgaagagggagatcagcgaggcccacgacaccattcgcttcggcatcaacgccggcgtcaaagccgacctcgccccgccgcacccgctccagtctaccatccaatcggagaccaagttctgggcggacaagaagaagttcgggacagatgccatatatggatccgccctcaacatccgcaaggatctcgatgcccaaatcctctccaggttccaaaggccccctggtgctttgccgtcatctctgcttggatacgaggcactgacaggttccctggatgattttggatttgaagattatcttaacatgcctcatgattctgacagtttccgtcaacctgacatgcaccatggaatggaggttcgccttggtttgtccaagggacctatctgtcctagcttcaattgaggcagtaatgtaattctgctgcaagttcacctctcagtccagtacttcagtcaatagaccatattaagatggtgaaatatgaaaactggtagcttgcatctgttcaatgttatgttttaatcaacgctgaatttaatatttgtcaagtttgaacttttctggtttccttgccactgcgaggccatggaagcgaccaaatttatatatgtttgatgcgggttgtccatggttgcc

SEQ ID NO: 331 - DNA, 1288 bp, Zea mays
  Clone ID: 700072563_FLI
gcagcggtcgcttactcgcatcgcaggctcgcagcgcactcgcgccacagtcggcatcacagaccagatccctgcgggtgcggcggccatggccgagaacttccaactccagggccggcacggcaagtcccgcgtccgcgtctcccgcgtctggcgccgcccggccgcggcggggggcgacgtcatcgttgagtggaacgtcgccgtcagtatcgtctccgactgcctcccctcctacacctccagcgacaactccgccatcgtcgccacagattccatcaagaacaccgtgtatgtcaaggcgaaagagtgcacggaagtggtgtccatggaggaattcgccgtgattcttggaaggcatttcacctcgctgtaccctcaggtttcagaggccacggtgactatcgtggagcgcccatgggagcgtgtgactgtcgacggaaggcctcattcgcatgggttcaaagttggtgttgagaagcacagcacagaggtcattgtaaaaaaatctggaagcctgcttataaattctggaattcaaggatactcgctgctgaagacaactcagtctgggtttgaagggtttgtgacggatcgctataggcttcttcctgatacaagggaaaggatagtagcaacagaagtaactgcttggtggaggtatccctttgaacatgtttcgcagctcccatcgaagaagccattctgcttcacgcagagataccaggacgtaaagaaagtccttgcagagacgttctttggtcctccggatgttggtgtgtatagtccatccgtacaaaatacgctatacctcatggccaaggaagtccttacaaggttcccagatatagcgtcagtccagcttagaatgccgaaccttcactttctgcctgtcaacttggggagcaaagaagctccgctggtgaagtttgctgatgatgtgtacctgccgacggatgaaccacacgggacgattgaagcaaccttaataagccgtcccatgtcaaagctgtaaaaaaaatgtagtcgtcaggctggtattagactcctgcttcgtctccccagcatccccaggcttaaaatggacagtaagctgtaagggaaagataaaactatcataaatcgtagcccctatgctttatgtggtggtggtaataagtggacatacttgtattggatgttgtcagctgtagcctgtaggcgtccagcttgtgatgtttcgccactgtaatcgtgtacattgctcgtcttgtgtggaaaccagttaacatctttggaagctttgctc

SEQ ID NO: 332 - DNA, 1542 bp, Zea mays
  Clone ID: 700072585_FLI
gcgctgggcggtgcccgggcgttggataggagaggtcaagattcaagaacgacgacacgccgaagtagcagagggatccgttggcctcccgtacccagcccccttctaccccttcgtcgacggctgggattgcggcggcgcccttgtcttcgccggcgacgagcatcgccagggacttccgattggggggggcgattgcggagatgggctgatcagaactgcgacaaggtccggttttctcctccaaattgtggtctctggaggtggatttgctttttccgtagccgcagatggacgacgacgatggcagcctgggcattcggaattggggcttctacgacaccatgaagggcaacctaggcctgcagctcatgtcgtccatgccacctgaccgggacacgaagccactgctcccgagagctggtttcttgcagcagcatgggcatcacaatgcatcgcaccagctccatgcacagcagtcgcaacattatcgtgattccacttgcggtggaggagcctctggtggcatgcccaccgagcagcactctatccacatggacttctcacgcaatgaagcttggctgcacccatcgcaccaccaccaacatccccatgaccagaaggtccttcattctcgccctaccgtaccagctgggcatgttgggcatccaggccatggtagccatcctgtgcatggtgggcatatcgtgcatcaccatcctactggctatgggtcaatatcagatgcacaacatactctccagatgatgcaaccacagcttgagtcacagcttcaggagcctcctccatgcaagggagacgaagcgccacctccgccaattgaggatcactctgtggttagtaccgggccacctgtgaaaaagaggcagcgaggccagcagcagagtcggcagcctaagtcaccaaagcctaagaagcctaagaaggttgctgttctgccagagggtggggcacttaatgggcatgcaccccgtaggaggggccctaagaaggctgtggggatggtgattaacggtattgagttggaccttgccaacttaccaacaccagtgtgctcatgcactggaactccccagcaatgctatcggtggggtgcaggtggctggcagtctgcatgctgcacgactgctatttcaacgtatccactgccaatgagcacaaagcgccgtggcgcacgtattgctggaaggaagatgagccaaggcgcattcaaaaaggtgcttgagaagcttgctggtgaagggtacaaccttgttaatccaattgacttgaagacattttgggctaagcatggcacaaataagtttgtaacgatcaggtaatgagaaaggcttgctatgtttgccactttgtaggttgtagtgctgcagttaggcctgatttattgcttgtatgtctatgtgccaatctgcagacatttgtagaagtagtttgtagccatgtttagtttcatccacttaattgtcatgcctatctcgactctcgagcttcagatattgacccgactgaagtctttgtatc

SEQ ID NO: 333 - DNA, 945 bp, Zea mays
  Clone ID: 700072603_FLI
aattaagttagctttattattcaaacatgtagcggttgtacgtatttgatgtagagccggaactcttgtttccgtaataaaaaaaactgatcatcaaccaacaaacaaacaaacaaacagaaagaacctctctccctccgttcttggccgcctagcgtcgcggtatggcgaagacgcggaacccaccgggtcctggtctccttcctggcttccaaacgaccaaaccccacggtgcggcacggcaaaaccacccccccggtagccggctagcggtcacggcgcacgcgagcaaccatgcccacacacctccctaccaccaccacagggcacgaacacaggcgccgcgcggcgtgtgtccaaggagagattctgatacatcggcaagaaacatgtttgtgccatcaaggccaggccaggaaacacaaacacccacgcctcgcgggcccggccgccccctcgccccgcccgcatcctgtcgacgacgacgacgacgtcgtcgtcgtcgccctctttcctttcccccacagccgcggctccatacgaccatacggcagccagctagtctagcttctccgccacagttcatcacggcgcaggcgacgaaaagctgccgagccaccatcaggcaccagcagaggggagcaagcgagcgaccacgcgggggaccgcgccaccgagccactcccctccctccctctctcttcgcctccggatctcgcatgcgcggtggccgccgccgccgccgcgcccgacggaggagggcgaggagtcagtgagggcgctggccggcggcgtgatggggggagcgcagctggtggggagatgggtggagtcgtacacggggatgtcgccggacaacatcaagggcctgctgctcgcgctctcctccagcctcttcatcggcgccagcttcatcgtcaagaagaaggggctcaagaaggctgg

SEQ ID NO: 334 - DNA, 1003 bp, Zea mays
  Clone ID: 700072612_FLI
tcgcgtcgcgattcgcgagggctccccccaaccccatcaagtctggccaggtctctcccatatcgggttctcccttcctcttcctgtttccgcgcgcgagatcgccgccccgggtgggctctagatcccgatggcctcgcgccgccgcaccctgctcaaggtcatcatcctcggcgacagcggggttgggaagacgtctttgatgaaccaatatgtgaacaagaagttcagcaaccagtacaaggctacgattggggcggatttcctcaccaaggaggtgcagttcgaggacaggctcttcactctgcaaatatgggacactgctggtcaggaaaggtttcagagtcttggcgttgcattctaccggggagcagattgttgtgtcctagtctatgatgttaattctatgaaatcgtttgataatcttcacaactggcgtgaagagtttctaattcaggcgagcccatcagatcctgacaatttcccttttgttctgttgggtaacaaagttgatgtagatggtgggaacagccgtgtggtgtcggagaaaaaggcaaaggcatggtgcgcctctaaagggaacatcccgtactttgagacgtctgctaaggatggaacgaacgtggaagatgccttccagtgtattgtaaagaatgctctgaagaatgaaccggaggaagaattgtatgtgccagataccgtggatgtggtaggtggcaaccgggctcagagatcatctggctgctgttaagacatgaggcatccacgaggcgtggtgatcatcatcggctatgcagtgaccaaacaatacctcaacattgctgggcctccatggttatctacgtgtccgtattccatttgttacctttccagtctcctgctatgtacccaagggcgcatttcccatgctgtcagtcaatccgtagacttcatttgtgcagttccatcagtagcgtcataccttgtgaatacagttggacaaaataagagcaagcctgaactg

SEQ ID NO: 335 - DNA, 2429 bp, Zea mays
  Clone ID: 700072620_FLI
agcacaggtccacgcgggcgcggaggcaacgctatggtggctcgccgcttcgtggtccggcatggccccgcagccggaggatcagccgaggcggcggaggagcaacagcacgaggtggagtacgacacggagcacggcctcgacgtcctccgcctccagatcttttccctcaccgccgtcccgcccgacctccagaagatcgtggtggaggcggatgggtcggtggtggacgacggcaccgacctggaagccgtctctgagcgcctgcgcctccttgctatcggcgaggagggggaggacgacggggcagcggccagggcgcaggagaagtccgacgaggaattcgcacggatgcttcaggcggaagaagaggcacttctcctacaacagtacaatatacaaaatgatggtggagatgtgtttagacaaagagttgagccttacatgcaccaggttctgatgtatgaagattcagtgggacaagaggcagcacaaaagacagttccgatatgcgaactggaggagaaggcattagtttcactggccaaggaagggaatttcaatccttcgaaagatgaagagaagcatgcctttctgctgcaattgcttttttggtttaagcaatcattcagatgggttaatgcagcaccttgtgacagctgtggccgtgagacatccaatgttggaatgggcaccccacttacctcagaaatcaaatttggcgcttcacgtgttgagatgtgtaaccattgttctagtatcacccgtttcccaaggtacaacgatcctcgtaagcttatacaaactaggagaggtcgctgtggagaatgggcgaattgcttcacattctattgtcgagcttttggatatgatgctcgtttgattctggatttcactgatcacgtgtggacagaatgtttttcaaacttgtatggaagatggatgcacctagatccatgcgaaggagtctatgataatcccttactgtacgagaaagggtggaacaagaagttaaattatgttattgcgatttctaaagatggagtacgggacgtaacaaaacgctacaccagaaagtggcatgaggttctctctaggcgaataattacctccgaagaaactgttgtgtctgttctatcatctataacagggaagtatcgcacaggtttgtcacctgatgctctatcagtcatagaaaaccgtgaaaaggaggagtctgaggaacttagaaaatctgcttatcttcaagttgaaacggctttatccttacctggaaggcttagtggttctgtggaatggaggaaagcaaggtcagagttgggccaagcagattcactaagttgctcatcctgccctattcggaagtgtgtggatggtcatgtttcaaatatatatgatgctctttctgcttttctttcacatttttttgacaaaaaaatccctaaagaaagaattattgaagcttttgaggcattgaagactttgatgctaactcttaaaagttccaactttaagagcagaagtgctacattagaccagaaagcacaccatctatttgaggagatatttccttccattgaaagattgttatctgctatttcactgaaagcagaattgggaactgctggataccaatctgtgaccgtgtctggaaatccagtacactcatccttagcgttaccagtagcactggatgcagttaatgagatattgagtaattataagaataatacctttttcacagaaggcaatcatttcccaagagggaacagagtatgctcaggttcagtccttgcaagcagggaacaacttccaataggaattgcaacagcagcttttgacggcattcactcctccaaatgggaagagcctgatggagccaaaggatgttggctgatttatacaatgcaagatggcaaaagttgcgagttggagtcatatgatttgatgtcagctaatgatgctccagagagggatccaatggactggtaaaggttcttgaagggagcgcagacggaggctccacctggaatatacttgatgctcggaattcagaaatgttcgagagccgtttcttgaggaaaacatttacagtggataagagatataaggcaaatgctttcaggtttaggtttctacgcgtaagagattctcattctaatccaaggtttcagataggatcaattgatctatatgggaaaaccatatgaactccccccggagctgtgtttcacttttcggctttctgaactgctcggtctcacgagcctgtgtagtatcataaattcataatattgtaatgcgagcatttactgtggacgcaacgctctcttcagtatgaatagatactgaataattaagagcatgatatatattgtttgcgcgcgcgattgagttctgaaatataagtgaagtccctcgacatgatc

SEQ ID NO: 336 - DNA, 779 bp, Zea mays
  Clone ID: 700072623_FLI
tagaaggagatttgagggcgccgcgtgcgatgcccgctgcgccgccgccaacatctcgctgcaggggaagtatctcgtcgacatgctccacctgccctcccatgggtccgcccctggccggcctctaactcagctacaacaccctctagcggcatccagcaggagctggttgcagatcccgcagatggggccaagaccgtgcgcaagccggtcttcaccaccgtcgaccagctgcacccctagatgcatggccacactcttaccatccgcgtcatctctgcctgcaccatcctcgacaaatcctccatgcacattggtcgtacccgcatcgcccagtgcctcgtcggatacaacaccgacaccgtccttgtcacgcccgcaacaatcaggatacactcacggtgtgctggtgtgtgagtggaggaagagcttgatggaggatgagggagaggaatcagtagagcaaatgagcaagacgagacagatgtgtagctgttggtgtttctccactatcgcgacctcaatgcgcaagcatggcctatatagagtgacgagaacaccatggaattgagttgtgttgttgtggtgcggagtaggagtgtccaagcaaggagagaatcacaggcgatttctctcattgttgttctggcatcgtttctgattctacgtttaaacaaagtgtttgtctcattagggcgtgtttcctcactttttctcgcacaagaatctagtaaaaaggttctccaaataggctctttgactgctacagttcgtcgatt

SEQ ID NO: 337 - DNA, 1403 bp, Zea mays
  Clone ID: 700072641_FLI
ccagccaccgcagttcgccggtttgtggccgcctccgccgcagttcgccggtctgtggccgcctccctcctctgcagttcgccgatctgtggccgccgccgccgtcacctgtcagtcgtcgattggagcagccgccggcgcgacgtgaggtatgtgaccgtcagcctgccagtcgccggtgtgcagtgaggtctgtggccatcagcctgccagccgccgattggagccgccaccgcgaggtctgtggccgtcgttcgttgattggagccgccgcccgacgagccgtgggctcgtggccgatgccgccgtcgatttgtggtcatcagtcgctgattggagttgtcgcccgatgattggtgggtttgtagccgcccccgccaatagactgtgggtttgtagccgttgttgtcgatccgtgtcgcagtgccacccatcgatccacaggtcgacgccggtgtgtcttgccacctttgccacaaatcaatctgcaggtctgtgttcttatcttcccttcttgcttctcaatctgttgactgccacaactccggtcttgttagatcccatggcagcgaccagtgagttcaaatgtttctgcttctacatctactgaggccagtggcagcgaagactggctggagggaatggtcacagaatatcttgttgagacatttgctgattacttcggtgacgttaaaatgtatattgaagaaagaccatttcgaagatttgtggaggcttgcatagaagaaacaatcgtggtctatgttgatcatctcctttcccagaaaaactacataaaagaggaaacaatagagaggatgaggttagatgaagagaagcttatggatttctttagggaacacgtcaacgtgacaaaagttgaaagtagagtgcggattctggcagatatgagagatctagcttcagctgggagtttggatagctttactctcattttcacaaatatactggaacatcaacctgattgcccgcctgaggttgttgagaagcttgtggcaatgcgggaagacattccaagaaaggaagccaaggagattgtacaagaatgcaaagagatatacgagaactcgctcgtggatggcaaccctcgcaagtcaggttttgtgttcggcaaattgaagtgcttgacagcaaagaaaggcatatggaggaagcttgggcagtaagtggcgacttgcagcagagtggacgaacttatcaccaaggcaaagattgtacatttcacttctctatgatcattcttttttcgatgctactgttgggtttcacgtttatactatcagtatgtactcagcttgaggagcaaacatgtactttattcaataaaatggttgttatttgcaataatataatattattgcaagataggttcttcggctttc

SEQ ID NO: 338 - DNA, 714 bp, Zea mays
  Clone ID: 700072673_FLI
aaacaaatgaatgctacaagggtgccttatgaagacactacctggaaatattgctacagtgctagtcctcttgagatgcctgatgtgccaaccataaccctgacatttgctgcggacaagagcttgcaagctgttaatcctatcttgccatttaatgacaaacagggggcacttgccgggttctgcttagctgtgctgccatcaacagaacccattggaattattgcccagaatttcctggttggataccatgttgttttcgacagagaaagcatgaagctgggctggtaccgctccgaatgccacgacgttgaggacagcacgacggtgccgttgggcccatctcagcgcgacagtccagaggacctgttgccgtcgaacgagcagcagacttccccggccgtgacgcctgcgacggcaggcacggctccgctctcctgtgcgacgacgaatctgcagatgctccttgctagctcttacccattgctgttgctgacgatgtcgagtgtgttcttcgtctcgtgaacaaccgatatactactaatcgatagccttgtatattgtatgtgctttatttatggtgtttttttttctttatgtgttgctctagaggtttatagatcagctgtattttgcctccgttgttggtccctgggatagcctagcaatagcaatcccccgactcgaaatgcagaagtttcagaaatggtgcgg

SEQ ID NO: 339 - DNA, 917 bp, Zea mays
  Clone ID: 700072714_FLI
actgtgcccccgactgctctcactcagtctcagagacgttctcctccgtccgtccgcccccgtgacgcgagcgtcgccagggagccgaaagtaagcctcagttccgccggcgtgcgaggggttcgatctgggttagcctctcacgatgccgccagcccccaagtccggcgacgccctcttcgccagcgtggatcgcgtcaatgcggagctgttcacgctcacgtacggcgccatagtgcggcagctgctcacggatctggaggaggtcgaggaggtcaacaagcagctcgatcaaatgggttacaacattggaacacgattggtcgatgagttcttagcaaagtcaaatgtatcaaggtgtgttgacttcaaggagactgccgatgttattgcgaagcttggcttcaaaatgttcttgggtgtgactgcaactgtgaccaattgggatgttgagggtacaagttgcagcattgtcctcgaagacaaccctcttgttgattttgttgagctccctgacacttgccaaggccttcagtattgcaatttgttaagtggagttattaggggggcattggaaatggtgtctatgaagacggaggtgacatggctacgtgacatgcttcgcggggatgatgcctatgagatgcgggtgaaacttatcaagcaagtcccggaggaatacccctacaaggatgacgactagttctatctcattggaagatacaggacgcctgtttgcttgtttggattttttcacattgttgtcgttgacggattctagttctgctataacctgatgccatacgaggaagctgtggattatattttatactcgcagtgtgtattgtagaaatcatacatgatcttccatgaattgaggctttgaattatagtcagctgaattcagagcattagct

SEQ ID NO: 340 - DNA, 1759 bp, Zea mays
  Clone ID: 700072757_FLI
cgtactgcgggccgctgccgatcgagtaaaaaaaaaacgccgggcatcggccgcctcctacccccaaccccctccaccctgtcctcggacaggcggcgtcggtgcgccggcggtgccagcgcggaggcggaacacccagacagcccggaccttcagctgtctgcttctgcgtctggcttgcgggagcgatcccgtcttctgtcgaccagtcgtggactcaaactagagctggcttcgccatagacttctggaggaggcaacgggattgggaattggaacatggggagttcggtcggctgcttgggaggcggctccaagtcgaggcaagatcagaatggtcaggtcgtcgcgggttcgtctccccgttcaggtcatgaattatcaagacctggaaataatgtacatgtattctccctaaacgagttgaagactgccacacgaaactttcacatgttgaattgcattggccgtggggggttcggagcagtgtataagggaaacctgaaaaatggcactccaattgcaattaaaaaacttgcagctgagtcaaaacaaggaattagtgaattcttgacagagattaatgtcatatcaaatgttaggcacccaaaccttatcaagctgattggttgctgtgttgaagggagtaacagactattggtgtacgaatatgcagagaataatagtttggcgaatgctttgcttggaccaaagaacaaatgtatcccattggactggcagaaaagagttgctatatgtattggaactgcttctggccttgcttttcttcatgaggaagcacaaccacggattgtccaccgtgatatcaaggctagcaacattttacttgataagaagctgctgccgaaaattggagattttggattggcgaaactctttcctgatactgtcactcacattagcacgcgtgttgcaggaacaatgggttatttggcaccagagtatgccttgttgggacaattgaccaagaaagcagacatatatagttttggggtgcttcttcttgaaatgataagtggtgaaagcagcagcaagtcgacttggggacctaatatgcatgttctcgtggaatggacatggaagctgcgggaagaaggaaggctcttggaaattgttgatccagaactggaaaagtacccagaggagcaaatgcttcgtttcattaaagtggcactgctgtgtacgcaagccacgtcccagcagaggccgtccatgaagcaggtcgttaatatgctatctaaccaaacagaaattgatctgcaaaatgtagctccaccaggtgtgctgaaagaacctcggcagcgtaccggtggctttgggggtttgatagcagacacgtcctcaagccaaagcactaaaggcaacccagctgaatcatacagcacacagaccaacatgaacagctctcagtttagcacaactgatgtatcaccacggtgacgttgtcgactattgtttgacgtcttcagaggtgtctcgcgcctcccacaaggtttattgtgctgagcccggacaaaatcgcttgatatggaaggcctgatccattttcatcctgttttagagctacgtaggatgcgaaggccgctgtgaattgctgatgtacaggaattgtagctcatctgtttttcttttctgcggaggatgatttgcagttaaatttgacattttttttatgttctccattaaagcctgttgtaggtatacattgcaagagtacaagacatgtattcgaaatttc

SEQ ID NO: 341 - DNA, 750 bp, Zea mays
  Clone ID: 700072769_FLI
tgcatgactaccatcgtcggtgatggcaccgcagacggcaacgcgggtcgcctccggccggctcgtgttcggcgcgccaacaacaacagatggcaagctggtaaaaggtggaagcaggctgcgtgtgaggagccttgacaataatggcaggcgtgttgcggtggaagccgtcaacggcgctgccaggccgaacggcgcagcggcggtggccgacgtccggcaagtgcccgcgccgccgccaccggaaggcgacggcgacggcgtcgccttccggctgggtaagtttgcggaagggaggctcgtgtacaggcagcagtttgtggtcagatcctacgagatcgggcctgaccgaactgccaccatggagaccctcatgaacctcctgcaggagacggcactgaaccatgtgatgtgctctgggctcgccggagacggtttcggcgccacacggcagatgagtctcaggaagctcatttgggtcgtcacaagaatcaacatccaggtcgacgagtacagcagatggggagatgtcgtggagatagacacctgggtcgcgtcgtcagggaagaacggcatgcgcagggactggatcatccgcgaccgcaacaccaagaacatgatcgcaagagccacaagcaactgggtgatgatgaacagggagacccggaggctgtcgaaaatccccgacgaggtcaggcaggaggtgctccccttctacctggacaggagcatcatcgccgccgccactgg

SEQ ID NO: 342 - DNA, 1709 bp, Zea mays
  Clone ID: 700072777_FLI
ggcctttccttccttccttcctgtctggtcgcgttccattgctcaccctcctccattctccactggtgtcgtcgtttcgttccagagagctgtgaaaggcgtaaggcgaaacgaagcacgaggggcaggatgccgtaggtggcgaccgtttgtgccgctccgatcgtcgggaggtcggcgcctgaggaggccgtgctttgagttcgactggaggagagccttggcgccggtcgttacggcaagtggagccgtcgccttctacgcaactttgccaggcccgaatacttccgccagctgctgaagcccgttgccgcacgccttccgagcaacctcaaacccgaaccaaactaaccgaaacgcaatttttggattcagttcctagcaatccaaacacaaacacagccagggatcaagcaacacgactcgagtggtccaatgcagggagaccccggttacgggtacggtggctacggcgccggcgccggcggctacggctacgactacgactacgacgtcgccgccaactgcgtcggaggcggctactactcggcgccgaacgaccggtaccctgccgcgcctccgcctgctgcagcctatgaggatccgctcggtggtcggaggcagcacgacttcccggcgccgctcacggggctggagttccagccgtcggacacctgtcccaagaactacgtcatcttcgaccagacgtacgaccggagccgggtgatgttccacccctccctggccaacaacttcggctcctccgccggcggatacgactacggcaaccactgctacggctacgaccagacctaccccggcgagagcgcctaccacggctgcggcgacgacgccggcggcgccggcggcgtctcggtccggcagaaggaggacaccgacgagatcgacgcgctcatgagcacggaggaaggcgacgaagaggacgacgtgctcagcaccggccgcacgcccggatgccgcgccggcggctccccggattccacgtgctcatccggcgggtacgctgggaacagcagcggcggccggaagcacgagacgggcggcggtgagaagaagaaggagcggatgaagaagatggtgcggacgctcaaggggatcatccccggtggcgaccggatggacacgccggccgtgctcgacgaggccgtgaggtacctcaagtcgctcaaggtggaggtcaagaaggccggcgcgcgtgggtcaagcagctagctttccagctgcaactggtagtctggctttgggctttggcagtccaaataggagtgtatctccccgcgcaccggcagataagatgagactggcggtcgtacacgcgaccacctctcattttgattttggcatcagatgtcattctgtgtatctgactactacctagcttggccgctgggcctcccaactcaacggcgtctgcgagaagatggtcaaggaggccaacggtgggcaggcttggacgcggtcatccatgagtggttccgacagtggtggtaatggattggaatcttaaacccaaaatagagaagttttattaagaatctaaggaaaagaattcatcatccaatctatttcagttccaaatcactcatgtccagtctaatccaattgttttagagtccaaatccatcccggacgattcaaataatggcagaaatattatgttcatatgttgatatcatgtttgaagctgc

SEQ ID NO: 343 - DNA, 1269 bp, Zea mays
  Clone ID: 700072783_FLI
gcagcagcaggatcatagcacaaacacgaaggttaatcaagcgagcgcttagctaataagcgtgcggtcttctttttcctcgagagtgagtgagagagagacagagagtattgaggcgcgagaagagatggctctgaacggcggcaagacgttcgtgcatgacgaggagaagcagcagctgctcctggaggagcacaccgagaagcacttcaccgccggcgaggtggtccgggacatcatcatcggcgtctccgacggcctcaccgtacccttcgcgctcgccgccggcctgtccggcgccaacgcctcctccgcgctcgtgctcaccgcggggctcgccgaggtcgccgccggcgccatctccatggggctcggagggtatctggcggcgaagagcgaggctgatcactacaacagggagctgcagcgcgagcaggacgagatcgacacggtccccgacgtcgaggccgccgagatcgccgacatcctgtcggagtacgggctggggccgcaggagtacggccccgtggtgacctccctccgcaacaaccccaaggcgtggctggagttcatgatgaagttcgagctggggctggagaagcccgagccccggcgcgcgctggtgagcgccgccaccatcgcgctgtcctacgtcgcgggcgggctggtgccgctgctcccctacatgttcgtgccggaggccgggcgcgccatggccgtgtccgtcgccgtcacgctcgcggcgctgctcttcttcggcttcgtcaagggccgcttcacgggcgaccgccctttcttcagcgccgtccagaccaccgtcgtcggcgcgctcgcctccgccgccgcctacgccatggccagggccgtgcagtccatatgacgatgatgattaatgaggcagctcgtagtgaaaagtccgctcgccggccggtcgccgcaggtcgtatcattcttcaccggccggctaggatggcgaagaaaaataagggcagctactagcctactacgcatacgtggtagccaaactgtactgtacaacgtgtagtgtgcttgtactatcacagtactagtactagtgtgtgtactttgtttgatggctgcctgcgtgtcgcacatgtcgtgtttggatgatttaggtgaagccaaactgtggcccgctgggcttttcttgtgtaatttggcaagcggaggcccaaattgggtgccctttgggctctgtctctattttcttctcagctacactacagtacaacctaacttgttctaaac

SEQ ID NO: 344 - DNA, 2242 bp, Zea mays
  Clone ID: 700072802_FLI
ctccattctcagccgccgccaatcccttcccgtgctccgcaaccgctgagtgagaagaagagatggccggcaagggcgatggcccggctatcggcatcgatctcggcacgacgtactcttgcgtcggcgtgtggcagcacgaccgcgtcgagatcattgccaacgaccagggtaaccgcaccacgccctcgtacgtcgccttcaccgactccgagcgcctcatcggagatgcggccaagaaccaggtcgccatgaaccccatcaacaccgtctttgatgccaagcgtctcatcggcaggaggttcagtgatgcgtctgtccagagtgatatcaagttgtggcccttcaaggtcatttctgggcctggtgagaagccaatgattgttgtccagcacaagggtgaggagaagcagtttgcagctgaagagatctcctctatggttcttatcaagatgcgtgagattgctgaagcttaccttggtagcacgatcaagaatgctgtggtcacagtccctgcctacttcaatgactcacagaggcaggccacaaaggatgctggggtgattgctggccttaatgtgctgcgtatcatcaacgagccaacagctgcagctatcgcctatggtcttgacaagaaggctaccagtgtcggtgagaagaatgtcctcatctttgatcttggaggtggtacctttgatgtctccctcctcaccattgaggaaggaatctttgaggtcaaggccacagctggtgacacccatcttggtggtgaggactttgacaacaggatggtcaaccacttcgtccaggagttcaagaggaagaacaagaaggatatcactggcaaccccagggctctccggaggctgaggaccgcttgtgagagggcgaagaggactctgtcttccactgcccagaccacgattgagattgactcgctgtatgagggcatcgacttctactccaccatcacccgtgccaggtttgaggagctcaacatggacctgttcaggaagtgcatggagcctgttgagaagtgcctgagggatgccaagatggacaagagcaccgtccatgacgttgtacttgttggtggctccactaggatccccagggtgcagcaactgctccaggacttcttcaacggcaaggagctgtgcaagaacatcaaccccgatgaggctgtcgcctatggtgctgctgtccaggctgccatcctgagcggtgagggcaatgagaaggtgcaggacctgcttctgctggacgtcacccctctgtccctgggtctggagactgctggaggagttatgacagtgctgatcccgaggaacaccaccatccccaccaagaaggagcaggtattctccacctactcggacaaccagcccggtgtcctgatccaggtctacgagggtgagaggacccggacacgcgacaacaacctgctgggcaagttcgagctctccggcatcccccctgcaccccgtggtgtgccacagatcaccgtgtgctttgacatcgacgccaacggcatcctgaacgtgtctgccgaggacaagacaacggggcagaagaacaagatcacaatcaccaacgacaagggccgtctctccaaggaggagatcgagaagatggttcaggacgctgagaagtacaagtctgaggatgaggagcacaagaagaaggtggaggccaagaactcgctggagaactactcctacaacatgcgcaacacgatcaaggacgagaagattgcgtccaagctgccggccgatgacaagaagaagatcgaggacgccatcgacgcggccatcagctggctggacgccaaccagctcgccgaggcggacgagttcgaggacaagatgaaggagctggagagcctctgcaaccccatcatcgccaagatgtaccagggcgcgggtgaagacatgggcggcgctggcggcatggacgaggacgcccctgccggcagcggcggccctggccccaagatcgaggaggtggactaagcggtttgttgtcagtcttgagtgtgctgcagttgctggctggcccagttgctgccgagagttatcgtcagttggtgcggtgtgtccgcttaaactttatttgtggttggttggtacttttgtggtggttatttttttggacctcgtgatagtcggtcggttcaatgttatcgcggctactggcaaaccttaagtgatacggtattcttcttttcggtatttgtttctgc

SEQ ID NO: 345 - DNA, 382 bp, Zea mays
  Clone ID: 700072840_FLI
gaaccccggcagctacgggttcagctcggtgttccaggcgtgctgcggctcggggggcggcaagtacaactaccagaacagcgcgcggtgcggcatgtcgggcgcgtccgcgtgctccagcccggcgtcgcacctcagctgggacggcatccacctcaccgaggccgcctacaagcagatcaccgacggctggctcaacgggccctactgccgccccgccatcctccacagctaagctaagcgaggggagggcgattaattttttattgttgccatgttatttatacctgtgtttacgttgccgggaaaaaagtgtcccggcagctgcatgcatgtgttgcctcttgtaacttgttatactggtggtcttcatttacaaatc

SEQ ID NO: 346 - DNA, 882 bp, Zea mays
  Clone ID: 700072858_FLI
agccgccactcacgcctggaagcatctggaggcgtggcacggcagccgtcgcccgccacaccagcagcgaactgcttcccggtgcccgcggcggcgaagcacaggagagaggcggcgagtgaaaccgatgacgccgccgatggatccgcccgacgtcgagatggagatggagcccgcgcctcagcctccggctccgacagcggtcggggaggggtggagcatgctgtcgcgcgcccgcgggctgctcgaggagggcaaaccgtccctcgctctgcaggcggttctcttggccataagatctcaaggcggtgaacaagctctcatgcagacattgaaccgtgcacgtgaactctatgcacagagattgcaggccagtcctagtgttgatgagcttgcctctttgcttgcccaatgtgccatagcagaggctcagtcatcaaatactaaccctccacaagggcctggttcagaccctgtcaatatgctgaattctgatgaggcctgcattcttgctgagagtggaaggaagcagatcatcctggacgcgtttgccgacgggagcagcttcatttgcttgaaatgtggggggctctttagcacatctcgcaaggatgagcacttagcctactggtgcgggactgcatgatcctggttacgtcttgctgtggtatatccatggtcacacctagcaatgaaccgatgatcatgatacccgtgagattttgtataaactttgttctgttccaatccgattactgcttctttactgcggggatgccagaggcacgtctgttaagtcgtagtaaatacatttgccgacgacaaactttatgaacgaaagtttccatctctatccgcttgttgtacttgtgctttcggctg

SEQ ID NO: 347 - DNA, 828 bp, Zea mays
  Clone ID: 700072913_FLI
ccaatcccgagcagaggtgcgactcgagcgctcgcgccggtgtccatttcaaagaggaagccgcggtagcactggtagcggcagcagtaaggggaagatgtcgtcggcgttcagcggcgatgagaccgcccctttcttcggcttccttggcgcctccgctgcgctcgtcttctcatgcatgggggcggcgtacgggacagccaagagtggcgttggcgtggcgtccatgggtgtcatgcgcccagagctcgtcatgaagtccatcgtgcccgtggtcatggctggtgtgctcggtatctacggcctcatcatcgccgtcatcatcagcactgggatcaaccccaaggccaagccatactacctctttgacggctatgcccacctgtcgtctggccttgcctgtggtcttgctgggcttgctgcaggcatggccattggcatcgttggtgatgctggtgtcagggcgaacgctcagcagccaaagttgtttgtgggcatgatcctcatccttatttttgctgaagcgcttgccctctacggtctcatcgtcggcattatcctctcgtcccgtgccggccagtcccgcgcagattagaggcacgtttcagatgtcaacaccgtgccgccgacagttgcctggtcgtagctgggtcatgttctatatccatgagacaagaagctggagcactttgagaggcttacttttatgctgtctagttttccatcttctgttgagtcgagaaaacaagaaaggctgtgtagccaagggatgacttttacccttgtgccattcttttccctgtcgtggtggggggtgggttgcggttg

SEQ ID NO: 348 - DNA, 1378 bp, Zea mays
  Clone ID: 700072924_FLI
catctgctccggacagagccctcgctccacaccgccggcgacctttttcctcctccgctcgaggagtgggccaacggagggagaccatatgggcgcggaggcagcgcatgggcatccgcagcagcagcctccctcgtccctccgacccggcagggaggccgcggcgccgcccgctgtggtggggctgcagctctcggcgctgatcgaccacgtcgcgcgcgtcgactggtccctcctcgaccgcgtccctggcgaccgcggcggctcgcagcaggtatccattgatgagctgaatcatattcttgatgaagtgaatgcccacatccttccttcccgcaatgatctcactccggtaactacaatagccggtggaagtgttgccaacacaatccgtgggctctcagctggttttgggatatcaactggaataattggagcttgtggagatgacaaccagggacttctgtttgtcaacaatatgagctttagtggtgtagatctcacaagattaagggcgaaaaaagggcacaccgttcagtgtgtgtgcttggtcgatgcaagcggcaatcgcaccatgcggccatgcctatctagtgcagtcaagatacaggccaatgaatttagaaaggaggatttcaaaggctccaagtggctcattgtgagatatgcacaacagaacatggaacagattgtcgaagctattaggattgcgaaacaggaaggcctttcagtatcattagatttggccagtttcgagatggttcgtgactctaggtctaaactcgttaaccttttggagactggtaacattgacctttgcttcgccaacgaagatgaagctagggaggttatagggggaagcctggaatcagatccagaggaggcgcttgcattcttgggcaagtactgcaaatgggccgtggtgacacttgcttcaaagggatgcgtggcaaagcatggcaaacaggtcgttcgagtcccggccatcggggagagcaacgcggtggacacaactggagcgggtgacctgttcgcgagcgggttcctgtacgggctggtgaaggggctgccgctggaggagtgctgcaaggtcggggcgtgcagcggcgggtcggtgacgcgggcgctcggcggggaggtgcggccggagaactggcagtggatgtacaagcagatgcacgccaggggcctgctgctcccggagctcaagaactgaatgaaactattgctgctgtagctttagcttgctaaatgcctgcatgctgcaccagctgttgtatctcccagctctcgaagactcgtagcatcacccagggccggtcgagtggccattatccagccttccgttgttaattgctgccgttacctttcccctgct

SEQ ID NO: 349 - DNA, 1151 bp, Zea mays
  Clone ID: 700072934_FLI
ccccctcggctgttcctactcaggctgggcagcagagctagcagtggtccctggtgcttcaggcgaccggccatggtggagctggagcctagtgtgaagtcggagcatggtggaggagtcggcctggtcctgcctcctggcttcaggttccatcccacagacgaagaggtcatcaccagctacctcctgcacaagttcctgaaccctagcttcgcgccgcacgccatcggggaggtggacctcaacaagtgcgagccatgggatctcccaagcaaggcgaagatgggggagaattccaaggagtggtacttcttctgccacaaggacatgaaataccccacgggcacgcgcgcgaaccgcgccaccaaggagggctactggaaggccacaggcaaggacagggagatcttcaagccagctgcagggcgtgaccgtgaccgcgagctagtggggatgaggaagacgctggtgttctacatgggcagggctccgcgcggcaccaagaccaactgggtgatgcacgagttccgcctcgagggcaagtccaggcacacctgcaacgacctacgcttcaatcccaaggatgaatgggtcgtgtgcaaggtgcaccacaaaggggccgaagaggccagcgccgccaagaagtccgccggcgggggcggcgaggagcactactactccaccgcaacgcccaacgtcagctccgtcgaaggcggcgacgagttcctcgtcgactccctgctggattactccagctacttcaactgcttcgcaaccggtggcttgcctctgcccagcacgacggccaactcagccgcagcacctgcaacgaacgacgacgactcctcctggagcatgcttcgtcacgcgccggcagaccagcaagcaatggtggggagctacagcttgcaccaccaggcaatgaaggcgaaaactgtaggcggcgtcacctccccgagtttctccgctggtttgccgagctcgccggtggcggactacgtgggaaacgatgcttctggctaccatacaaacaactattaattaacgatggatgatgagccgctgccgaaaatatagtgatccaataggtggtgttaggctattcacacttactgtacagttttaaaacaatgtcacatcaaattttgttt

SEQ ID NO: 350 - DNA, 1338 bp, Zea mays
  Clone ID: 700072937_FLI
aaataataaattctagggtttgcctcttccctctcggctctcgctcccaccaccaccaccaggcagacgcagatcggcggcgggataggctagcaatgatccccaattccgacttcctctagactgcctggcggtcgaattccgattcgattggagtagggaacgagaagggaacaaatacaccggcaccaccaccagaccagacagcacgtgcctccatactatggtttacgccccgtgccgctcatcgacgccgccgtcttcctcgccgatgctccacaagaacctccgcgccctcggacccggcttgaatcccttggctcccttcggcatgggcaactactcccgctagccgtttcctcctatccctctttctccgattccgatctctgagtgcttccgcctccgcccccggccgcttcctccatcggaaccgatccccgctattttactcccgttcgtttcattgttccgttgctttggatctgagtctcgagatcctcccctgtcctgctgctcgaggagccgccaaggataccaaaataccatggtgcaggtgcgcaggtcgctcagcatgagccgccttcggagctgccacgacgcggacgaccgtggctggaacccgctccatgttgctgctcgcaagggagacctcaaggaggtccgacgtctcctggatgagggggggatggatgtgaatgcacctgcatggggaccaaaatgtcctggtgctaccccactccatctggctgctcagggtgggcatgttaaaatcatggatgaactactggagcgtggtgccaatattgatgctcgaacaaaaggggcatgcggctggactcctctacacattgctgccaaggaaaggaacaagaaggctgtgagattcctgattgagaatggagcattccttcctcctgagatgaatgaccataggttcaatccccccctccattactgctctgggttagaatgggcgtatgagatgaagcgcatgcaggatgaaagcgattcgcctggcgaaacttcgttgagctcggataactagagagaaagcagcaggtgcatgcagcttgagaacgatgaagttaagtcaagtcattgagtacatttgcttgatgtctggatgatggagatgttctgttctgtgactttagaataattgttgagtggtacctgtaatatacgacgagtgatttgttgaataataatcatacactagtgtatagcgcgcacatgcgcgcatgccgttctgtggtgtaaaatcttgttataagcatgtataacttgatattgtatcgtgaacatgcatatatgcagagtagtcattattgagac

SEQ ID NO: 351 - DNA, 1141 bp, Zea mays
  Clone ID: 700072965_FLI
cggctacccacaggccgcagtgccccgcttgctattttccgccgccaacgttctccctcctccccgccccacctccgcttcctcctacgcgccacccacacgcctcgcgtccgcctccccgcctacacctccccattctccagcgtcccgcgccccgagaagcgctgcaggcctcaccttcccgtcctcctgccccaggaaccgcggttcaggaaggaaggaaggaggaaaggcaagtgcctgccggtgccggggctcagcagcgcgcgatggcgtacagggcggaggacgactacgactacctcttcaaggtcgttcttatcggcgactccggcgtcggcaaatccaacctactctccaggttcacacgcaacgagttcagcctcgagtccaagtccaccatcggggtcgagtttgccaccaggagcatcagggtcgacgacaaggtcgtcaaggcccagatctgggacaccgccggccaggagaggtatcgggcaattacaagtgcgtactatagaggggctgttggtgcacttgtcgtgtatgatgtgacacgtcatgtgacctttgagaatgtggagaggtggttaaaggagctccgggatcacactgatgcaaacattgtcataatgcttgttggcaacaaagctgatctgcgacaccttagagctgtatccgtggaggatgccaagggcttcgctgagagggaaatgaccttcttcatggaaacatccgcgctggagtccatgaatgttgagagcgctttcaccgaggtcctaactcagatctatcgtgtcgtcagcaagaaggcccttgacattggcgatgaccctgctgctccaccaagagggcaaaccatcaatgttggtggcaaggatgatgtctctgctgtgaagaaggcagggtgttgttcatcctaaatcacttgtgaccatgaaaaggattaaaggaactatatactcaccccggtcatatgattggtaactgaaaatatgactcttgtgctgcctaacctggtggctattagattatgttggtactccagagacatgatttagaggttaagaatttgattccaagttgggacaaaaaacttacttttcacggtgtcattgatattcatggcttcgttgtatggttc

SEQ ID NO: 352 - DNA, 1258 bp, Zea mays
  Clone ID: 700072980_FLI
cttcccctctacgcgatcgaaaccgaagctcgaatcaatcctccacccgtttccagcccctcgtcccggagccccgatccgcctcccgtctcctcctgggcaggtcccccttttccgcgtgtgcgttggccggccggttcccgatgagggggttgctggcggtggaggccgcgggcgcggcgtcggtcccggcctcggtactccacggcgccgtggactggtggcgcgacgtcaacgagtcgccgctgtggcaggaccgcatatttcacgcgctcgccgtgctctacggcatcgtctcggccgtcgcgctggtccaattaatcagaatcgagtgtagggtgccagagtatggatggacaacgcagaaggtgttccattttctaaacttccttgtgaacggcgtgcggtctgtcgtgtttgtgctgcggcgaaatgtgcaacttgtagagcctgagataatacaacatgtgcttctggatatgcccgggcttgcattcttcacgacatatgcacttttagtgctcttctgggctgagatttattatcaggcacgtgcaatgtcgactgatgggcttagaccaactttctattggatcaacggtgtggtctatgcaattcagataattctatggttggttttatggtggaaaccagttcgagttatggtcattttgccaaagatgttctttgcaggtgtatcactatttgctgcccttgggtttgttctgtatggaggaaggttatttctgatgttgcagcgttttcctgtagattcgaaaggaaggagaaagaaattgcaggaggttggctatgtgactaccatctgtttttcttgtttcttgatcagatgcgtcatgatgtgcctcaattcatttgataaagaagcagatcttgatgtcctgaaccatccaatcctgaacttcctctattacctgctggttgagatagtgccttcggctctggtgctcttcattctacggaaactgcctccaaaacgtgggatcacacaatatcacccaatccattagagagcaggccttggtgttttctggtggattgtcttatatagcgtggtaaatacagaaggcagagtgaaaagtaccacctttgctctcgagcttgcccagcttttcatacgagggaaggctttagaatctcaggtttagaaaatgcgatctctttctctcagatttagaaaatgtaaaatgtaatttatataactttattattctcagtgcatatcatttgttcacatcgc

SEQ ID NO: 353 - DNA, 1498 bp, Zea mays
  Clone ID: 700072994_FLI
ggcatctccaatctcctcgccccccacggacctgaaccgagaaccgttaccgccgccggagaagcgccgctcgctcaggaggacagccatggcgccggagccggaggatgatattatgaacgagaagaatccccgcccgctcgacgaggatgacatcgcgctcctcaaaacctatggactggggccgtattcgactagcattaagaaggtcgagaaggagatcaaggaaatggccaagaaaatcaacgacctctgtgggataaaggagtctgatacagggctggctccacctagccagtgggatttggtttcagataagcagatgatgcaagaagaacaaccgttacaagtagcaagatgtacaaagattataagccctaatacggatgatgccaaatatgttataaatgtaaaacaaattgcaaagtttgtggttggattgggagataaggtctctccaactgatatcgaggaagggatgagggttggtgttgatcgcaacaagtaccagattcaaatccctctcccaccaaaaattgacccaagtgttaccatgatgactgtggaggaaaagccagatgtgacgtacaatgatgtcggtggctgcaaggagcagattgagaagatgcgtgaagttgttgaacttcctatgcttcacccagaaaagtttgtcaagcttggtattgaccctccgaaaggtgtcctttgctatggcccacctggtactggcaagacacttcttgcaagagctgtagcaaaccggactgatgcttgtttcatccgtgtaattggaagtgagctagttcagaagtatgttggagaaggtgctcggatggtcagggaactgttccagatggcccgctcaaagaaggcatgcattgtattctttgatgaagttgatgcaattggtggtgctcgttttgatgatggggttggtggtgacaatgaggtgcagcgtacaatgttggaaatagtaaaccaacttgatgggtttgatgcaagagggaacatcaaagttctcatggccactaataggcctgataccttggatcctgcacttctgcgccctggtcgcttggacagaaaggtggaattcgggctacctgacttggagggccgtacccaaattttcaagatccatacacgtaccatgaactgtgagcgagatattcgtttcgagcttctggcacggctctgccccaactctactggagctgatataaggagcgtttgcacagaagccgggatgtacgccattcgcgcccgcaggaaaacggtgacagaaaaggattttctcgatgctgtcaacaaggtcatcaagggctaccagaagttcagtgcaacacccaagtatatggtgtacaactagtcggcgtgtcttcatgggatctgttgtttctagaaactctggatctttttcatggttgtatcatcatgagattctctatgcaaaggttgttgtttgtttagcaaattggatgccgagtgatttgtgacc

SEQ ID NO: 354 - DNA, 945 bp, Zea mays
  Clone ID: 700073011_FLI
cctcgatcacactccaccacgattgccaagtgtcaatctcgacacggcagcaggagcctttgggccgtcgttacacgcacctatccatctcatctccgcggcacacgacacgatcgtggttggtgttggttacacgcgcctatatcgccggttcggccgcacgtccgcctcctcctctcctcctccctcttctcagctcaccagtgctcgctcacctttccccttcctttcctttcctttcctatcctcgtgccctcgaatcggaaacccagccagccatgtcgtactacggcgaccggcgcgcggagtcgtcgatcgtggaggcgttcacgctgtcgccgctgccgtacccggtgatcctggtgctgctgatggtgacgctgctgctgggcgcctcgtggttcttcacgtacgacgacttcatcgaggaggcgtcgcagcagctgagctgggcgctgctgggcgtgcccatcgcgctcgtcctcctcatccgctggatctcctccgtcgactccttcgagggctacctgggcttctacccgacggagagccgctggaagggccgctacgagcggggccccgccgagggcagctcgccctggggcgtcgccttgctcgtcctcctcctcctcgtgctcgccagcttccactccaccatccacgacatgtggggcccgtgaacggatgtagtgattgtagtcctgctcctgttcggttccacgcgcgcacgtatgcgcttgtgctactggttgctgcttgatcgatcgatggatcgatgattccatgtacatatttgttagggggatgctgcggctaggctattagctgcaggctatagagtttgagggtgatatacttatcagtttgctgcctgtaagactggttttggttttgctataatcgtgatatattccgatgtacagtatacagtaccctctttgcttt

SEQ ID NO: 355 - DNA, 1604 bp, Zea mays
  Clone ID: 700073061_FLI
gtccatctttccccgccgccggccgtgatccctcctcgccgctgaccgccccgcctgccccggcattctcccgctccagatccagggccctcatagagcctccgctcgatctgcccccggatcggattggccgccgcgcatctcatgggtgaggaagctgtccacttcagcgtcgtcgacgccaaggactgcaaacagagtgcctttgaagtcggcgataagacgtatgttatttgtagatcagatgatgatttgaaaacatctgctgttaaaattcacgacaagctcactcagacttggctctcacccacaatacttggggaacagccacttctaaccaagtcacagtctgtgattcctgtcagtgatgagaagatattagttatcgagaagggtgttcccttgaatgagtccatctggttccttgagatagacaccccctttgttaagcaacaacggaaaatcaaggaaacagaagttgtttcttggagcaagggagtaatcggcgttggccaaaaaccagttgtgattagtggtccttctggtgttggtaaagggacattgattgcaaagttgatgaaagactatccatcgaagtttggtttttctgttagccacactacaagatctccaagggaaaaggaaatagatggtgttcactaccacttcacagaacgaatcaagatagagaaagatataagcgagggcaaatttcttgaattcgctcatgttcatggaaatgtgtatggcacaagtatcgaagcagtcgaatctgtaactgatgagggaaagaggtgtattctcgacattgatgtccaaggagctcgatccgtgagggcttcttctcttgaagcaatattcatctttgtatgccctccatcattcgaggaactagagaagcgccttcgggcacggggtactgaaacagaggagcaaatccagaaacgactcagaaatgctcaggctgaacttgatcagtccaatgaaccaggtctctttgatcatcttttggtcaacgatgaccttgagacatgctatgagaatttgaagaagttgctttctctggatgatgaccaagaagattcagatgatttttttaacaaggaggacaaagaaactgcaagttactctatcgtgtccaaaactgactcagaaattttgttgcaatctgagactaacgaaggcaaaaatggagccatacacttgctggcacttgatttgtcgtctctctcaggcggtgcgcctggacgaacaaggggccttaagattggctcagttaactccttttgacaagggcttatattggcgttttagatgacccaaagcattcttcaaaatgatacagcagaagcactgacttgaattttggatcaattcccatgagctgatatcttcaaaaacatcttagttaggaaaaagaaggaaacgaaaatggaatttatttccatttgttatttgtttgggtgccacaaggaggcaaaatcatagcaaggaattgtaccttatttttttagggattgtgtacttttctgctgttgagaggtatttggtggttggataatgtgatggagcctatctaaatgttctttcatagtggtctgaat

SEQ ID NO: 356 - DNA, 1647 bp, Zea mays
  Clone ID: 700073073_FLI
caaactaggagaggtcgctgtggagaatgggcgaattgcttcacattctattgtcgagcttttggatatgatgctcgtttgattctggatttcactgatcacgtgtggacagaatgtttttcaaacttgtatggaagatggatgcacctagatccatgcgaaggagtctatgataatcccttactgtacgagaaagggtggaacaagaagttaaattatgttattgcgatttctaaagatggagtacgggacgtaacaaaacgctacaccagaaagtggcatgaggttctctctaggcgaataattacctccgaagaaactgttgtgtctgttctatcatctataacagggaagtatcgcacaggtttgtcacctgatgctctatcagtcatagaaaaccgtgaaaaggaggagtctgaggaacttagaaaatctgcttatcttcaagttgaaacggctttatccttacctggaaggcttagtggttctgtggaatggaggaaagcaaggtcagagttgggccaagcagattcactaagttgctcatcctgccctattcggaagtgtgtggatggtcatgtttcaaatatatatgatgctctttctgcttttctttcacatttttttgacaaaaaaatccctaaagaaagaattattgaagcttttgaggcattgaagactttgatgctaactcttaaaagttccaactttaagagcagaagtgctacattagaccagaaagcacaccatctatttgaggagatatttccttccattgaaagattgttatctgctatttcactgaaagcagaattgggaactgctggataccaatctgtgaccgtgtctggaaatccagtacactcatccttagcgttaccagtagcactggatgcagttaatgagatattgagtaattataagaataatacctttttcacagaaggcaatcatttcccaagagggaacagagtatgctcaggttcagtccttgcaagcagggaacaacttccaataggaattgtatgtgaatgcaattcttgcattttttagtatatattcatcgatgttttccatacattagtgtgtttgaaaatcatttcaggcaacagcagcttttgacggcattcactcctccaaatgggaagagcctgatggagccaaaggatgttggctgatttatacaatgcaagatggcaaaagttgcgagttggagtcatatgatttgatgtcagctaatgatgctccagagagggatccaatggactgggttcttgaagggagcgcagacggaggctccacctggaatatacttgatgctcggaattcagaaatgttcgagagccgtttcttgaggaaaacatttacagtggataagagatataaggcaaatgctttcaggtttaggtttctacgcgtaagagattctcattctaatccaaggtttcagataggatcaattgatctatatgggaaaaccatatgaactccccccggagctgtgtttcacttttcggctttctgaactgctcggtctcacgagcctgtgtagtatcataaattcataatattgtaatgcgagcatttactgtggacgcaacgctctcttcagtatgaatagatactgaataattaagagcatgatat

SEQ ID NO: 357 - DNA, 1503 bp, Zea mays
  Clone ID: 700073076_FLI
cccgaaatcatctactgcgatatcaaagtgtatgattatgggagcatctgtttcaactgtttactacaatctcaagctaaagcatccgactttggacatgccagtgatcgattatgacctggctgtgctcatgcagcctatgctaatgcttgggatcagcattggtgttatttttaatgttatattccctgactggctggtcacagttctgctgataattcttttcctaggcacatccacaaaagcctttctgaagggcattgagacatggaagaaagagacagtaatccaaagggaggctgcgaaacttttggagcaaactgcaggtgaggaagcagagtatgcagcacttcctactggaccagatgttgcaccaaacaaaaaagccctcacatcagatgaggcgccatcgcttataaagaacatacactggaagaaggttggtcttctttcatttgtatgggtggcattccttgttcttcaggtcacaaagaattacactgctacttgctccccatggtattgggtcttgaaccttctccaggttccagtgtcagtaggagtgacactgtatgaaggatttgggctgatgagtgggaagagggtgttatcatcaaagggaagtggacaaactaccatgaaatttcatcaggtagtcgtatacggtctattcggtatagccgcaggactagttggtggactccttggtcttggaggtggcttcattatggggccactgttcttggaacttggcatccctccccaagtttcaagtgctacagctacctttgcaatgatgttctcatcttccatgtcggttgtcgaatactacctcttgaaccggtttccagtgccttatgctgtttatttcatcgttgttgcgtttgttgctgccatcatcggccagcatgtggtgaggaagttgatcaactggctagggcgagcatcgcttatcatcttcatactggctttcatgatctttgtcagcgccgtttctctaggtggggttggcgtctctaacatggttcacaagattgagcgacatgagtacatggggtttgaggacctttgcaagtacgatgcgtaagaagcagggaagctgaagatgtgagctatgtggtgtgcagttctccgcaagcagaagtgggataattcaaggatagaagggttccatgatgcattttggtgcgtaggaccgaagaggttctagcagcgacagttcctcgaagggaggctagctgcatggattggcttaagatgaattttgggcactgaattttcaaaacaaatgtagagatgattttctgccacggcagaatgtcgtcagtgcatttcgttgtaggaaatgtacactgcacatcttcagataaccatcctatagtactacgcgatatgaaatatcacatgatagacatgagatgggtgcctcttatggatttaacgtctttagcctagctcaactcgctttctttgtgcattcaagttaatcttggagctgaatcc

SEQ ID NO: 358 - DNA, 1525 bp, Zea mays
  Clone ID: 700073092_FLI
cccaaccccacttgtcgggcttcggctcttcgcatcctgcccgtcccccgtcacagtcccaatcgcaacccccgcctgcagcacgcgtcacgccacgccacctctccccagggtccggcgatgtcggcgccctccgacgccgcggtggcagccgcagcgcccgcatccacgaccaccgccgccgcctccagcggtgggctcaccttcaagctccacccgctcgtcatcgtgaacgtctccgaccaccacacccgcgtcaaggcccaggccgcctgctccggggacagctcttccccctcctcgtccgccccgggggccgggcagccgccgagggtgttcgggtgcgtgatcggggtgcagcgcggccggaccgtggagatcttcaacagcttcgagctcgtgctcgaccccgtctccggaaccctcgaccgcgccttcctcgacaagaagcaggagctctataagaaggtgttccccgacttctacgtgctcggttggtactccactggaagcgatgtgcacgacaccgacatgctaatccacaaatcattgatggatattaacgaaagccctgtttatctcctattaaatcctacaatcaacctctcccaaaaagatctccctgtgactatctatgagagtgagttgcatgtcatcgatgggattcctcagctcatcttcgtcagatcaaattatacaattgagactgtagaggctgagaggatatctgtggaccatgttgcccatctcaaaccttctgatggtggctcagcagcaactcagttggctgctcatcttacaggaatacacagtgccatcaagatgctcaatagcagggtccgtgttatccatcagtatctcgttgccatgcaaaaaggtgacattccactagataattcgctgcttaggcaagtctcaagcctcgtaagaaggctaccagctatggagtcacagaaattccaagacgacttcttaatggaatacaacgacactctcctcatgacctaccttgcaatggtcactaaatgttcaagcacaatgaacgagttggtcgagaagataaacacgagctatgagagaacgactagcaggagaggaggtcgaggtgctttcatgtagctcaccggccgtgatcctgctgctgctttcatctgtggagatttttggaaagagcttatgttctcgaggcagttttttgcatacattctattatgtgcaacctgctatacgcaggagaggaggccgaggtgcctgcctttcatgcaggctacccggaggcatttttttcatgcaatttattatgcgcaagcggctatacggcagctctctactcacttgctaccttctaggcaaaaatgatgatttgctggaactgtatcaaatcctgcttgaagttgatctgtaaagttcatgtctcagttaggccttatttggttgcgtgtttgtatcaaaagggattgtatcgaaagagattggaggattaaattttttcttagttaaaattgaatacaagaggatttaatct

SEQ ID NO: 359 - DNA, 1559 bp, Zea mays
  Clone ID: 700073101_FLI
taagataagatgttgggagttaaattaatttggaagtctgtgtctcttttgctgcgcccagattcataaccataatcatgtttaaacaagtgctgtgtgaagagccatatttctcacataagttttttaggatattgtgtatagttgtgatataattgtgatatctgtgagatcccttttgttaacatagttttatgagcttggaagcttagaagccatctagctttgaacatgattgattgatcactctccatagaaagttgacttgaacattaagtgaactgcgtgagtattatctgagaatactttgattacatttgatgcttaaactagctcaaagcgtctccaagtaatttgtcgttaggaattaattcactgcattttgttatgtctatacatggaagtttgttgtataaatcttttaatctatctgattagatgtacatctctactgatgtgctatataactttagatgttcaaaaaactaacagtgtttttctctcttctatgagatgcacttccttgcatcatttcatgtccctacaggttttgtattatctgatttttcgggatggatgccaaaaggttcctgcatctggtcgaggagaagaaaagaaggatcctcgagaagaaagaagccccactaaagtgggagcagaagctagaaacagcagctaaggccaaggttgatgcagaagcaaaggtgaagaagctaaattcaagaaagcacaggaggagaggagatttgtcctcagactctgatagtgactatggcagcgatgttgatcgaaaacacttgaagaggaagaaccgcagaaggaacaagaagcatgagcattctgactctgatgatgccaggagatgcaatcgtagatctagaaggagcaccgactcaagtgatgacagcgacagtgaatatgagaccaggtctgaagaagaacgtccaaggaagaagcgctcgcacagaagaaggcatcaccggcactcttcaaggtcagactctgaaaactacagcagtgatgaggaagaacggagatctgccaaggaccatactcagagccgcaggcggcaccatcggtcgtctgatgatgactcaggcaaggacaaggtcaagtcaagacatgggaagggtctgagatctcgtgacgaggatgcaagggcagatttcaacagccataagcgtctcaggagccaatccttggaggagtcatcagatgatagagatgctgatgaatctgagaagatgaggaatggcaaaaggtctcacaagaatggcggccaccgtcaccatcgacaccaccatgaatgacatagtaactctgcagaacctaatgacaggaggcaagtactgaaagatggccagagggcccttgaaggtgacagtgcatactgaagatatcccagcaaggtcgagttaattgtccttattaaggacaggaagatcatttttttcgttcctgatgttctcacataattcttgtcttgctgacaacatttctttgatttgtgaatgtactaaacatgttggctttgaaaatttggtgatacgtgatcgcct

SEQ ID NO: 360 - DNA, 1357 bp, Zea mays
  Clone ID: 700073136_FLI
gcaggcgcgtcgagcccgtccgcgccgccaccagcatgggcgctctgcccctggacgccctgtacgacatcctgctccgcctcccggccaaggaactctgccgcctccgctcggtgtgccggccgtggcgctccctgctctccgaccccgcgttcgccgccgcccacgcagcacgctaccccgagccactcatcatcgtcggctacaactacaacgacagtcctccccctccagagagcgacgagcgtgactggacgaaaccaaggaggtaccaatgcgtcatcagcgtgatggatctgacgggacacgtggtgaagaacctgcgcgtggacggccacatcgcgagcatgtcgctcagcctcgcctgcgtgaagaggaccggagacggcagctgccggctggtgaacccggccacgggagccgtgcaccacgtgcccgaagaggacccgccgtacggctacagcgacaggctgtgcccgtttgggcaggttgccagcacaagggagttcaaggtgctccggaaggtttcctactcgctcaacggcaaccctcgtgtcctctacgagatctgcaccgttgccggcaccggcaggagcaatgcgcagtggaggatggttcaggaccatccgcaccgcatcgacatcgattggcgcgacaaggccagcgtggtcatcgacggggttgtctacttcctcagcaagaactacgcgtcttcttcttcttctgctggatctgaggagcaagactggatagcgtcgttcgaccttgacgcagagaggtggaggccgaatatcaggggaccccaaagccttaccgtcgtcaacaatggaaacgacaacgggctggctgttgacgaggagctttcgttaaccaacctgaatggctcactggttatcgtccatctccaatctcctccctgcatgaacctctggtatctgctggactcagagaagggcctctgggtcaggcagtacagcattcaggttgaagaatgggactgcagcctctcgtccttcactcccttgatcgtgctagacgatgggaggatcgtcatacatgtcgaagggtcggagatgttggagatctatgaccccaaaaccaacaagttgtccagcgtcgccgacacgggtctcagcagcgcagttagtgtgtacacaggaaccttgctcagcttagagtggtgaggctagtatctatctatctagctagcttgtgggaactgtcatttaatttacctgttccgtctggtttatgtgacagcctgacaggcattggcttttacagttcctatatcgtccttgtcactacgactgtacgtgttcttgtttctgttggcaagaagcttttgatcgagccg

SEQ ID NO: 361 - DNA, 1307 bp, Zea mays
  Clone ID: 700073146_FLI
tcttcctccactcgccgacacacacggcgcaaatccccacaaccccaagcgggcgggcggacttccacccaccttctcgcgcggcgacgtgctcggctcgcttccagccacctcgctcgccgcccgcctcggaatccccgccgcgagatcttgttccccggaggatggaggtgaaaacagtaaaagttagcaatctttcattaaatgctttgaaaagagagatcacagagttcttcagtttctcaggagatatagaatatgttgaaatgcaaagtgaatctgaatggtcacagcttgcttatgtcacatttaaagactcacagggagcagacactgctgttcttctctcgggggcaacaatcgtggatcgtgctgtcattataactcctgctgagaactatcagctgcctctggaagcacacaaacaattatcgggagcaaacgtctactgaatcagcagtaaggaaggcagaagatgttgtgagcagcatgctggccaagggcttcgtcctcagcaaagacgcactcaacttggcaagatcatttgacgagcgtcacaacatcctatccaacgccactgccactgttgcatccctagaccgccagtatggcctgagcgaaaagatcagtctcggaagggccattgtcggcagcaaggtcaaggaggtggacgagcggtaccaggtctcagaactcaccaagtccgccttggctgccgccgagcagaaagccagcgtcgcgggctccgctatactgagcaaccagtatgtctcggctggtgcctcgtggctaacaagcgcgttcgatatggtaacgaaggcagcgggcgacatgacctcgatggccaaagataaggtggagagggccgaggaggagaggaaagccatcatgtgggaggagaggagtgggctggtcagcgagtacgcgaagatccatcttgacgagccctcttcgtgggagcccgcggttctgcctctggaatcagtggacgagcagaagctccaagctgtctgacacgcagagaccgagtctctcgcacgaaattcttttttgcagctcgtcctatatatagattgttctttttcgtcggtgcactggatcaaaacaattgcgcttgtcggccagtgccgtgtaaatttctgagagttggtcttgtgttattaccaggttttgttcgtttctttcgttttggagagagtggtgctaccagcactactacactagactactctgtgtgaatggaatactactgtactttgtctcttcttctactactactacagaaacataatataacttccttcgtt

SEQ ID NO: 362 - DNA, 1054 bp, Zea mays
  Clone ID: 700073148_FLI
gatccaagctagcagctcagctctccactccctctctgtgctgtgctgtgtagtcgttcattcatgcacttggcgttcttgcagttgcagcccccttctcctcctcatccttgtcggggcagttagctaggtgagaccgtgacagtagtgcagtggagctcaccaggccagcgataagcaattaatggaggtagaggcttgctacaactacggcttcctccctgcagacagaggcaggcaccaaccaccacctccaccacatgcaacccttcctcacgctgcagaggatgcaggtgagctgtgggagtacttcccttgccccttttgctacatcgaggtggaggtgcccttcatctgcaaccaccttcaggaggaacattgctttgacaccaggaatgctgtttgccccatctgcgccaacaatctagggaaagacatggctgcacatttcagactgcagcacacgcatcttctcaagaggaggaagccctacaggccaagctcatgccctgcggctgccaccagcccagcaacataccaagtgaactcttactatgaagaggcagaaccacagcagcactacagcaggccatacaaagatcctgcacctgacccactgctctcccagttcatctgcagcgtcgatgcggtccctggtgatgacaacgcccagaaagatgataagaggtaattcagatctttttcagagagctggatgtgccagtaacagtatcactatccagccccagctgggtttttgttttttttcccccatcaggctgaagttgaacaagggagcgacagcgagcgacgacgatgcatcatccaaactggggctggaggagaggctgcagaggatcgactttctgacggagatactcatgtccaccattctttgatgtcttgttaccgctatctagggtttcttgaggatttgtagcaatggctatcaggatgtgtctccatgtcacgtaagcgaaagcaattccctgtccacatgtacaccatagccttggctacctacatatatacaatgaagtgccatactttggcc

SEQ ID NO: 363 - DNA, 1568 bp, Zea mays
  Clone ID: 700073152_FLI
cgccgccgtcttctgcggttctgccgtttactcctccactttggcctcctcacttgcaagtttaatcttcgcctccagccatgggtaaggagaagtctcacatcaacattgtggttattggccacgtcgactctggcaagtcgacaaccaccggccacctgatctacaagcttggaggcattgacaagcgtgtgatcgagaggtttgagaaggaggccgctgaaatgaacaagcggtcctttaagtatgcttgggtgcttgacaagctcaaggctgagcgtgagaggggtatcaccattgatattgctctgtggaagtttgagaccaccaagtactattgcaccgttattgatgcccctggacaccgtgactttatcaagaacatgatcactggtacctcccaggctgactgtgctgtccttatcattgactccaccactggtggttttgaggctggtatctccaaggatggccagacacgtgagcatgctctccttgcgttcacacttggagtgaagcagatgatttgctgctgcaacaagatggatgcaaccactcccaaatactccaaggcacgttatgatgagattgtgaaggaagtctcatcttacctcaagaaagttgggtacaaccctgataagatagcatttgttcccatctctggttttgagggtgacaacatgattgagaggtccaccaaccttgactggtacaaaggcccaaccctgcttgaggctcttgaccagatcaccgagcccaagagaccctcggacaagcccctgcgtctccccctccaggatgtgtacaagattggtggtattggaactgtgccagttggtcgtgtggagactggtgtcatcaagcctggtatggttgtcacctttggtccaactggcctgactactgaggtgaagtctgttgagatgcaccatgaggctcttcaggaggcccttcctggtgacaatgttggcttcaacgtgaagaacgtcgctgtgaaggatatcaagcgtggttatgtggcctccaactccaaggatgaccctgccaaggaggctgccagcttcacctcccaggtcatcatcatgaaccaccctgggcagatcggtaacggttatgccccagtgctggactgccacacctcccatattgctgtcaagtttgctgagctcattaccaagatcgacaggcgttctggcaaggagcttgagaaagagcccaagttcttgaagaacggtgatgctggtatggtgaagatgattcccaccaagcccatggtggtggagacattctcgcagtatcctcccctgggtaggtttgctgtccgtgacatgagacagacggttgctgttggagtcatcaagagtgtggagaagaaggacccgaccggtgccaaggtgaccaaggctgctgccaagaagaaatgatgcgacctgtcgttgatgcagcgtctgcttttccaatacgtagctgagatgttccattttgacataagttttgtatgctgtggttgctgtttaccttgtgaactgttgagctctactattgggtgtccgtttatctgtttatgt

SEQ ID NO: 364 - DNA, 2356 bp, Zea mays
  Clone ID: 700073158_FLI
tcccgtggaagatctggataaacctgcaagctttgatggcaaagctgccaatagtactgctgatgacgatagtttattcgagcaatcaagtgcttttgaccaggctccaaaatcagatcctttgtttacctccgaattcaatggtcatgccaaggacacaaaaccgccaagcgcagtccgcgattcgagtcctctacaccattcaatggatagaaattcagcgcgtcaatcttctatggaagactttgataatgtcatgcccaagtcacagtctgcaaggtattctgacgttcgtggtaatgatacggaagatcagtcaccacgatctactgaatctgaagatgatatatggctcacagtttccgagattccccttttcacagcaccaactattgctccaccaccctccagatcaccacctcttctcaaacgaaagccactgagagcaaatgcaaaggagaatgggcatgctcgtcagtctaccccaaatcagaaccattacacagatttgccaaagcaaccggaggtttcttcaatagatgacctggaaggcttttccatgggcaaacctcaaatgcctgcttatggcaacactgtttttgatgaggactatgaaagaagctcatcagatactgaagagaaagacaggcaagaaagattggagaaagaaagagaaatgaagctgagggaggagatggagagggagcagagaaggcttgaaaaggagagggagttggaacaacagagagaaagagagagagaacgacaggcagtggagagggctacaaaggaggcacgtgagagagcatctgctgaagctcgtgcaaaagctgaaagagaggcccgccagcgttcacagcgtgctgctgtgcaaagggctcaacaggaagcccgtgagagggctgcagttgaggccaaagaaagagcagctagggtagctgcagaagcaagggagagagctgctgcagaagcaaaggagagggctgctgctgaagccaaggagaaggcagcagctgaagccaaggagagggagagggctgctgctagggagagggcagcagcagaaagagctgctgctgagagagctcagcaagaagcaaggaagagagctgaacgagctgcagtggaaagagctgctactgaggctcgagaaaggcaggcagctgcagctgcagccgctgccaccgcagcagcagctgctgcttcaagagaaaaacagagcacaccagatgatcttgagtcattctttggtgtgggttctcgtgccaacagtgcgccgaaacagagggctccaacaccaacagtggattctatgtttggttttggagctcaaggcagaggaacaactaatggatcacagagagcagcatcaacttcggctcctgtgagaaaagtggcatcagccacaagttttggtgatgatctgtctgacttatttggagctcctgcatcttctgatgtttttcaagaagttgagggagaaagtgaagaaagaagacgtgctaggttagaacgtcatcagaggactcgtgaacgagcggcaaaagctctggctgagaagaatgaacgtgatatgcaagttcagagggagcaggcagagagagatagaattggagacactctagacttcgaaatcaagaggtggtctgctgggaaagagggcaacttgcgtgctttgttatcaactttacaatatatactttggccagaatgtggatggcaagctgtatcattgactgatttaattactggagctgctgttaagaagcagtacaggaaggcaacgctgtgcattcatcctgataaggtgcaacagaaaggtgcaacacttcagcagaaatatattgccgaaaaagtctttgacattcttaaggaggcatggaacaaattcaactctgaagagctcttctgaagcaacctccgtgactgtgaatatgcatatatgatggacagcttaaccgcataccaacatgagtcgccggagtagcaaggcacaagtgaacaaagtgaaagctccatctcagttaccatcgttcgacagattgtgttcagttgctccccccgtccactgtgctctgctgctcccatctgtatctgttcactccatggtacttgcactccacatctacgaatatacgtacgccatctttttttgttttagtttttgcagcgtgggttggctcatacaaccaagatttacactgtatggcttcttaaatactatctcgtgtacaatggaccacacatgtcgaaactacacttgctgtctaaagcccttgttgatttctaccggaagtgatgtagtacactgtacaggttgtaccattgttgatttgaaatgtgatttggtttactc

SEQ ID NO: 365 - DNA, 1678 bp, Zea mays
  Clone ID: 700073162_FLI
cgcacacaccttttccgtttgcagtggtgcaggtcttttcggtcctcaggcttcatccctgtgcaagtgcagggataattgcttctgatctcccgaggctgcataacctgattcagaggcagagcaagggggcgtgagggagatgagggagatcatcagcatccatatcgggcaggcaggcatccaggtagggaattcttgctgggagctctactgcctcgagcacggtatccagcctgacggcctcatgcccagtgacacctctgtcgggatcgcgagggatgcgttcaacacgttcttcagtgaaacgggcgcagggaagcacgttccaagggccctgtttgtcgacttggagcccactgtgattgacgaggtgaagactggggcttaccgccagcttttccatcctgagcagctcatctcacacaaggaagatgcagcgaacaacttcgcccgtggacattacacagttggaagagaagtaatagatctttgccttgatcggatacgaaaattggcagacaactgcactggtcttcaaggttttctggttttcaatgctgttggtggtggaacaggctccggcctgggttcgctacttttagaacgtctatcagtagattatggtaggaagtcaaagctcggtttcaccatctatccttccccacagatctcgactgctgtggtcgagccttataacagcgtgctctccacacattccttgattgaacacacagatgttgttgtgcttcttgacaatgaagctatctatgacatatgcaagaggtccctcgacattgagcgtccaacatacaccaatctgaacaggcttatatcacaagttatatcatctctgactacctctctgaggtttgaaggagctattaatgttgacataactgagttccagaccaaccttgtgccttatccccgcatacactttatgctctcttcgtatgctccaattatctcagtggaaaaggcctaccatgaacaacactctgttcctgagatcacaaattctgtgtttgagccatcaagtgtgatggcaaaatgtgatcccaggcatggaaagtacatggcatgctgtttgatgtaccgtggcgacgttgttccaaaagatgtgaatgctgctgtccattcaatcaagaccaagagagcagtgcagtttgttgattggtgccctactggtttcaagtgtgggataaactaccaaccaccaactgtagtccctggaggggacctggccaaggtgcaacgagcagtctgcatgatcagcaacaacacagccgtggctgaggtcttctctcgtattgaccgcaagtttgatctcatgtatgccaaacgtgcattcgttcattggtatgtcggtgaagggatggaagaaggggagttctcagaggcaagggaggatcttgcagcactggagaaggattatgaggaagtcggagctgaagttgaagatgaggacgaggaagctgagtattgagtcatcgatctggatgcatggttattttcctttggtgtcagtcaaccaggcgtgcttgagttgcatggttgtacctcccatttattccatgtttgctattgcattacacctgttcatggttggcatagtagaagtgtgaagattggttgaactggtatgatggtttcagatcaaataaattatgttttc

SEQ ID NO: 366 - DNA, 1692 bp, Zea mays
  Clone ID: 700073171_FLI
agaaaagggaaaaagtctccaccccgatcccgtccgtccggctagatctcgcctccgctccgcttccccccatctcccacacctagatcttgccgcgatgggcctcgccgccgccgcccgcgcggtcctcttcctcctcgccgtcgccggggtcatcttccgtccggcggtggcggagatcaagcaggagttcttcaaggacgactcccgcggttccattctcttcgagaagttcggcttcggcccccacggcatggtgtcaatctccgtcaccggcgccaaggcctcctccgcgctcgctaagcccgatccggcacagctcggcttcttccttctctccgacgagtcgctcttcgaggccatctacgatcagccggcacccacggatctgaaccccaacccggagtcctccccgacctgcgtcctctccagcccctacgtgaagccgctcttcaccttcgcagagctcgatgacaagggtttccacaaccagactttccccatcacccaccccgacgagtacagcctctttttcgccaactgcgcgccggagaccagcgtcaccatggaggtccgcaccgacatgtacaacaccaacctggacggcaccaaggactacctctccgtcggcatggcctccgtcccggcgatctacgccttcttcgccgtctgctatgtcgtgttcctggccggttggctctacgtcaccctctaccgcaaccgcctctccgcgcagcgcatccaccacctcatgtcgggcctgctcgttgcgcgtatgctctactgcatctcggcggccgaggaccagcactacatccgcaccgccgggacaccgcacgggtgggacatcatgttctacctgttccagctcgtgaagggtgtcatcttgttcgctgtgattgcgctgattgggactgggtggtcattcctgaagcctttcctgcaggataaggagaagaaagtgctcatgttggtgatccctctgcaggttgcagctaacattgctgctgctgtagttggcgagaccgggccattcttgcagggatgggtgacatggaaccagatcttcttgtttgttgatgtcgcttgctgctgtgccgtgctcttcccagttgtgtggtcgatgcgttcgctgcgggagtcatccaagacagacggcaaggcagccagaacccttgccaagctcatgctcttccgccagttctatgttgtcgtgattggatatctgtacttcaccaggatcattgtgtatgctctcaggacaattactaactacaagtacagatgggtgagcgttgcagccgaggaggtctccaccatggcattctacatgttcatgttctacatgttcaggccagctgagaggaaccagtactttgcacttgacgaggatgacgaggaagccgcagagatggtgctccgtgagcaggagtttgagctctagacggacacatggatgcccaatgacgtgggaatacagccatctcccattcattttctcctcgatgtgctgttgatcatactatacagattcagggtttagctaatgtttgtttatgtgttttggtaaatcttctccagttcctttttagtttcggaagctgccaatgagatttgtgattaatagatttcttgtgttacaaaagcaagggagaattcaattccattataaatagatgattttattggtgt

SEQ ID NO: 367 - DNA, 132 bp, Zea mays
  Clone ID: 700073177_FLI
aggaaaactgctcgatgtccttttgtttgttgcttggtaataccgttctgtttgctataattatcgatcagcgggatgtgaagtactgtttacattgctcgcgttctaataaagtactgtttggacttgctt

SEQ ID NO: 368 - DNA, 2935 bp, Zea mays
  Clone ID: 700073203_FLI
gtggctcttcctcctcctatgctgtgactcgaggagtatggcggatggggctattgtggtagccatttgccagtacggcggagagttcacttctggccccagtggtaatctgatatacagaggtggagaagcacatgccgttgatgttactcatgattcatcgctggagagcttcaaggatgagctgtccaaggtgttccatgttgatgtcactgacatgtcactcaagtactttcttcccaataatatgaaaacactcatcacaatatcatgtgaccgggatttgcaaaggatggttggttttactgcaaatgctgcgcatgtggatgtttttctgataagtagacaggagaacaggagtactataacacattctggagctacatctggctctgttgctagtggcgacaaaaggaaaagaccaacacccaaaaacaaggtaatcagaagcagcaaaccagctaccagtgctgcttgcaatgcacttcaagctatcacagataatgtgagacaaccaatttcagttattactgaaaatgaagacaacagggtttttcagttggaatttgggaatgacatcacatttaccaccacagctggaggtgcttccttcacatcagatattctcgatcagcaaaagcttgttcttgttgataatatccccaaggaagcagttagtttgtttgatgatgcattcaatccatatgttagttctgagatcatgcatgagccgcctcaggaacctaacaatcctattgtgttgtgggatgacattatcaaaggagttggtcaagaatttgataacgtgaaagatttccgtgctcagttgtgcaagtatgctattgggaaaggatttgtgtaccggttcataaaaaatgaaactactcgtgtcactgtaaaatgtggtgcagaaggaggctgcacctggcggttgcatgcatctgaatcatctcgtaacaagaaatttattatcaagagattgacagatgaacatacttgtggtggaggaagtggagagggtcagcgtcgagcaacacgacagtggttgactactatcattaaggagaagctgcatgataacccaaagttcaagccaaaggaacttgtaaaggaattatttgaagaatacggagttacactaacatattcacaggtctggcgaggcaaagaagtagcagagaaagagctgtatcatgctgtcagagagactcgcgatcagttaccttggtattgtcagaggctcgaggagacgaacccaggaagtataagtgtgctgtctccagtgttggatatgaaaacccgtcgtttttttgttgcattgcatgcttgtttgcatggctttataaatgggtgcaggcccctcttatttttggacaaggtcccactaaaagcaacgaatgagtacaagttgcttgtggccgctgctgttgatgcagatgatggtgtctttccgttggcatttaatgtggttgaagatgaaaattatgatagctggggttggttcttaatgcatctgaaaatagctctccaaactcacaactacccttgcaatggcatgacattcttgtccaacggacaaatgggtctggatgctgctgtttctcacgtgtttgaggatggcgaacatgccttctgtttgcatcatatcattgaggaattcaaaggagagctgaggaagggaccatggtcacaacaaattagggaggggatggttgaagatttcactcgtgcagcccaagcatgcagcatcgaggattttaatgcatccatcgagagcataaggaatatatccagtgaagctgctgactggatcatagcgagcaagccagagcattggtcagatgccattttccgaggcttccggtatgatcatttctccttgaacattgttgatgctttcgataactggataccagccaagaaggagagttccatagtgctgatggtagactcgctgagaattaagattaaggaagtaatagaatcaaggcttgaagcttgcaaggtgtggcaagggcctttaacacctaccatggaatacaaagtgcaggatgagatgctgaaggctggtaaaatgactgtgctgtgttcctccgatactgtatttgaagtgaggggcaacgcagttttcgtggttaatattggaaactgggaatgcacgtgccggcggtggcagctctccggcctcccctgcatgcatgccattgctgtgttcaacaggcttgggcgctgtttctatgactactgcccgaagttctttagaatagaaagctaccatctgacatactcgggaataatcttcccaatacctgacttggatagcgttgatttcagtgctggggcaaatctactcccactgcctcccaagcggcgcacgtcagataaaccgaggaggaagcggtctaaccccaacaagataagcactctcacacgactctgtagcaggtgcaaacaaacaggacacaacaaggcaacatgtgaagttcagttctagtggaaggcaacctcagaattaattcagcgtcaaaggtctcaagtttaggtatattgcagagaacatggtttcttttctcagagaacaagatctcaagttttttttaggctagtcagtttgactttttgatccatgcatcacacgaagatacgactaatgaattaaggatagttagaaggtttattcactcctgatgaatgctgtacttgtccataggatcttggtgaccactggtagaagccacggtacaaaccaccgtaagcagctgccacaactcttgtgtcaatttaactagtgtgggtgctcccttggataaagaccctaacgtggagttggcaatctgacaaaattaaaaagcacaggcaacttgctttgctttgttcagaacaccaaatattcattttcaaggtttaggattttgaaatttattttttcattttt

SEQ ID NO: 369 - DNA, 1264 bp, Zea mays
  Clone ID: 700073239_FLI
cttctctcctcgagaaccccaatccaaacccccaaccgccaaaattcctacgagatatatcacagaaatatcgtcttggctcagatcgtgcccgaggatcatggcgtcgtcgctggccgaggaggaggaggccttcgagcacacgcttctggtggtgcgcgaggtgtcagtgtacaagatcccgccgcgcaccaccagcggcggctacaagtgcggcgagtggctgcagtcggacaagatctggtccgggcgcctccgcgtggtgtcctgcggtgaccgctgcgagatccggctcgaggacccggccacgggggagctcttcgccgcctgcttcgtgctgccggggcagcgggagagcgccgtcgagaccgtgctcgactcctcccgctacttcgtgctccgcatcgaggacggcagggggaagcatgccttcgtcgggctcggcttcaacgagcgcaacgaagcattcgacttcaacgtcgccctctctgaccacgagaagtacgtcaagagggagcaggagaaggagaccacgggcgctggcggcgaggagactggcggcggtgagattgatatacatccggctgtcaatcgccgactcaaggaaggtgaaaccattaggataactgtaaaaaacaagccatcaactggaagtggtatgctttcagctgctggtttatctggagggaccactgcaaaacccaagacaagcatgcttctcgcgccacctccaggtgcagctgggaagcttcgatctcctcttccaccaccacctaacgaccctgcagctgcaaggatgaattctggacatactgcaggaatcagggctccaaaagagcccaccaagagaaataacgaccctttttcagatctttctgctataaagcaaaatctaccttcatctgctgaacccggacaaacaaagagcacaggagctggatgggcagcattctgacgatggatgcatgatctactgctactattggcatttgtttatctgaagaaggggaatgggtagttgaagcaccgaacaaggatctggaactgctggatgcctctacccctttcgaaactgaatggttaaaatgattgatcaacctaccagttccagttgtcacttgtcagtcgagaaataaacctttcccagagttgtattacccgtctcaccacatgaatggatgctcacattttctggatttagatacagcgtcccatcttgtttttatgttattcgtgctatgtttcacaaagcaataccagaatc

SEQ ID NO: 370 - DNA, 1361 bp, Zea mays
  Clone ID: 700073247_FLI
cataaaggattgtatagcttgagtcgtcgagcgaaacagctagcaaggaattccgcaagcaaggatgagtaagccggctgcggccctagtgatgttgctggcgctcgtcgccgccgggccggcggcgggcgacggggggagcaccagactcggctgcttcgtgggttggtccccgctcaaaaccgtgtcctccctgctctgcctgctccagggctccagcacttttccgagcccgaagcctgcgcccacggggcagggcctgagcgtcggttactacaacaaaagcggcagctgccctaaagcggagcagctcgtgagggaagccgtgacgaacgccaccaacggcccaaaccgtggccttaacgcgggtctcatccgtctccacttccacgacgccttcgttcggggctgcgatgcttccgttctcctggacaagaccgcgtcgggcaacaacgacacggagaagacaggcccacccaacaaggacagcctgcgcggcttcgaagtgatcgacgcggccaaggcggcagtggagaaagagtgccccggcatcgtctcctgcgccgacatcctggccttcgccgcgcgcgacgcgtcctacatcctcagcaacgagaagatctactacgacgtgccggccggccgctacgacgggcgcgagtccttcgccgacgagaccgaccagctgcccgggccgggctccagcgtccaggacctcaagaagagcttcgccgcccaggggctcagcctcgcggacgccgtcacgctgtcgggcgcgcacagcatcggcctcgcccgctgcctcttcttcaaagaccgcctgtcggccatggaccccggatacgctgccacgctgaatgccacctgcaacgctggcggggacagctacaaggtgaaccaggactacaagagccccgacgtcctggacaaccagtactacaagaacatcgacaagttcgtgctcttcgcgtcggacgctgcgctcaagtccagcgagacgattgaccaggtgaatgccaacgccggcggttatggcaagtgggagaaagacttcggggacgccatggtgaagatgggaaagatcggggtcatcaccagccccggctacggtgccgagatcaggaaggtgtgctcgcagatcaactactagctctagactcctcctgcggtaattattggctgcgtgtctactataatcgaccttaatgtggctttaatttattgagttcctctcataatgtaactgcgtgtgttcattattttattgttctactatttatcatatatatatatatatatatatatatatatatatatatatatatatatatatatatatataactcttttaatttcacgct

SEQ ID NO: 371 - DNA, 774 bp, Zea mays
  Clone ID: 700073256_FLI
tgttaatatattaaaatctggttatagtaaatatacataatatgctgtcatctagatcaatacacatatatgcctttgagacataaatatgtgtcatgattcaactttcatgaatagtttttctcaacgactcgcatactaatgatattagcaaattatttaaaataataaccatgatatacaacttatataaattattatgttatatttgtacattttagctaaactatttgacatctaatataattgtaagttcataagcgtagatatattttctagatatgagcttagcggtaggtaattttgcttatctattaccgtaataagcttgatgactgaggtagacatctgatttatatttaatctaactgtttctctatgtgaatggatacatatattaactcaggtagcactacaactagcaatgtatggatgaattgaaggaagtaaaagaaggcagacaatcttatagaaactctgcatattgaaaccgccatgattggcaaagaagttggatgcatctttgcattggtgtgttcttatcaccaagcagtaatgtgaagcaagttcatttgttgactaagaacggatcaacacaaattagtgaagattttgttcacaagagatgcaggatggagaggtggtagatttcaatatggctttgatactattttttccacttacaatattttgtatggaacaagaaaaaacaatgtatgtggttactattgtaattcaagaatttatttctaaataataaatatatttgtttat

SEQ ID NO: 372 - DNA, 1416 bp, Zea mays
  Clone ID: 700073260_FLI
ccatttacaacaccaccatgtcgtctgtccaggaggagcttaataacacacaggacatgctccaaggttacgtggagctctacaattacagtctctcctacgtgaagaccatggcgatcgggtgcgcgatccagctaggcatccctagcgccatccaccgccttggtggggcagcaacaatctcggacatcgtcaccgagaccggcgtcgacccgtcgaagctcccgtatctccgacggctcatgcgcgtgcttaccgtctccagcatcttgggcaccacaggcacagatgagagcgacgacagtactgtttacaagctcactccggcgtcccgcctcctcgtaagcggcgcgggggcaccgacctcgtgcgacatatcgccgatgctggaccttctgatgcgccccactacgtcggtcgccacctacttcagcctggaagagtggttcaaggacgcgggcgccaccgccacgctcttcgaggtggcgcacggcatgtccccgtggagcttgacgaagaacgacgccctgtacaacaagaccttgaacgacgggtgcgcggcggacagcaacttcgccatggacacgctcctgagagagccccgggccgcgggtatattccgcgggctcggctcgctcgtcgacgtcggcggcggccacggcgccgctgcgatggccatcgctagggccttcccgcacatccggtgcagcgtgttggacctcgagcaggtggtcagcggggcacctgctgatggcacggtgaagttcatcgccggcgacatgttcgagtctatcccggctgcagattgtgtcttgcttaagtatgttctgcattgctgggacgacgaaagcagcgtcaagatactccggcagtgcaagagagcgatccctgcaagagacgccggagggaaagtggtgatcatgaacatggtggtcgggtacggttcgtcagataggtttgtcaaagagacgcaggtgatgtgcgacatgtggatgatgcggtacgttggggttgagcgggaggagcatgaatggaaaaggattttcctagaggctggattcagcgattacagaatcacgccgacagcgctgggtttccaatcggtcatcgaggtcttcccctgaggaagaagcatatatatatatatatatatatatatgatcacgctgtgtaggatgtgtcatgtgtgccctgtgcgtaaggaaaaatatataccattattaataagttattaataagacagacatgatgatgagcgtatgggcaaatatacaggagatgcataagaatgagaaagatttaacgttgtactactgccgtttggattttcacgattacccctgtttacaaggagtagttgtatggatgcaaacattatttaccagtatgcaataaagaatggaacattttcgctct

SEQ ID NO: 373 - DNA, 1155 bp, Zea mays
  Clone ID: 700073330_FLI
aaagcccctgttcctcgtcctcgtccaccacagccgccccgcgccccgcctcccccgccgaaccgccagcgcccggccgctgcgcttcctctcctgctcgacctcagcgccgccgctgttcgcagccgtcgcatccatggactcgccgccccagggttaccgcaccaacgtcggcatctgcctcgccgacccatccctcaccaagattttctcggcttctaggatcgacattcctagcgcgtggcagatgcctcagggtggtatagatgcaggggaagaaccaagggcggctgccttcagggaattgagagaagagactggtgtcacatccgcagagatcgtggctgaggctcccgtctggttaacatatgatttcccgccagatgtcagaaccaaactgaatgccaggtggggaaccgattggaaaggccaagctcaaaaatggtttttatttagacttactggaaatgacgatgagattaaccttaatggtgatggatctgagaagccagagtttggtgaatggacatggatgacacccaaggaagttatcgaaaaggcagttgatttcaagaaacctgtatatgaggaagcattgaaacactttgccccctacctgcagtcagatccagccgcttcatcatagaagatttggccaatttgcttgcatccctgctgtatctggacccccaataatttgacacgacgcaatgtagccatgaggtgtgctatacaatttgatagtgtgtggcctgtttcagtcaattatatatgccagcattggatcctcgccctctacttagtcacataagtatacaataagtggtggaaacagtttactgtaatgaccgctacagcttcccccgtcgcatgattgggcttgtgcctttagtttcagccaatctggaacatggtggccagtgtatcttgtctgccaatgactgaatgctttaggttgaagcaataccataattccagagagactgcgatacagcaacctcaggttatgtggggggtcgtcggcaaaacgacgctcgtttggcattggctacggcagaaactagtgtctggctgccattggttgtgggaggagcagaggaaaacaaattgttggttacactctgtactactgcgtcatgatattgtcggctttcg

SEQ ID NO: 374 - DNA, 1064 bp, Zea mays
  Clone ID: 700073332_FLI
gagtgatgatggcattgctccagcagatgaacgggaggatggttggctatgcttctatgagattcttgccaatcattttgttagagtgcctgaaagtggcaggcgtatacttgagttgattgtgcaactctggagccagtccttcgcggccaacatatttgcacttcttttccagaaatggttgtttgaagcccctcttgatgaaaaagaaatatcgctacgatatagctctgctcttgttcaaggtgctacaaatgtattttggattgacatacagacaaatacaagacattttctctctttgtatcattatctccttgaggacgttgctctagtccctgaaagacttagtaaaatatcattacaggctggtagagaccttttccttctgctctctagattcatgttcttctatgatcaagatcacatgctttctagtttcctagagcattttcccaatttcccaaattccttcttggttggtggaccagcagattactttgtaattgaactcgctgatcagcttcaaaagctaaaaattgagccagtactactacactacctctcccgcatgagcatacttcaagggttggaactgaggttgagtacaagcaccagactaaaggcctgcctctacagcttcacttctcctggtggccctacctacccaacacgggcggtgcggcacgcagcctggaacaccttggatttgctgttccctatcggtcgttacccgaggcacgtgatcagcctgttcttccggctgctgtatccgtggtactggccttcctcttgctggaacttcgtgatgacctgtgccatgaccgtgtactactacatcctgaacctgctggtgtcgtgttgggagaacatgaggcggcggcccagtcaccggagaacgcacggtgaatgaagacgcggcggcccatccagtggcaccttgtgttgttgttgttgttcatttttctttcctttgcgcgagtggtgtagtagttagtagcagcggcttatgtgttcgtcgcgaaacaacattccctgtataatataaactgctgtacttgttc

SEQ ID NO: 375 - DNA, 1037 bp, Zea mays
  Clone ID: 700073355_FLI
gagaagcagccaagcaagagcctttccgagtgtgtggagcagcagcagcagcagccgtaaggctcttcggaaaggtggcgatcgtcacgggcgccgccagcaaactgggcgaggccatcgcgaggaagttcgtcgacaacggcgccaaggtcatcctcgccgacatcaaccgccactcctgcgagaacatagtagcggctctcaacaagaccaaccatggccccgcggtggctcacgcgatgcgcatcgacgtcagcgaacccgacagtatcctggccaccgtcgaggaggcgaagaaggtctacaagcaagatgtcgacatcttctacaacaacgcgggggtcagcaacgtctcctccccggcctcctccatcgacatgatgagcttcaggaacaccatggcggtcaacgtcgagtccgtcatagccagcatcaaccacgccggcgccgtgatgcgcagcaacaagatcggcggcgggtgcatcctgtgcacgggcagccccgtgggctcgctcggcgacgtggtgccctcggcgtacagcatctccaaggccgcggtcgtgggcgtcgtgcgcgccgccgcggccgagctggggggacacggcgtgagggtcaatgccatctcgccgtacggcgtcgccgccaggtttgacaagggcgtgctgaggcacatcttccctcacgcgactgaccagcagctggatactatgatcagcagctacggcacctacacggtgaccgaggacgacgtggccaacgcggcggtgtacctggcgtccgacgctggcaagaacatcaatggccaaaacatcgtcctcaatggcaagttcggtctttagaagtgtggccgccaacggttctgttggggctcattagcggcaacttcacacaccctgggcgacttccattcatgccccgttgtttcctgaataaatagtgtggctgtcagtgagccacgtaacgtgtgtttccatttctctttttatttgcgaaatttcgatgtttcaaagtttggcaacaagatgtacttcaaatcc

SEQ ID NO: 376 - DNA, 1490 bp, Zea mays
  Clone ID: 700073361_FLI
gccttcgcggcgctgcctgcgcagtactacgagctagcacagcaacaccaggaccaggagcctcttcccacacttccgctctccctctctctctttcctctcgagaatggttgtgtaggcgggcgcaggagggagggaggagagagaggggagctagctagggttttgcgtcgccgccttctgttacccttaggctctgaacccctccggtccggtgcggcggcggattaggctccgatggggaagtctccggcgaagtggatcaagtccgtgctcttcgggaaaaggtcgtcgtcgaggtccggctccaccaaggccaaggatttatcgaagggtacgactaacaaagcagcagctgctgctgctgctgccgggaaggagcccgcgttctctgagagctctccggtcatctcggagcctgtgcttgttagcgcccacaacaatgagaccgcgcgggaggccgctaagggtgagaattccagcgtgcaagaagtgccagagactgatgtcagtcaagacttggagaagcagggcactgttgggtctgatacgtctaatgatgctgagaggttgagggaagagcaagcggccgtgaaggcacaagctgccttccgtggttatctggcacgccgagcattccgtgccctgaaagggatcataagactacaggcactgattcggggacatcttgtaaggaggcaagctgtttcaactctccgtgccacatggttgattgtgaagtttcaagcccttgtccgtggaaggaacgttagactttctaatgtttccattcaagcaactacggaactttcccaacagaacttcgggggttctaaacctggttcctggaaggagaagttgtcttcaaatgcatttgctcggaagcttctctcttcaccaattgtggttgaggctcttcacgtccagtatgatgagatggaccctaattcggccttcaattggttagagaggtggacagtaagtcatgtctggaagcctatttcccaaccaaagagagttggcactgatgctaagcctcatacaaggaaggccagttatgcaatggaaacagagtcagcgaaattaaagcgtaatgcacggaagagccctgcagtgccatttgagccttctcaaacaaacaccaccattgaaaatgagaagacaagacggaatccaaggaaattaagtagcactcctgctgagtcagttcccgatggccagttaacagaacttgagaaggttaaacgtagccttaggaaggttactagttccacggttgaaacctcaaaggtgcctagcccaacaactgagattcctgaccgtcaagaggtacaatgtgagagaccactaagaagtgcaaagcaagctccaattcatgttgagaatcaagaacctcagaatgttaatctatcggagaatgcaaagatggatattctggtaccagatatccagcctgacgtggaagttgcttcagatctagtcacaatcac

SEQ ID NO: 377 - DNA, 713 bp, Zea mays
  Clone ID: 700073416_FLI
ctaatccaacccgcccgataaaaactctaccgccagatcagcaacattcccacgccactcccagagctcctaacccggaaccacgaaggggatccatggcggcggcggcgggttggctccgacgtgcggcggcggtatcgctgccccgcctgccttccggacttcccttcataccgcctcctccttccggccctctcaccgaggcgcagtcgctcggggtccccggcctcggcgccgccgccgggccagccatggagctcatggccgtccctaagaagaaggtctccaagtacaagaaaggtttgaggaatggacccaaagctttgaagcctgtgccggtgattgttcgttgcaggtgctgcggccgagtgaagctaccccacttctattgctgcagtggagaaagaggaaacccaagcgagtcgaactcataaatgttttgttttcctactttgctcactatgctacgcctgaaatctggacatcgtaataccaatgaaataaattgtcagatcgctcttggtattcaccttgttctccttccaagcattgaatcaatacacacttactctagtttgaattcaaagtgtaagaccatcatcaagagcctttctaattttctgatatcattttagtaaaacttattttttatatttttgtaccctccaacagtttttttatatcttgtatgcagtccgattatatgcagcctg

SEQ ID NO: 378 - DNA, 1073 bp, Zea mays
  Clone ID: 700073426_FLI
gttcagatccactcgtcacacatccgcgttaccccctctcccttggtttcctctcccaccaccaacccccatcccggttatctccgccgccgcccgctttgggaaggcgcgacgaaggcaggcgagaggctccagccggacgaggaggaaagaggagcagcagggccggaggagagatgttcctgtgggactggttctacggggtgctggcctccctcggcctgtggcagaaggaggcgaagatcctcttcctcggcctcgacaacgccggcaagaccacgctgctccacatgctcaaggacgagcggttggtgcagcaccagccgacgcagcacccgacgtcggaggagctcagcatcggcaagatcaagttcaaggccttcgacctcggcggccaccagatcgcgcgccgcgtctggaaggattactacgcaaaggttgatgctgtagtatacctggtagatgcgtatgataaggagcgatttgctgaatcaaaaaaggagctggacgctctcctgtcagatgattccttggcaaatgttccatttctcatccttggcaacaagattgatatcccgtatgctgcctctgaagaggagctgcggtatcacctaggccttagcaacttcacaaccgggaagggcaaggtcaaccttggcgactccaatgtccggccacttgaggttttcatgtgcagtgttgttcgcaagatgggctacggcgatggtttcaagtgggtctcccaatacatcaagtagggcccttgccggggcgcttgctcagcccagcgatttttttgccttgttatttgttctggttggtatttcgtcacgtgaacgatgatcatcatatcatgacagtatcatggaggggtatgaagaggaaaaaacagtgcttaacattggggaacatgttgaatctttagcgtgaaaacattttgttatgtcagtcaaactcctggaattcttttgcttttccgtaggacctttactaaggacttgcctgcgatgcattataagattattgattgcttaaattatgtgttataatatggtggtggattggtactgagt

SEQ ID NO: 379 - DNA, 951 bp, Zea mays
  Clone ID: 700073466_FLI
ccggtagcagcctagcaggagcgcagccagcaagctcagccccccaggccccagccctactgccaccgcgccgaacgacatggccgagccggcggagcaccgtccagctgaggaggaggaggccgcggcggccggcgaggatgaggacaccggcgcccaggtcgcgcccatcgtgaagctggaggaggtcgccgttaccaccggagaggaggacgaggacgcgctcctggacatgaaggcgaagctctaccggttcgacaaggaggggaaccagtggaaagagcgcggcacaggcactgtgaagctgctcaagcacaaagacaccgccaaggtccgcctcgtcatgcgtcaggcgaagacgcttaagatctgcgccaaccatctcgtggtggcgacgactaagatgcaggagcacgcggggagcgacaagtcgtgcgtgtggcacgcgctggacttcgccgacggcgagctcaaagaggagatgtttgctatccgttttggatctgtcgagaattgcaagaagttcaaggacactgttgaagagatagctgaacagcaaggaaagagcgaggagaaagaaaatgatgaagtctccactgccgcttctgatttggcacagaagttaacagtggcagagcccagcaaggaggaaaatgcagagaaagaggaggctcctgcatccgatgataagaaggatgctaaagagtgaaggttgaaggcaaacaagggtcaaatggatgccattccattcatttcgtttccaaggttcagcttccccgcaaattttcattgtgttttctccgagatgaatgtttgtgttcggtgaaatcagagtcgtcagtcatctacatagcttttcttggttgatagactgttattttaagtcgcatgtttatctgggatggctggggtcagcatgtttgtacaattatttggagttgcttttggaat

SEQ ID NO: 380 - DNA, 1635 bp, Zea mays
  Clone ID: 700073484_FLI
ggcgtcagcgcaactcaggcaaacaacggaacggaaaccccggccgtcactgcgccagagctggagacagagatcatggtgcgggcatgggggcggcggacggcgctgcctccgctcctcatccttggcctcctccgcctgcactactcctcgctggtcgtcgcccaagaaggacaagaaaaagaccctgctactttgttcgcacaagcctcagggatgatggacctgaggaagtatgatggggcgcttggcctgctaaatgctgtgttggaaattgacccaaatcattctgaggcttataggcagcgtgcatccgtgcttcggcataaatgcagatacgaggaagctgagagggactataacaaacacctggagctaagtcctgggtctgcttcagtggtgaaggaattatcccagcttctgcaggctcaaaattcattacaatctgcttatggccaattcgattctggagacttctcaaaagtcgtggaatacatcaacaaaattgtgctggttttttctccaggttgcttaaaggcaaagcttctcaaggctaaagcattgctagcactgaaagactactcaagtgttatttcagagaccggattcattctaaaggaagatgaagacaacttggatgcactgctattacgtggtcgtgcctactattaccttgctgatcatgatgtggcctccaggcactaccagaaagggcttcgtcttgatccagagcattccgaattgaagaaagcatatttcgggttaaaaaatcttttgaagaagaccaagagtgcagaagataatgctgccaagggtaagctacgtgtgtctgttgaggactacaaggcagctctagcaatggatccagaccatactgcttataatgtacatctttatcttgggctgtgtaaaactctggttagacttgggagaagtaaggaggcaatcagcacttgtacggaagcactgatcatagacagtgaacttgttgatgcgcttacacagagaggtgaagctaaacttctctcagaagattgggaaggagcagttcaggatttaaaagaggccgcccagaaatctccacaggacatgggtatccgtgaagcacttatgagagctgaaaagcagcttaagttgagcaaaagaaaagactggtataaaatccttggtgtttcaaagacagcatcagctgcggagataaaacgcgcctacaaaaagctggcgttgcagtggcatccagataaaaacgtggataaccgggagaaagcagaaaacatgtttcgagaaattgctgctgcttatgaggtgcttggtgatgaagacaaacgtgtaaggtatgaccgtggagaggatgtggaggagatgaatatgggaggcgggggtggcttcaatccttttgggggaggcggccagcagtacacgtttcaatacgacggtggcttccccggcggcggcttccctggaggtggcggctttcagttcaactttggataaactgtgccatgcaccatgacattttcttggcactggaattgttttaggaattcttaacggcagctggtagctattcttaggcaggctgagactgttctactatgttacataataatgacaagtgttacgattttttccttc

SEQ ID NO: 381 - DNA, 1180 bp, Zea mays
  Clone ID: 700073485_FLI
gcgcaggcaagcagatcgtcctgactcctgatggcacaggcacaccaccctcttctcctactaattcttttgctcttcctctcctccactgccattccttcctccaagagaacccagccgaagttctctgccgtcttctacttcggcgactcggttctcgacaccggcaacaacaaccatctccccacggtagctgtggcgaaccatgctccttacggaagggacttcccagggaagaaaccgacggggaggttttccgacggccggcttatcccagacctcctcaacgagaggctgcagctcaaagagttctcgccgccgtttctggacgcaaggcttccgaacagcgacgtcgcgacgggggtgaacttcgcttcggctgggtcaggattcaacgaccagacgtcgcggctgtccaacactctgccgatgtcgaaacaggtggacctcttcgaggactacctgctccggctcagaggcatcgttggggacaaggaggcttccaggatcgttgccagatctctgatctttatcagctcggggaccaacgatttctcacactactaccgttcgccaaagaagaggaagatggagattggtgactaccaggatattgttctccagatggtacaggtttatgtcaaggaactgtatgaccttggggggcgacagttctgtttggcaggccttccgccgtttggctgcacacctatccaaatcacgttgagcggagaccctgacagggcatgtgtggatgagcaaaactgggatgctcatgtctacaactctaaacttcaaagacttcttgcaaagttgcaaggctcactccatggaagcagaattgtgtacgtggatgcatacagagctctcatggaaatcctggagaacccggccaaatatggatttacagagacaacacgaggatgttgtgggactgggctcagagaggttgctctgttgtgcaatgcattcactcctacctgcaaaaatatctcatcctatgtattttacgatgctgtgcacccaacagagagggtttacatgttagtaaatgattacatagtcaacgatgttattccacagttttagttaatcaaatacccaaataatgttttcttcttgtactaatatacgcaactaattgttttgccttcatacttaagtccaggatacaagagct

SEQ ID NO: 382 - DNA, 1389 bp, Zea mays
  Clone ID: 700073535_FLI
ggccatgtttgtgtgactgagccggccagctccgccaatcccgttggcttggctgcaactaacgaattggctataaatatcagcagctgcgggcttcagtgctcaaccaaagctagctactttgttgctgtttttattcgtttgtcacataagcagtggtggtcggtcggccggcgacaatgagcggccgtgtgttcgtcctggccgctgccttcggcgtgctgctcgccgcagccgccgtgtcctcgaggcccgtcctgactccgctgggtactagccgccctgctgccggcgacctgtccgtgtacttccacgcggactcgtgcccgcagctggagacgatcgtgcggtccagcgtggacgcggcgctccagcagaacgtccgtctgacggcgggtctcctccgcctcttgttccacgactgcttcccgcagggctgcgacgcgtccatcctcctggacaacggcgagcgcggcctcccgcccaacgtggggctgcagcaggaggccgtgcagctggtggaggacatccgcgggaaggtgcacgcggcgtgcgggcccaccgtgtcgtgcgccgacatcacggtgctggccacccgcgacgccgtgagcctgtccggcgggccttccttcacggtgccgctggggcggctggacagcgcggcgccggcgtccagcaacgacgtgttcacgctgccgccgccgacggcgacggtggacgagctgctgacggcgttcgggagcaagaacctgtcggacccggcggacctggtggcgctgtcgggcgcgcacacggtggggaaggcgcggtgcagctcgtttggcgacgtggcgggcccggccaccgacgacgtgacgcggtgcgtgacggcgacgtgctcggcccccgggagcggcgacacgctgcgggacctggacttcctgacgcccgccgtgttcgacaacctctacttcgtggagctgacgctgaggaagaacaagggggtgatgctgccgtcggaccaggggctggtgagcgacccgcgcacgagctggctcgtccagggcttcgccgacaaccactggtggttcttcgaccagttcaggacctccatgatcaagatgagccagctcaggggaccccaggggaacgtcggcgagatccgccgtaactgcttccgcccaaacaccaacggcatcgccgcctctgcttgagttgactgaccaggcaccgatccattacttcactttcactgtgtgtaataattaataataataaaacaaaaacaacgccagcccgtacgtgccgtgtgaggggggcacgtggttgtggctatactgtagccgtcaccaccatgtcggcgtcgtccatgcatgtcgcattaccgatttttgttcatgttccgatctc

SEQ ID NO: 383 - DNA, 1269 bp, Zea mays
  Clone ID: 700073545_FLI
tcgaaaccgagcaccagggagcagacgcggtctctggaacccaggttccagcgagcaaaccatctaaccaggcgctgagaattctgtgcggaggaggcggatggcaatggtggcggcggcggaggggagcgggcgcagggacgccgaggcggagctcaacctgccgccagggttccggttccacccaacggatgaggagctcgtggtgtactatctctgcaggaaggtagcgcggcagcaggtgcccgtgcccatcatcgcggaagtggatctttacaagttcgatccgtgggatctgcccgagaaggcgttgtttggtcgcaaggagtggtacttctttacgccgcgggaccgcaagtacccaaacggctcgcgccccaaccgcactgccggaaaggggtactggaaggcgactggggccgacaagtcgatcgtgcccatgggcagcaccagggcggcggggatcaagaaggcgctggtgttctactctggcaaggcgcccaggggcgtcaagacggactggattatgcatgagtaccgcgtcgctcaagcggaccacaccctggggaagaagggctcacagaagctggacgagtgggtgttgtgccggctgtataacaagagaaacaattgggacaaggtgaaggtcgaggagcaggagttggaggcggcgccgcgccgacagcatcacttgcagagcgcggaggattccatgtctaacagtttccagacgcacgactcggacatcgacaacgtcttcgagctacaaaattgctacggtaacaacatggtgcaagggcaggccatgacccccaggaacgacattggcgtcgtgacggtgaaggaggacaacgactggttcaccgacatgaatctggatgatttgcaggcatcctacaacatggcccatacggtgaatccgaacccggcccaaaccgcgaacctggtggcagggcaaggccatggctacttgcaaggctatggctacttgcagtacatgaactcaccgtcgatgaagatgtggcagacaatcttgccttcgttctgagtgtccacgatgaagatgagtgtccacgatgaagagatgctcttgtacataaggggacataggagtgactagactggaatagaaacaacagggtatgattctgtatctataggcttgtaacgtttattcattcgttagataatacgtatgtggttggtaataccaaaaaaatgcatctccctttgcactacttgaagaaagcacaaagttgtagttctcgt

SEQ ID NO: 384 - DNA, 782 bp, Zea mays
  Clone ID: 700073547_FLI
aggaagatggggctcgcgttcgggaagctcttcagccggctcttcgccaagaaggagatgcggatcctcatggtcggcctcgacgccgccggtaaaaccaccatcctctacaagctcaagctcggcgagatcgtcaccaccatccccaccatcggtttcaatgttgaaactgttgagtacaagaacattagcttcactgtctgggatgtcgggggtcaggacaagatcagacctctttggaggcattacttccagaacacccagggtcttatctttgttgtggacagcaatgaccgtgaccgtgttgttgaagccagagatgagctccacaggatgctgaacgaggatgagctacgtgatgctgtgctgcttgtttttgccaacaagcaagatcttcccaatgccatgaatgctgctgagattactgacaagcttggattacactccctgcgccagcgacactggtacatccagagcacttgtgccacaactggcgagggtctgtatgaaggcctggactggctgtccagcaacattgcgagcaaggcttgaggcctaccttgaatgtcaaccgcgaactgactaggagctccggatgtatcatggaaactcaggacagaatcgcagttgcaacctgttagatgtcttctaccggcactatatatattttttgtttgatgtgtaatgatgttactgttcaacgtttattaccctactatactgttggatgttctttggacctgtttcatttcgcacaaggattggacttccaatatcatgct

SEQ ID NO: 385 - DNA, 417 bp, Zea mays
  Clone ID: 700073549_FLI
atgaaccccgccgtgtccttcggccccgccctcgtcagctgggagtggggctaccagtgggtgtactgggtcggccccctcatcggcggcggcctcgccggcgtcatctacgagctgctcttcatctcccacacccacgagcagctcccctccaccgactactaaaagccgaagccgaccgacccaggggtgcgcagcgcagcgcagctagcatccagcgctctctccccgctcgccgccgtttagtttctctcgtgcacgtgcatgcatcgtagactgtctcaggccgccgctgcgccggcgccgctcgcatcgtttgcttccttggaccagcagtcgtcgccgtcaggctgaactgcttgtaaccgtgaattccggacccgtttgcttctgtaagatttgtgcatttgcctgagt

SEQ ID NO: 386 - DNA, 691 bp, Zea mays
  Clone ID: 700073575_FLI
cgtgatctcaacccaaggcgtgcctccgctccggtcacccgtcgctccacgcaaccatgtcgaggaggaagaccagggagcccaaggaggagaacgtcacccttggacccactgtccgtgaaggagagtatgtctttggtgtcgctcacatctttgcatccttcaatgacaccttcattcatatcactgatttgtctgggagggaaactctggttcggatcaccggtggcatgaaggtgaaggctgaccgtgacgagtcgtcaccttacgctgctatgcttgctgctcaagacgtcgcacagcgctgcaaggagcttggcattactgcactgcacattaagcttcgcgccaccggaggcaacaagaccaagacccctggacctggtgcccagtctgccctcagggcgcttgctcgttccgggatgaaaatcggacgcattgaggacgttaccccggtccccactgacagcactcgcagaaagggcggtaggaggggaaggaggctgtaggcgtctcgtctgcgtggcatttgccggctcttggccggtggccattatgaagctagccctctctgggtggtgttgctgttctgtgtttgtcaagacgagctttaattttgctctatgtggatgaccgtttaccgttactcgaacctatatgatgttccatggataatgttttttggctgagg

SEQ ID NO: 387 - DNA, 914 bp, Zea mays
  Clone ID: 700073589_FLI
tcaaatcaggacaggcatgctgaactaggcgaggtggactgggcgagcgagcgagatggagtggacgacggtggagacgagggacggcgcgaagctgagcgtgcggctgttcaagccccccgcgtccggaacggggttggagccggagccgagggaggacgtggcggtggtgctggtgcatccctacaccatcctcggcggcgtgcagggcctgctgcgggggatggcggagggcgtcgcgcggcggggttacaccgccgtcaccttcgacatgcgcggcgcgggccggtccacggggcgggcgtcgctcacgggctccaccgaagtcggggacgtcgtcgccgtctgccgatgggtcgcagagaacatcaagccgcgcggcatcctcctcgtcggatcctcagctggggcaccaattgccggatctgcagttgataaagtggatgaagtgattggttacgttagcatcgggtacccctttggtctgatggcctcagtcctattcggaaggcataatgatgctatactcaagtctgaaaaaccaaagcttttcatcatggggaccaaagatggcttcaccagtgtgaaacaactgcaaaacaagctcaaatctgcagctggacgggctgatacacacttgattgaaggagctgggcacttccaaatggagggccctgcttttgatgcccagatggtagaaattattattaaattcattaattccttgccaaaatagcatttatggtgactgtttgagagtttgcaaaaattctagcgatgagcaaagcttgttatttaaatacagccacgatggtttgtattttctcatcctgcatatgtgtgctctctggtgttattgaaacagtgtaactgtgtgtgttgtatcttaatatattctgatcccccacctcccc

SEQ ID NO: 388 - DNA, 342 bp, Zea mays
  Clone ID: 700073619_FLI
gatcgtcccctggtaaatgtgctgttctgtggctgcactggtcatcaccatgatctggagctttgaaggcatagccacctgtggtcagcagctgctgccgtgttgctagaataaagttggtggcgatcgatcgatcgatctttggtgatgggtgtccctccctgtgtgtttgtgtttagttccagtcgtttgtgaggaagtcagttatgtttgagtgagaggggtacttcgctcttcggttaactctgtacttgtcatgaggagagttttcatacccggagtgtagaactctgtactgtactcggatccttccttttccatccaagtgggttttattttatc

SEQ ID NO: 389 - DNA, 1063 bp, Zea mays
  Clone ID: 700073673_FLI
gctttgttgagccacgtgttagcaaggaacttctaacagaggattcttactacaacttcatccaaacatgggataatgatgaggagataaagatgctgcgcacaaaggttgatttaattataactcttggtggtgatggaactgttctgtgggctgcatcattgttcaaaggacctgttcctccggttgttgcatttgccctgggatcactgggcttcatgacgcctttcccaagcgagcaataccgtgagttgttggacaatgtgctgaacgggccatttagcatcacgctgagaaaccgcatacagtgtcatgtaatacgtgacgaggcaaaggatgaaatcgtgtctgaggagccattcttagtgttgaacgaagttacaatcgaccgaggaatatcgtcctaccttaccaacctggaagtctactgtgacagctcttttgttacttgcgtacaaggggatggactaatcatatcaactacatctggaagtacagcatattcattagcagctggagggtccatggttcatcctcaggtcccagggatccttttcaccccaatctgcccgcactctctgtcattcagacctttgattctgcctgaatacgtgaccctccgcgttcaagtgccgttcaacagcaggggcaatgcctgggcatccttcgacggcaaagaccgacagcagctgtcgcccggtgacgccctgatctgcagcatttctccctggcccgtgcccacagcctgcctggtggactcgacgaccgatttcctccgcagcatccatgagggtctccactggaacttgaggaaatcccagtcatttgacggcccgcgtgattgatgcaacagctgttcagttatatttcagcccggtgccagaattcaagctgggaattctcaacaggaataactgtagctactccagggtgctctcacctttaccgttccatacttgcctatatacaaaggttgcgtgcgttagatgtgaggtatagatagatgtatagaatatggatggatgataacgactggacatgttgaataatacaacgccaacgt

SEQ ID NO: 390 - DNA, 1141 bp, Zea mays
  Clone ID: 700073691_FLI
ctcccagacccatttccctttccttcccctccggctccgcctcctcgaccactccgacaacccccagcgcctcctctccggcgagctccacctctccaccggcggcggcgagaagcgggggggctaactaagtctgtaggctgcggcggaggtgatcccggagccggagccgagtctagggcgatggggcagcagtcgctgatctacgcgttcgtggcgcgtggcaccgtggtgctggccgagtacaccgagttcaccggcaacttcaccaccatcgccgcccagtgcctgcagaagctccccgccagcaacaacaagttcacctacaactgcgacggccacaccttcaactacctcgtcgaggacggattcacgtattgtgtagttgctgttgaatcagttgggcgacaaatccccatagctttcctggacagagttaaggaagacttcaccaaaaagtatggaggcgggaaagcagctactgctgcagcgaacagcttgaacagggagtttggatcaaagcttaaagagcacatgcagtactgtgtggaccaccctgaggaggttagcaagcttgccaaggtgaaggcccaagtctccgaagtcaaaggagttatgatggaaaacattgagaaggttcttgaccgtggcgagaagattgaactgcttgtcgacaaaactgaaaatctgcgttctcaggcacaagatttcaggcagcagggcaccaaggtgcggcggaagatgtggctccaaaacatgaagatcaagctgatcgtgctgggcatcatcatcgcgctcatcctcatcatcatcctgtcggtgtgccatggcttcaagtgcggcagcaagtgaggagggggacttacggatggccgtgccctgccctgccctgccctggcacctgcgagaaggaggagactacatgtggagtttttttttgcttctttagtcgtcgtgttaagtcgtcctgcgccgataattcttggtggtcaccagataaagagtcattcctggtgtcggtgttgattgctgttggttggtcgggaaatgactgggtgaaccgaggggcgaagtgggaggggggttgtgtcgtgtaattttggatgccactattgtgcatgtatagccccgtgtgctgtgc

SEQ ID NO: 391 - DNA, 1101 bp, Zea mays
  Clone ID: 700073833_FLI
caagatcaacgtcgtcgttcaagccagcggtagtagagactacgaccgaggctagctaagctaagagatggcggatcaccagtactcggcgtggacgacttccgctgctcgtcatcgggtcttctcctgtgcgctcatggctcttgttagttttgtggctgcaggacgacccatggtgctcgccgacgccatcgtctttcacgtggcgaacaggtgcccgttcccggtgtggccggcgtccgcccctaacaccggccacccagtgctcgccggcggcggcttctacgtcccgcagggcaagtcgaggcgcgtcgtcgcgccggccaactggaacgggcgcttctgggcccgcaccggttgcaacttcaccgcgaacggcatgggcgtagcgggctgcctcaccggcgactgcgagggccggctcgcctgtaacgggtccgtgggcgccccgcccgccacgctagtcgaggtgagcctgcacgaggacgccccgaaagggagctcctacgacgtgagcctggtggacgggtacaacctccccgtcgccgtctccgccaagcccgccacgggcggcgcggacccgaacaagtgcgccattgccggctgcgccaagaacgtgaacgcggtgtgcccgccggagctgcaggtgaccgctaccggcagcggcggcggcaagacggtggtggcgtgcaagagcgcgtgcctagcgttcgggctcgacgccttctgctgccgcggcgcgtacgcgacgccggccacgtgccgagggaccgtgtactcgcgcctcttcaaggacgcctgcccggcatactacagctatgcctacgacaccgccgccacgacggccagcgggtgctacgcgcaggagtacatcatcacgttctgcccgtccagatggggcgacgagcccggggatcgtgctgctcagatttgaatttggtgtcgtcatcgtcagtcaggcaattaccaatcaccattgcgtcgagcttttcgcacgtctttatgtatgtgtgtacgcttgtgtctgcttctagtgggctttcacataaatttctacatacatatacacatacaacaataaaaaataaggtagtgctattt

SEQ ID NO: 392 - DNA, 1435 bp, Zea mays
  Clone ID: 700073869_FLI
cgaagcttcatgttcagcagcccgacggtgctggtgacgacggcggaggggtgcaagcaggtgctgatggacgacgacgcgttcgtgacggggtggcccaaggcgacggttgcgctggtcgggccgcggtcgttcgtggcgatgccgcacgacgagcaccggcgcatccgcaagctgacggccgcgcccatcaacggcttcgacgcgctgacggggtacctgcccttcatcgacagcaccgtcacgtcgtcgctgcgcgcgtgggcggaccacggcggcagcgtcgagttcctgacggagctgcggcgcatgacgttcaagatcatcgtgcagatcttcctgggcggcgcggaccaggccaccacgcgcgcgctggagcgcagctacacggagctcaactacggcatgcgcgccatggccatcaacctgcccggcttcgcgtaccgcggggcgctgcgcgcgcgccgccgcctcgtggccgtgctgcagggcgtgctggacgagcgccgcgccgccagggccaagggggtctcgggcggaggagtggacatgatggaccggctgatcgaggcccaggacgagcgcgggcggcgcctggacgacgacgagatcatcgacgtgctcgtcatgtacctcaacgccggccacgagtcgtccggccacatcaccatgtgggccaccgtgttcctgcaggagaacccggacatgttcgcgagagcaaaggcaggttctttctttctttctttgttgtttaattttatcctgaaagctagctgaacaattaagtgccccatgccaccaggcggagcaggaggcgatcatgaggagtatcccgtcgtcgcagcaggggctgacgctcagggacttcaggaagatggagtacctgtcgcaggtgatcgacgagacgctgcggctcgtcaacatctccttcgtctccttccgtcaggccaccagagacgtcttcgtgaacggatacctcatccccaagggctggaaggttcagctctggtaccggagcgtgcacatggacccacatgtgtaccctgaccccaccaagttcgacccgtcgaggtgggagggccactcgccgagagccggcacgttcctggcgttcgggctgggcgccaggctctgccccggcaacgacctcgccaagctggagatttccgtcttcctccaccacttcctcctcggctacaagctggcgaggacgaaccctaggtgccgggtgaggtacctgccgcacccgaggccggtggacaactgcttggccaagatcaccagagtcggtagctagctgctagattgtgatggaagtacgaatgaaaaaaaagcccagcagaaactctagcggctgggccggctggaaattatgggccgggccattgtggttgccccccctgtctgtgcaaaaataaaacaagcagaaaggaat

SEQ ID NO: 393 - DNA, 794 bp, Zea mays
  Clone ID: 700073871_FLI
gtgacgagcttgccctggaagttttctgcccggtgtttggcgcatcacagcaaccaattagcaagcagcaggactccatctcctccgtcaccaagatcggactatggggcggacagggagggtcggcacaggacatcacggcagagcagccaccgcggcgtctgcacagcatcaccgtccgcgctggcgttgccgtcgactccatcgagttcacctacaccgacgacgctgggcagaggcgcactgctgggcggtggggtggacttggcggcaatgttcgaacgatcgaccttggcgacgccgaggatgttagagaagtctcgggaacatacggcgcatttgaaggtgccattacgctgacctcgctcaggctcgtcaccagcagcagaacctggggcccctgggggatcgagaacgggacgcgtttctccatcacggcgcccaacggcagcagcatcgcgggattctatgcgcgggcgggaaccaggctcgtcgacgctatcggtgtttacatacgtccagtggtgccaggcaggcctcggtgaaccagcgagctagcccagtctgatcgactcagctcgctcgtattacgagctgtaggattatggttcggcttgacttgatgcaggctacctgctacatcatgctcgattagtcctttaattcggtcatcgtcttcgtcttgtcttgtgtcaaataaagatcttgtgcctatatacggctctcatggttgtgccgtgtctctatatgttagtgcttatgtatatgtggagatcaaataatggccttgcaat

SEQ ID NO: 394 - DNA, 872 bp, Zea mays
  Clone ID: 700073878_FLI
tccaaacatacaggtctttgagggtgagcgcagcatgaccaaggactgccgtcttctgggcaagttcgacctcaatggcattccgtcagctccgaggtgcgttgctgctgctcatctttttgttgaatggccgattgaatccagtgttgtctgatgaacgaattgaactgtgcaggggcacaccccagatcgaggtgaccttcgaggtggacgccaacggtatcctgaacgtgaaggcggaggacaagggcacgggcaagtcggagaagatcacgatcacgaacgagaaggggcggctgagccaggaggagatcgaccgcatggtgcgggaggcggaggagttcgcggaggaggacaagaaggtgaaggagcggatcgacgcccgcaaccagctggagacgtacgtgtacaacatgaagaacacggtgggcgacaaggacaagctcgcggacaagctggaggcggaggagaaggagaaggtggaggaggccctcaaggaggcgctcgagtggctggacgacaaccagtccgccgagaaggaggactacgaggagaagctcaaggaggtggaggccgtgtgcaaccccatcgtgtcggccgtgtaccagcggtcgggcggcgcccccggtggcgatgccgacggcggcgtcgacgacgaccacgacgagctgtagatggtggtggggagcggtgacgtggagtgccgggaaccaagccaaattttgtaatgatgtttaggagggagggtggtggacaaaaaaactaatcttggtgctgctctgccaatagacgggctgagcatagaactttttttcccttctacttccttgtgattgttctttttatagaggattcgcattgcagtgtaatgt

SEQ ID NO: 395 - DNA, 1731 bp, Zea mays
  Clone ID: 700073880_FLI
acaaagctgttaacccaagtgggattgaggagggccttcaaagtctgcgtgaaggtggtgtgccaccaaggtttctgattatagatgatggttggcaagaaacagttgacgaaatcaaggaagtggatgaagccctccgtgagcagactgtatttgcgcagaggctggctgatctgaaggagaatcataagttcaggggggaaacctgcaagaatcttgaggaccttgttaaaacgataaaagaaaaacatggagtcaagtgcgtctacatgtggcatgctttacttggatattggggaggcaccttagcagcatccaaagtgatgaagaagtataatccaaagcttgtttatccagtccaatcgcggggtaatgttgcaaatctgagggatattgccatggatagcttggagaaatttggagtgggtatcgttgatcctgacaagatatatgagttctacaatgatcagcacagctacctttctagtgtgggtgtggatggcgtgaaggttgatgttcagaacgtgttggaaactcttggacgcggatttggtggtcgtgttgcagtaactcgaaagtaccagcaggctcttgaggaatcaattgcccagaacttcaaaacaaacaacctaatctgttgcatgagtcacaattcagacagcatctttagtgccttgaagagtgcagttgctagagcctcagaagatttcatgcctcgggaaccaacactgcaaactctgcacattgcgtctgtggcattcaatagcctattgttgggagaaatcttcatacctgactgggatatgttccatagcaagcatgaatcagcggaattccacggagcagctagagccctgagtggaggtggtgtttatgtcagtgacaaacctggggtgcatgatttcagtgttctaaaaaagcttgttctaccagatggttcgattctaagagcaaggtatgctggtcgtcctacacgcgattgtctgttcactgacccagtcatggatggcaaaagtctgatgaagatatggaacttgaacaatttcactggtgtcattggagtgttcaattgtcagggagctggacagtgggtttggccagttaaacaaactgcttatgttcctaccaacataaacataactggtcagctctcaccgtccgacgtagaatctctcgaggagatagctggtgatgactggaatggggagactgcagtatatgctttcggttcatgttctctttcaaggcttcagaaacaccaaagtttggaggtgtcactgtctactatgacatgtgagatctacagcatttcaccaataaagattttcagcgaagtcgtccagtttgcgcctcttggactgatcgacatgttcaactccggtggtgcacttgacaatatttcaagcgttgcagattcttcagctacgacagttcatataagatgccgaggaccagggcggtttggggcgtattcagacaccaggccagagctttgcagagttgatgaacacgaagtggagttcactcttgcagaggatggcctcctgaccttttaccttcccccttcttcctcccaggacaacctgagacacgttgagattgtctacaaagcatcatgaacgacatttacccttatgattcttacgctccagcatgcaatttctggcgtgctcttcagtaaccaccacacatgcacattgacatgatgtaacaaagaacccattttgttgg

SEQ ID NO: 396 - DNA, 1754 bp, Zea mays
  Clone ID: 700073918_FLI
ggaggacgtgcgcgcgacctacactttcggccgcgagctcgggcggggccagttcggggtcacctacctcgtcacgcactcggagaccgggcagcgcttcgcctgcaagtccatcgccacgcggaagctcgtccaccgcgacgacattgaggacgtgcgccgggaggtgcagatcatgcaccacctcacgggccaccgcaacatcgtcgagctccggggagcatacgaggacaggcactcggtcaaccttgttatggagctctgcgagggcggggagctcttcgaccgcatcatagccaagggccactacaccgagcgagccgccgcctcgctctgccgcgagatcgtcgccgtcgtccacagctgccactccatgggggtcttccatcgggatctcaagcccgagaacttcctgttcctcaataacaaggaggactccccgctcaaggccacggacttcggtctctccgtcttcttcaagcacgatgtggatgtggatttgacttgaccgattcgccgggttggacctggacggtttcaggcccagcattgccaaaacgagtgtctatatatggaataatggaaatggcattattcaccatttttgttgtgtgttatgcattcgttactaccctctgtcccaaattataggggagacgtttaaggatcttgtgggaagtgcatattatgttgctcctgaggtactgaaacggaaatatggggcagaggctgacatatggagtgctggggtcattctttacatccttctgtctggtgttcctcctttttgggcagagaatgaggatggcatatttgatgctgtcttgcgcggtcacatcgatttctcttctgacccttggccttcaatatccaatggtgcaaaggatttggttaagaagatgctgcgacaagacccaaaagaacgcctgactgctgctgaaattttgaaccacccatggattagagaggatggagaggccccagataagccacttgacattactgtcattggtagaatgaaacagttcagggcaatgaacaagctcaagaaagttgcattgaaggttgtggctgagaacttatcagatgaagagattatgggcctaaaagaaatgttcagatccctggatacagataacagtgggacaattactcttgaagagctaagatctggtttaccaaaacttggtacaaaaatttctgaatcagaaattaaacaattgatggaggcggctgatgttgatggaaatggtaccattgattatgcggagtttatatcagccacaatgcatttgaatagattggagaaggaagaccacatactcaaagcttttgaatatttcgataaggatcacagcggatacataaccgtagatgagttggaagaagctttgaagaagtatgatatgggagatgacaaaactataaaagaaatcattgctgaagtagatacagatcatgatggaagaattaattaccaggagtttgttgccatgatgaggaacaacagccctgagattgttccaaatcggaggcgcatgttctaactgtcatggacaatcacattgaatactttcaagaacaatctgcccttagacataatctttgtcccattttctttttggaacagccgttaagaagactccttaatttgagatccatgtctctgctgcccggacctgtttgtcccaaaatagggtggtgttatagtgattcgtacttgatgctttgagcttcatggactcttgcgtggc

SEQ ID NO: 397 - DNA, 1159 bp, Zea mays
  Clone ID: 700073934_FLI
ggtggtccagatctgcatctgcacaacagtttccacaacttttcaagccaagagtcctccaaccttcttaacctcccaagaagtggccaattaatggcatcagagggatggccttcaaagaggttggctgtggaatctcttgctggtcatgagatccaacctctgcagcacaagcttgagaaagttagtcaccagagtactgtgtctcactgttctggcaccttgccgccactatcagcaagagacggttctagtgcccaggcttgtggtacaaatgttcagagtcacctgcttccatcatcatttgcaatccatgatggattgtcaaccatcaggagtggtggtgttggcagtggaactgatgcgataaccatagcttcgttgagatatagtgatgcgaatttgctacctgaaaactccatagcaacttccagttgtttgggtgaatcaggaaccttcaattctcttgacgatgtttgtggtgtaaacccatcacaaggtggaacctttgtgaaggtttacaaatcagggtccctcgggagatcgctcgacatcaccagattcggcagctactacgagttgcgtgtcgagctcgagcggttatttggtctcgaaggccaactggaggaccctgcaagatcaggctggcagcttgtattcgtcgaccgggaaaacgatgttcttctcctcggcgacgacccgtggcaggagtttgtgaatagcgtagggtgcataaagatcctctcgccgcaagacctgcagcagatggcccgcggcggcggaggtgaccttctgtctgcgcctggagcgaggatgctgcagggcagtgtctgtgacgactattctgcaggccacgacgtgcagaacctcaccggcagcattgcgcctgtggtgcctctggactactgaagaggactgaggcgaaggccgggatctgaagctctgaaccaaaaccggcaatccagcatttgcaggatttgccatccgcaagtcgtttcgttcctgtgttatgatcctctcagtctcaggccctgttgatcgggaataacctagtcgtttaatatagctagatgatgatccatgtatcattatggtaatggacatgctgtacgatagctactgtagctctaaatgcaggcaaggcaagaattgatctatc

SEQ ID NO: 398 - DNA, 624 bp, Zea mays
  Clone ID: 700073967_FLI
cccaaatcgacgaattcttcccccctctccgatctcgacgcgcaccgatgcgggcgatgtcgtcggcggttaatggtatgctgcgggcacggctgcgcggggcagcgcgcgttcgcggcggcggcggcgagggggccgggcggtggacgaccccaggtcacgaggagcgccccaaggggtacctcttcaaccggccgccgccgcctccgggggaatctcgcaagtgggaggattgggagctgccctgctacgtgacctccttcctcaccgtcgtcatcctcggcgtcggcctcaacgcgaagcccgaccttacaatcgagacgtgggcgcaccagaaggcgctcgagcgcctccagcagcaggagctcgccgctgccgacacccaggccgagtgatccgcgcgtctcaggtcctctcgaactctcggctgcctctgatttggttccaataagatggccacaatgtgcggtcctgaatgttctggacttctggtattgatggaacacgagctgaacactatgctgctgttttttctgttctgttttgaaatttgcccggtgatgatggcgaatgtcctgaatattctgaatattttgaaatgtttgactgttgtattatcatctt

SEQ ID NO: 399 - DNA, 2137 bp, Zea mays
  Clone ID: 700074022_FLI
cgttcccgcatcaccttcctccaccaccgcctcccacattcttcgcatccccttacttttttgtccttctatcgtcgtcgatccgggctcctgttttgcccgcacccgcacgcaggctggttgccaagaaagacagggcgagtgcgcggcgcccagctccgaccgtgcttcatagctcatctggccggggacggggatattcgcgttgctcgcttgcccggcgggtagctgtagcctgtaggcgagaatcgggaacgggggtgtttacaggccatgaagtataacacgaggaaagacgcgagcggtggcggtggcggcgcgccgtttgccatcccatgcgtcgacatcaagtcgttcgtggcctcgctcgccttcctcacgctgttcgtcgtgttctggcagctccagccctacggctccgtgctcaccgcggctcgcacctccgcctcgcccccttgcaccctcctccccacaaccgctgccatcgacctcgcctctcctgataccaccagcagcactgccgcaaagacggaccaaccggcggcggcggcggctgtttcagctactgccgccggcgcaaatgctgccccggtgtggttggcaaaggcagcgaggccggcgcggccggaagatccgaacaagcgcgtgttccggccgtacggtagcgcggcggcgctgttcgtgcagatgggcgcgtaccggggcgggccgcggacgttcgccatcgtggggctggcgtccaagcccacccacgtgttcggcaccccctacttcaagtgcgagtggctgcccaaccccaccgccggcgacccctcgccgcgccccgtccggaccaaggcgtacaagatgctcccggactggggctacggccgcgtctacaccgtggtcgtcgtcaactgcacgttcccctccaaccccaacgccaggaacgccggcggcaagctgctcgtccacgcctactactccaccgcctcccgccggcacgagcgcttcgtcgcgctggaggaggcgccgggctcctacgacgagtcccgcttcagcccgccgttccagtacgactacctctactgcggctcgtcgctatacggcaacctcagcgccagccgagtgcgcgagtgggtggcataccacgcgcgcttcttggggcccaggtcgcacttcgtactccatgacgccggcggcatcagcccggaggtgaaggcggtgctggatccgtgggtcagggccggccgggtcaccgtgcaggacatccgggcgcaggcggagtacgacggatactactacaaccagttcttggtggtgaacgactgcttgcaccggtaccggcacgccgccaattggaccttcttcttcgacgtcgacgagtacctttacctgcccaacgggcagaagctcgccgaagtgatcggccagctctcgggttactctcagttcaccattgagcagaatcccatgtccagcaagctctgcctgcaggatccgagcaggaattactcaagagaatggggatttgagaaactcgtcttccggaactcgatcaccaaagttcgccgggatcgcaagtacgtcatccagggccggaacgtgtactcagccggtgtgcacatgtcgcagaacctctacgggaggacgacccacaagacggagggcctgatcagatactaccactaccacgactccatcaacgtcatgggagagccttgccgtgagttcgtgccaatgccagcgaacggcagcaagacgatgttcgaaggggttccctatgtatacgacgataacatgaagcgattggctggcgagatcaaacggtttgagaaggtaacccttggatcagctcggacatagtagcagcttggcaactgaaggctggtggtacagatagatttgatattctttgagtgcctggctcatgtcatgtgtaccatggagctcactcttctacagttctactgatactgattggtcggcactgcatctggctggcgatggacctcttacggtggtccaaatggaaatggtgtaaagttttggtctttattggcatgatctctctacagggtcactgctagctgttggtgcaatctgtcctcttttacctttttctcctgtatcctctatccatgtctgtttatcgatc

SEQ ID NO: 400 - DNA, 699 bp, Zea mays
  Clone ID: 700074065_FLI
ctttatttcccttgcccttttccagagcacctccgccgtcggccatgggtcaagcctggggtaatctccaagataggctccaagggcggcggtggaaggagcaccaggtgaggaagatcaccgacaaggtgttcgaccgcctcacggaggacgcccagaagcgcgacaaggaggccctcagattcgaggaggtctacatcgccgtcctctgcgtctacaatgacatcaacaagtacttgccggggccgcaccacgaccccccgtccaaggagaagctcagggccatgatggaggagtacgacgtgaacctggacgggctcctggaccgcgaggagttcgcggagttcatccggaagctgaccgcagactcgctgtgctcgatcagcgtgaagctgctgatcacgctggtggcggcgccggcgctggcgatggcgaccaagcgggcgacggagggcgtccccggcgtgggcaaggtggtacgcaaggtgcccaacgcgctctacgcctccgccatcaccctgggcgttgtgctggtgcagagatccaccgagggcgtcgagtgactcgcgctgctgaaactgcaatgtcgtcggctgtgtagatggagcagcgtatctaggatagctgttggttcttttcggcttgtgcggtgaattgatctgtgtatcaattcgatgtgatttatcctggatttgggac

SEQ ID NO: 401 - DNA, 667 bp, Zea mays
  Clone ID: 700074104_FLI
tccaacgcaacagcaatgggtatcatatatcggttaactcagcatcatgttcagttgcctgaaaatcttggcagttatcagttgcttgagtggaatgtgcagcctttgccgagaaggtcatggtttcaagaacatgtagtctctatgctgcttgggattttactagtaattttggtcactttgtcagcctttttagtagtacttgtttggagaaagaaatttagtggtcaagcagcctacagacctgttgattcagtggtccccgagcaagaactccagccactataatccaaattaaagctgtttgacggaacaacatatagatgattctttggtagagatacccttgtgcgggggggttacgcatcacagcggcacgcatctgctgctggagtaagcccttctttgtatgtaacacaagctacaagtttacagaagaagcactgtatgattacatgacttctccattcaaaacttagaggtgttcataaactgtctagtgattcagatcaagagctcctctcttgtgcttacagtagaagaaggttttgttcatgtaatgtagattaagtagggggtagagaagaaactaggcacagccgcggaacgaaatggtgtaatatttattttagtgccgagggtatttgtcttcaaagcttttcagggc

SEQ ID NO: 402 - DNA, 684 bp, Zea mays
  Clone ID: 700074105_FLI
cacccgtcggcgtcgagcagcggcagcggcggcggcgatgacgacgagcctgaagaagaaccggaagaagcgcgggcacgtgtcggcggggcacggccgcatcggcaagcaccggaagcacccgggaggccgcggcaacgccggcggcatgcaccaccaccgcatcctcttcgacaagtaccacccgggctacttcggcaaggtgggcatgcgctacttccacaggctccgcaacaagttccactgcccgtcggtcaacgtggagcggctctggtcgatggtgcccgccggcaaggccgcggaggcggccggcgcggaccaggccccgctcgtcgacgtgacgcagttcggctacttcaaggtgctcggcaaggggatgctgccgtccaggcccatcgtcgtcaaggccaagctcatctccaaggtcgccgagaagaagatcaaggctgccggaggcgccgtcctgctgaccgcttaggtccttttgcatcttgtttcaactatctgcgctaagaaatattctatctttttttgggtggatttatgagaccctggttttgagcacttggtaacgaatatgagttcgattatatcgatgctgcacacctcttgctgcatgtattattcattctatgcagttgcagttcatgtgggctgtgctactgagatatgaaatgttttggc

SEQ ID NO: 403 - DNA, 685 bp, Zea mays
  Clone ID: 700074133_FLI
cgtcgccctcaaattcgttccgtccaggcaaggaagaaatcgagcagccaaggagaggagaagatggctcgtacgaagcagaccgcccgcaagtccaccggaggcaaggccccgcgcaagcagctcgccaccaaggcggcgaggaagtctgcgccgacgaccggcggcgtgaagaagccccacaggtacaggcccgggacggtggctctgcgcgagatccgcaagtaccagaagagcacggagctgctgatccggaagttgcccttccagcgcctggtccgtgagatcgctcaggacttcaagacggatctgcggttccagagccacgccgtcctggccctccaggaagccgccgaggcctacctcgtcggcctgttcgaggacaccaacctctgcgccatccacgccaagcgcgtcaccatcatgcccaaagacatccagctcgcccgccgcatccgcggcgagcgcgcgtaggcgtatctcgcgcccggccccagtggcggcggagggatggaggagggcaatttgtaaccttatgctgtttgttcgcttttagacggcgtggtgaagaactagtgtaaaaacggctttaaagtctattttgtgcggtagttcgtgtaggccgcttcgtcccgaagcgatcttggtaaaagacttattcgtgttgccaaacgacacaattcgt

SEQ ID NO: 404 - DNA, 915 bp, Zea mays
  Clone ID: 700074151_FLI
agcagctgtcagcccttggagaacttatgtaccagtgccacaacagctacagcgcatgtgacctcggttctgatgggactgacagactagtcaacctggtacgagaagtgcaacacaggaggacatccgaaggcggaagccctagtctgtttggcgcaaagatcaccggcggaggctccggcggcacagtatgtgttgttgggaagaactgcgccaggagcagtgaagagattgcagagattcagcacagatacaaggctgagaccgggtatctgcccattcttttcgacgggtcgtctccaggagctggaaagtttggttacctgaagatccgacgtcgttgtccctagtggctgattgggaaacgaagaacttcagttcgagctttgtcacatatcactcaattgttaagaacctcactccaactctccaagccattgtagaacatagaggcgtattgccacttgcgatgattcgtcgttcacacacaaaatattatcatgtgctacaccaattctggaagctactagaggaaaatgtgaggaatataaagaaactcttgttgagcagatgtagtctagtggtctccgtgtgcttgctgcagtgtaaccaaactccaggtagatgtgctctgggctctggcatgtgatatgtgatgaagtcgaggatggtttcttgccgtttgatgaccagtgtagtcgttggttaacttgtcagtcgtaaactgatgttgtcagttaggagcggataaagtttgtgtgtgttgtcagtgtatctgtgtgtaagtttattggacagagcgaaagatacaccacgaacctagatgaagtaggtaatagtcgtatgtgaagtttttatcattagggttgcaaatgcattaaatcacttataaatatatgatgattataaacttcc

SEQ ID NO: 405 - DNA, 844 bp, Zea mays
  Clone ID: 700074175_FLI
tggatctagttgcgcggagatggggctcacgttcacgaagctgttcaggcggctattcgccaagaaggagatgaggattctcatggtcggtctcgatgcagctggtaagaccaccatcctctacaagctcaagctcggcgagatcgtcaccaccatccccaccattggatttaacgttgaaactgtcgagtacaagaacattagtttcactgtttgggatgtcggtggtcaggacaagatccggcccctgtggaggcactacttccagaacacccagggcctcatttttgttgtagacagcaacgacagagagcgtgttgttgaggccagagatgagctccaccggatgctgaatgaggacgagctccgtgatgctgtgcttttggtgtttgcaaacaagcaagatctgcctaatgccatgaacgctgctgaaatcaccgataagcttggcctgcactccctgcgccagcggcactggtacatccagagcacatgtgctacctctggtgagggtttgtacgaggggcttgactggctttcgaacaacatcgccaacaaggctcgaagcatctaggcaaggcttcaatcagtggaagcaaactgcctctaccattacagctatgaagtatatagtcgtgattgtgtcagacgtggtgtgtttttgggagataaaaggctcttttggtcgaggagctaggtatcagatgttttttatggtacctgtaattttccgtgcttctgttttggttttgtgcaaggtataccatgtctgactgtgtgctcgccactgtctgagtcgttgtactatcccgggccggcctgtccggctgtctcttggcatagc

SEQ ID NO: 406 - DNA, 1370 bp, Zea mays
  Clone ID: 700074190_FLI
gggcttatgggttcaggaattgcaactgcgatggtattaagtaactatcctgtgctacttaaagaagtaaatgagaagttcctaactgctggaatcaacagaatccaagccaatttgcagagtcgagtaaggaaaggaaaaatgaccgatgagcgatatgagaaggctatgtctctcgttactggtgtccttgattatgaacgtttcaaagatgtagacctcgttatagaggcagttattgagaatgtgaagttgaagcagcaaatattttctgacttagagaagtactgtccttcacattgcatccttgctactaacacatctacaattgatcttaatctgattggggagaaaacaaaggctcaagatcgtattgctggtgcacacttctttagtcctgcgcatgtgatgccacttctggaaatagttcgtactcagcacacttcaccacaagttgttgttgacttgctggatgttgggaagaagattaaaaagacaccaatagtcgtcgggaactgtactggctttgcagttaataggatgttctttccatacactcaatcagcactcttttatgttgatcttggtatggatgtttataagattgatcgtgcttgtaccaaatttggaatgcctatgggtcctttcagactggcagatctggttggttttggtgtggctgtggccactggtatgcaataccttgaaaatttcccagagagggtctacaaatcaatgctacttcctctgatgatggaggacaatagggcaggtgaagccacccaaaaaggattttacaagtatgagggcaagaggaaagcgactcctgatcctgaaattatgaaatatattgaaaaatctaggagcatggcaggagttacaccagatcctgagctgatgaagctaagtgagaaagacatagtcgagatggtgtttttcccggtgataaatgaagcctgccgagtccttgatgagggtatcgccgtcaaggcttctgacctagacatcgcttcgatcttcggcatggggttcccaccttataggggaggtgtcatgcactgggcagattccatcggcgcaaagtacatccatggaaagttggaggagtggacaaagcggtatgggggcttcttcaagccctgctcttacctcgctgaaagagctgcaaaagggattcctctgagtgcaccaacaaagaaagttcaggctcggctataagatgatttccttgtggacggaggagactacgttgaataatggattccggtgaagcatttggaatgcgtagagctgtaggctaccactatcacatgcatgtaacgcaatatactactgtgaaaataaagtgcactgcacggcggtttttttat

SEQ ID NO: 407 - DNA, 680 bp, Zea mays
  Clone ID: 700074211_FLI
tgaccttcctgtccctgtccaagggtatcaccatcggcggcagcttcttcctctactcgggcatcgccgcggtcgggtgggttttcttcttcacgtgccttccggagacccgcggtcgtacgctggaggagatgggcaagctgttcggcatgccagagccagacacggacatggctgaagcatacaacgccgctgccaaggagaaggcggtggaaatgccggcagtgctcggcaatgattgatgcagcgtcttaccagagcagcgtggcaagattggcctctgtcccttgactctgaggtgtcgcggtattgcaggacagtgaccgcgtggtccaaccagagactcttctgcaggacagctgtgcattatcgctgtcggcgtggcgtgtgcttcgcaagttgtgaagctatttggcttgttctacatgccagatagtgaacccaaaatgcaaagcagtatccagtagcaactggcaagggacacgtggttccgtactattttaaacaaataggcaaatatatcacactcttgattcattttgagatccccaaatttacatcgaaagaaaatcgacacgttttgtaccgtgatctcgtgggaggttctatgtctcaattcataagattatactagctggatgcccgtgcgttgcaacggaaatatataataccagtatact

SEQ ID NO: 408 - DNA, 1395 bp, Zea mays
  Clone ID: 700074243_FLI
gtttccggaacagatccgagtatccgacacccggtcgtcgttcgccttcccgtctttccctctccccccacacccggtcgtcgtcgtcgcggcgtgagcgtctgagcgagcgtgcaagagcgagaggggggaacacaaaaccctagcaccgtcgccgacggacgccagagtagagagatggcggtggacgaggtgaattcggtctacgtcggcagcctcccctacgaggccaacgaggagatgcttcgcgacgccttcgggtactacggcaccatcgtctccgtcaaggtgattaatgatcatactatcaaaggcaagtgttatggttttgttactttcactcaccccagagctgctgagcaagcaattgcaggcatggacggcaagaaattaggcaatcgtattattcgagtaaatgaagtgcgtacaagaggtccccgagattttggtcgagatggttttagacgagatccaagaaggtatggtagagatccatactgggacagaagggatagggaacagagctatgatcgtgaaagagatccctaccatgacagggatagtgatagatcccacgagcatgatagagaaagagattatgagcatggtggctttaatagagaaattgactatcccatggatcgagatcatgaagtagacggcatacatcctagagaacatgatcgtgcagcagaaacacataatatggattcagataatgacaaatataaggaacatggatcaagaaaaagccacccaaaaggtcgtgatagcaaagatttatcgagttccagtgatcttcaaaatgatgggaaacaccagttggataaaactattcagatgcgtgaggaccttgaaaatgaggttagccagattaaggataaaatctctgcgaaaggacaacacattgcagatttgcagaagaaagctcagaaattagaggatgaactggctgctgcacggaaagtctcttcagaacgacaattagctgttacagacctgtacaaacattttcttcaactccaagactacaacgatagggtcaaaacagctgaacataggctgcagtctcttgttgacgctgccatggccgagcttgacatggccgaagatgctactaccagagatggctcgatgtatgagaacggcgtggtttgaacaccgaaagggggctgccagctgtcatgtctagggatgaaaacggtcgaaaacgatcgaaaaaacagttaaattgtttttgttttcatattttttggtcgaaacgaaaacgaatacgaaaaccaacggtcgaaatacgggatcggaattgtcggttattcgaaaacgataaactatagtcggaaagataactattttgtagttttatcaaaaacataataaagtgatgtattacct

SEQ ID NO: 409 - DNA, 1703 bp, Zea mays
  Clone ID: 700074264_FLI
caacagcggaaatctgtcgaggaaactggttccagtttctattcacccctgacatatttaaaagatgcccagggttttgcggagaagcttttctctcggttgcagaaatgcaatgagcgatttgaggtaaggatgatgatgctaaaagtaatcgcgaggaccattgggctgcatcacttggttttgttgaacttctacccgtatcttcaaagatacgttcaacctcatcaacgagatgtgacgactctactcgctgcagcagttcaggcttgccatgatatggtacctccagatgctgttgaaccactgttcaagcagatagtaaatcagtttgtgcatgaccgttctcgtccagaggctattgctgttggcttaaatgttgtgagagagatctgcatgagaatacctttgatgatgaatgaggatctgctccaagacctcgttttatacaaaaagtcccatgagaaagctgtttccattgctgctcgttcgctgatcacattgttcagagagatctgtccttcattgttagtcaagaaagatcgtggccgtcctgtggatccaaaggctcggcccaaagcatttggagaagtcactgttgctagcaacgttcctggtgccgagttgctagatgaaaatatttcttcagaaggggaaagttcggacgatgagtctgatggttttgactccgatgatgagatggacttgacacctgcccctcctggaacagaagaaaatatggagggttcatctgttgcaaacaaacatgatgccgatggagataccaaagaggaagatgacgcatctgatgatgaagatggtacggatcaagatgactccaacagtgatagtgatgaactagacgatgactctgatgtggatgtgggtactgatatatctgatgaagacgaaggtgacgacggtgaactgaaagaaagcataaatggttcagaggatgaagctttagaccagaatgaagacagcgaagaggaagacaagtcaaaaggcagtggctctaaagcgcagaagaggaagttaaatgattatattggacagctaagttctgctgatgcaagccttcgggttctgaagaggttagcaactgccaagaaggctgaagttccatctgatgaaactggtaaaattctatccgatgaagatttcaaacgcatcaaagaactcaaggcaaagaaagaggcgaagctggctttggctcagcatggactaatcaagggtgtcgacacaaggtctgtaacctttaagatgccatcatctgaccagctcagcaggaagcgtgtcgatccacttgagcttgaggctcacgtcaggagaaagatgtccaaggaagaaaggttggcgttggtgaaagctggaagagaggatagaggtccttacatggcaagggcggccgtgaaacagaaaaagaccggtggactgagcaataagcagaagcagcacaagaagaggatgcccctggcagcgactagagccaaggcagcacgttcccggcaggagaagaagcagcagcgcaagcgctccgggaatcagttcaggggccgcaaggcgtggaagtgagagagcctgctgccgctttgcgattcatgtagccgagtggccaaattttttttgttgactctttgtatcttcttctgccagataatgtttccatataatacctcgattctatgagaaggcttttccat

SEQ ID NO: 410 - DNA, 853 bp, Zea mays
  Clone ID: 700074285_FLI
ggaacaacgggcccatcagctttcagctgcagtggttccagcagatcgccacctccgtctgcggacagagctgcaagagctacctgggcaactccctgttcgtgttcggcgagttcggcggcaacgactacaacgccatgatcttcggcggctactccatcgagcaggccaggaaatacgtccccaagatcgtcaacaccatctcgaggggcatcgataaactgatcggcatgggcgcgaccgacatcgtcgtccccggggtgcttcccatcgggtgcttccccatctatctgaccatctaccagagctccaacggcagcgactacgacagtctcggctgcctcaacagcttcaacgacctgtccacgtaccacaacgccctgctccagaagagggtggacgtcatccagagccggcacaggaagacggcgcgcatcatgtacgccgacttctactccgccgtctacgacatggtccgcaacccacagagctacgggttcagctcggtgttcgagacgtgctgcggatcaggcggcggcaagtacaactaccagaacagcgcgcggtgcggcatggcgggcgccgccgcgtgctctagcccggcgtcgcacctcagctgggacggcatccacctcaccgaggccgcgtacaagcacatcaccgacgcctggctcagggggccgtactgccgcccgcccatcctgcacaactaatcctcagtgcatatggacacgctggaccggaggccggcagcgcgttgtcttttttataaataatttatttattattcgtacaagctttggttggatccatcgcggcgggggttattaattatagcattggttggtccttt

SEQ ID NO: 411 - DNA, 1063 bp, Zea mays
  Clone ID: 700074401_FLI
agaggagactaaccgacctcggatccatcgacgcgtgaagatgtcttcgcccgccgagtactacaaatcacttccacctataagcaaggcatatgggacattgtgtttctttaccaccgtgctagttcagctccagattttgcacccattatttctttacttagattaccccttggtgttcaagaagtttgagatatggaggctattgacaagtttctttttcctggcaccattttccatgaaatttggtattcgccttctgatgatagcaaggtatggtgtcatgttggaaaagggtgcatttgataagcggactgcagatttcttatggatgatgatatttggtgccatctcactattggtgttgtctattattcccctattcaattcttttttcttaggaatacctatggtcagcatgctcctttatgtctggagccgagagaatccaaatgctcagataaatatatacggcctcgtccaattgaggtccttttatcttccatgggctatgctcttattggatgtgatatttgggtcatcattaatgcctggacttctgggtatcatggttggacatctctactacttctttgcagtgttgcaccctcttgccaccgggaagagctacctcaagactcctaaatgggtacataagattgttgctcgattcaggataggcatgcaagcgaactcacccgtccgtccaccagccaatggcaacagcgggtctggtgtgtttagaggaagaagctataggctcaatcaatagattcacccacctcgtaatgtgatccatggtcggagtggcaatgtagaagcaaagaccagaacgcatagtagggtcaatcaaaattaagggttacccgtcagagattttcttaaaaaacctggacggacggaatggagaacccttccatttgctcatttagttgctaacaatgttcatcgtccatgtttacacatgaatataattctgtaatgacaatttgtgtacacttatgctggacttattgtcgcctctttttagctaggataagaacaaaagatgatgagtttgctc

SEQ ID NO: 412 - DNA, 1640 bp, Zea mays
  Clone ID: 700074407_FLI
cacgggacttcatcttaagagaatttagaacaaaaaaagagagcatgtcagacctgcttcctgaagatgtacttgtcaacatcattggtcgtcttgcaccacggtaccttgccatatcccggtgcgtttgcaagacatggtgcaccaccattgatgcccataatctgctgcgtatggatctactcccacactcagtgtctggactctttattaacttcaatgagttaagcatgtcggaattcttatcccgcccctcaaaaggaccagcaatatctggtaaatttgactatttgcctagcgcgggccaagtcatagaccactgcaacgggctcatcttgttacacgaatgtgtagttaacccggccacacgacagtgggcgctgctgcccccacgcccaagcccaaatatgcctgagcacttttgtcacgggatgtaccttgtctttgaccccacattgtcatcacattatgaggtattcctgatccctcaggtctcatacaattccaacttagaccctgcaatagaggaattggaatggccaccttcgccttgcatcgtacaagtgttgtcatcaaggacaaagttgtgggaggagaggttgtttgttcgagaaggagaggctgcaggtaatgtcgctgacattcggttggattttcaagctgttcaggagaatgctgtctattggcggggagtactttatgtaaattaccaatccaaatttattatgaggatatcattgtcaaatgataaataccaagtaatcaagccacctgtagattttgaatggtttgaatttgaaaatgaatccaggctatccaaaaacctttatttgggaaaatcagagaaaggggtgtactgtgctttgcgttatccgtcaaccgtttccttttcgatttacattctcgatgaatctgacggcaaaacggagtggataatgaagcctcactattatctcgggagtcaaggaattgacgggcctggaccctggactctacaagatatcaactataactgggacacccagtatgaagacagtatggaggaaaagttcgagtgggactcagacagcgataatgttgtcgagaacagaagcaacggtggatatccttgccttcctcgtatagaacttcttgggtttcacccctacaaggatgttgtcttcttgagcgacacgctgagacgaggattggcctatcacctagacagctcaaagatccaagaccttggtaacctccatccaacatattatggaactgaacaggggattcagccatttctactgacggctttcccatacacaccctggaggggatggtttccagaagacacataatggtacagagtaccgaacgtaagacataaagaaggcattagctgatccggaatccgaagttctgaccgggcatggcgaaggtccctcctgcacggtttcctgatgctgctgttcaacatggcgatgatgccgctctggatcgacagacttcagcttgagagtagtttagccagctgcttagcgccgtggacgtggggatggacacgtcgcgttgcgcgcttagtggctggttttgtgcgttgtttggctaagttttttttgttagaataaaagggagaagagaaaacactccagttgcgcagcacc

SEQ ID NO: 413 - DNA, 980 bp, Zea mays
  Clone ID: 700074446_FLI
gccgaggaggagaggggagcagcgagatcgtgcgcgcctccgagatctccacgaagttgtggtaacatggggctcaccttcacgaagctcttcagccggctcttctccaagaaagagatgaggatccttatggttggtctcgatgcagctggtaagaccaccatcctctacaagctcaagctcggagaaatcgtgaccaccatccctacaatcgggtttaatgtggagactgttgaatacaagaacattagcttcactgtctgggatgttggaggtcaggacaagatcaggccattgtggaggcactatttccagaacacccaaggccttatctttgttgttgatagcaatgacagagatcgtgttgttgaagcaaaggatgagctccacaggatgctgaacgaggatgaattgagggatgctgtcttgctcgttttcgcaaacaagcaagatctaccaaatgcaatgaacgctgctgagatcaccgataagcttggtctccattccctgcgccaacgccactggtatatccagagcacttgtgctaccacaggagaaggtttgtacgagggtcttgattggctctccaacaacattgcaaacaaggcctgaatggacaattctgctgtttcacggagcacatctgcacatggcgaggcatggtcattttgaccctcagacgatcattgtttcattggaaagtatcgtatttctatgctaggcttttcagagagattactctctaagaaactgatccgatattaagacactataattggcattggcactagtagatcgtttactgagtaatgcagtttattttaatgtatcccaattgtgttgtaagatacaactatgcgtcggaattacccattcaatttgaatctagatacgtagtttttgttatatacttatacttggatatatattgtttaatacatggtaaaagtaacatatcaagaaaaatattttataatttg

SEQ ID NO: 414 - DNA, 612 bp, Zea mays
  Clone ID: 700074508_FLI
cacagtggagctagctagctagtagagaggtcaatcaccaatggcgaggcagctcgttgtgcttgctctgcttttcgtgatcgccggtgtggcgcatggcgcgggggagtgcgggagagcctccgccgacagggtggcgctaaggatggcgccatgcatctcggctgccgacgacccgcagtccacgccgaccagcagctgctgctccgctgtgcacaccatcgggcagagccccagctgcctgtgcgccgtcatgctgtccggcaccgccagggctgccgggatcaagccggaggtcgccattaccatccccaagcgctgcaacatggccgaccgccccgtcggctacaagtgcggagattacacgctgccctagctgatgaagacgtcgtcaacgagaccgtgcgagtgaaccagtgcatgaacgaatgccattatgccatgcaactatgttgcgttgcgttgttggaataataatcgaatccgctagaataaatatgtacgtgcacgacggcctcttgcttgtatcactggactttgcttgtgtgttatacgtcaaatatgttccgtttctctcatataagaaaattatgcaatgcttgttattaacct

SEQ ID NO: 415 - DNA, 1364 bp, Zea mays
  Clone ID: 700074528_FLI
ccacaaaggagagccaggcagccagccaaatcttccacctcctccatttccagccccgtccccacaccagctcgcgtaacctcctgcccatggctggaggcggcggcgcaggcgcgggctcgtcgtccggcggcggcggagggggcggcagggagggcgactgggactgcggcagctgcggcaaccgcaactacgccttccgctcgctctgcaaccgctgcaagcagccgcgcctcctcgtcgaccccaacaccccgcgcgactccaagtggctaccccgcgccggggactggatctgcaccggttgcagtaacaataattatgcatccagaaagaactgcaaaaagtgtggcttgcccaaggaggaagcagcaatgccagcattgcaaatggcagggatgactatgccaacttatgcaacttatattgcaagactacaaagccttgctgcttctgcttctgcctataagatgaactttgggatggctgccaattcacctttgcagcagcaactacttgcaaatgcaaactggccctatgggatggctggtagatatgggatgcaatcttctggttggccatttggcaacggcaacccaaatcagtttttaggtgttccaaaggattggcgtaatggagattggctctgcagctgtggatttcataactattcatctcgtactcagtgcaaagagtgtggtgcacctgtaccatcgggcattccctccacaacaatgaaagctacatctgatgcctcttccacattaggaactaagcggttggcttcagaggacctggccaatgactgggataataaaaggctaaatccaggaaatgacaattatccactttcagagctgcaaataatttatttttgggtattgagcaaggagctggaagcagcaatggccagtctgcctttcccaagtttgacaacgggagctcaatggcattaccatctgggcagggaatgtctggtcttatgggaaaaggggcaaaatggcgtgacggggactggttgtgcaacaactgcaacaatcacaactatgcatctcgtgcgttttgcaacaggtgcaaaactcagaaagaatctgcagttcaccctggtgtgttatagcttgctgttggattattttgttccaggatatgttgctgcctgttctagctccttcctcaagactgcggtttgagttttttcgattctgcagtgtttttgctgctctcaaatgtttgtctcgatatttcattagtgcttgttgaagttcccccatttgtttatggtataagcgcttgaataaaatgtttctggaaagtaccggcctacaatctggattttggcaaaataattgaattagttgttgtac

SEQ ID NO: 416 - DNA, 1095 bp, Zea mays
  Clone ID: 700074546_FLI
ttcgatggcggcggccgtgggggcggcggcggcggccgtgggtttggcggtggtagaggcgggagaggggacaggggagggagaggtggcaggactcccagaggcggccgtggcggcggtggcaggggtggccgcggcggtggcatgaagggcgggagcaaggccgtcgtggtggcgcacaagcacgccggtgtcttcatctccaagtccaaggaggatgcgctctgcaccaagaacatggtcccgggagagtccgtgtacggagagaagcgtgtctccgttcagaatgaggatggaacaaaagtcgaatacagggtgtggaaccccttccgttccaagctggctgctgctgtgcttggtggtgttgacaacatctggattgctcctggtacccgtgtgctgtatcttggtgctgcttctggcacaactgtatctcatgtgtctgatattgtagggccggatggtctggtctacgctgttgagttctctcacaggagtggaagagaccttgtcaacatggcaaagaagaggaccaatgtgatccccattattgaggatgccaggcatccggcaaggtaccggatgttggttggcatggttgatgttatcttctctgatgttgcacagccagaccaggctaggatcttagcacttaatgcttcatacttcttgaagaacggtggccactttgtcatttcaatcaaggctaactgcatcgactccaccctgcctgctgaggccgtgtttgcagcggaagtggagaagctcaaggcggatcagttcaagcccgcggagcaggtgacgttggagccctacgagcgtgaccatgcatgtgttgtgggtgggtacagggtgcccaagaagcagaaggccacctcttaggatcggaatccgtgctcgtcttgcctaccaaagatgcttcgttgtattgtggtttattaagaaactttgaaggattagtcaaagtatgtgaaccttctgcagtgaaggctggtttagcagcgacagctgttagggtctgatgcagtgtttgctggtttaacagcattattattattattgttgatgaaacatgggtttggtttcgttgatctc

SEQ ID NO: 417 - DNA, 241 bp, Zea mays
  Clone ID: 700074572_FLI
ccaagtagatgtgccatcacttcggcactggagtgaaaaagaaagtatgattgggtcctgcctaggccccatagatatagctcttttttgagaaggaagagagattaattcagcagcagcttttataaattctttgttgtcatgaagcaggtggttcttttgtagttgatgaaagggatttgtcgtcgctatcgtttacataattcagacaataattttatattgtgtaattctgagaatc

SEQ ID NO: 418 - DNA, 1384 bp, Zea mays
  Clone ID: 700074583_FLI
caaggtacagattgtagttctggtactgtgccatctcaaggaaacgaaggctcaagcttattggaacctggtaatggtgatggaatctgcactggggttacatgtgggtccccttcagtgattagttgtgctgaatcctgtccccaagaaggtggacatggcagcactgctttacttcatcacacactatgtgggcaatctgaggatcctgaagatcatggggcctcagttgatggtatccagagcccaaaacaatgcaataccagaaatatagaatctgcacctggttctcaggagactagtgcagcaggaggtgatagaagcttctcatttgaggtgggagctccaccaaatgttgctgagaaagcccatagccctgtttggagccctttccctaaatacattacttctcagagtagcaagatggccacagaaaatactcaagctggaggttctttgaaggatactagtgatgatagtaagaaaatatctactgtggagtctggtaaagaacagctatcagaaaggaaagtaactgaaagttctgggggtggcctctcagacaactgcaatatagacgacatcattaagggtagaagttcaccgccgcggcagcatccaatccctgagtgttctgatttagtgaattttccattcacagatccacagcatttgcagctacgtgcacagatatttgtttatggagctcttattcaaggaacaccaccaggagaggcttacatggtggcggcttttggagaacctgtaggtggtggcaaacctacatgggaggctgcttggcgagctgcttttgaaagatttcagtataaaaaatcacctcatatcagtttagagactcccacaagttcacttataggtagttctgtgcctgagaaagctagcaaaggtacagcaattacaactgtgccagctagcaaaaaagttggtaaaactgtggcgccagcacatcctgctgtaaccctacactctccaacttctgattttccttttggtagttctacatttaatctgcaacgaggcactcatctggattttagccaggcagtatcaccatttgcgtataattcacacatgagacatccgtctcctggtgttgccccctggtatacgcagagccctggtccacgccctgcagcctggttaattccaccacaaaacttaatatttgattcatcaatgcaaccggttattcctacaaatgaaactgcgaagggtgcatcatccaaaaacatatccgtttcacatactgtttcatctggtgttcttcccagcctggcaccttctattgtttcttctccaatagcagttgtgagtgatggaaaacagaaggctgcttctagctctaagcgtggcacaacatcac

SEQ ID NO: 419 - DNA, 1407 bp, Zea mays
  Clone ID: 700074601_FLI
tgatcattggtgcagttgttggcggagttgctgcagttttaattgtcctttctattgtggcatacttcctatttcagaaataccgccgagagaggactctcaggatacccaagactgctgggggcacactgatcgcctttagatacagtgatctgcagcatgtcactaataacttctcggagaggctgggtggaggtgcctttggctcggtgttcaaagggaagctcccagattcaacagccattgctgtgaagaggctcgatggagttcaccaaggggagaagcaatttcgtgctgaggtgagcaccattggcaccgtacagcatgttaatttggtccgcctccttggattttgctcagaaggatcacggaggctgcttgtgtatgagttcatgccaaagggctccctggacctgcagctattccttggtgagacaacagcactgagctgggctacaaggtaccaaatagcacttggaacagcaaggggcttaaattacctgcatgaaaaatgtagggattgcattatacactgtgatgtcaagccagaaaacatactcttggatgagtcatttgtgcctaaggtggctgattttggtctagcaaagctcttaggcagagacttcagccgtgtattgacaacaatgagaggaacaaggggttaccttgcgcctgaatggatcagtggtgtggcaattacagcaaaggcagatgtctttagctatggcatgatgctcttcgaactcatatcaggcaggagaaattctgaccacggagaacagcatggatccacctttttcccaacctttgctgccagcaagcttcatgaaggagatgtgcggaccttgttggaccccaagctgaatggagatgcaaatgctgacgaactcacaagagcttgtaaggttgcctgttggtgcatccaagatgacgaaagtgctagacctacaactggtcagattgttcaaatcctcgagggattccttgacgttaacatgcctcctgttccaaggtcattgagagttcttggtgaaagccctgatgttataaacttcttttcagatatatcttcaaaccagacttcccagacacagaacagcacaacttcccagacacgcagtactacttcaggcagttcacatctccaaagtccatagatcagataccctgcaatttattagggcgccaatacttgaagagcatgagtaaatctgtacataattagaacctaatatactcagtttttgtatcactatgcttcagtactgtaaatttagtgcagaatgtcataaccaaaacaaggaaggtactagtgttgcatttacattacacatgcaagattccccattttctcttactaaatgtaaaaaatcaagatgactatctcatcgaagttgattgattgag

SEQ ID NO: 420 - DNA, 768 bp, Zea mays
  Clone ID: 700074620_FLI
ggaccttccctcagccacaggccgacagcccacgccgtcgaacggccggggatccggtacctccgctccgcccccgactccctctcgccggacggctgcagatccggtcaggccgatccgtctcggacccggtggtagcagtggaggaatccgctgccggtcgatcgatcgggagagatgcggcagcagcggggcggggtcggggccgggaggagggaggacgacccggggctcctcacgagagccgtcgacagggcgttccgcttcgtccgcctcgccgagttcgagatcttcttcgtcctcttcttcctcatcgccttctttctcttcaaggacctcatgtcacagcctcaatacaatcagctatttgtcaagaagcctgatctagataacccctggccttagggagtacagaactacatatgtgtataagttgtagcctactagcctggtcttttctttgagttgtgttgcaagtactctttgaagccctgttatcaggagcatgttttatgattagttagaggattctcttcggtgacgatgaatatatttagctagtcattttaatattggtatgtgtgatactgaggttaatgccggcagttatcgtccacgcggtttatgtgttgtgaagtccaatgagctcggcgagatgatcatatgatataagtgcagttctaagtggcatccagtgtttgtaatagttgacagataatgcttgctggaagacaaggtcactgcggtatgacttcagaggttattgct

SEQ ID NO: 421 - DNA, 1449 bp, Zea mays
  Clone ID: 700074661_FLI
cgttggtctccgatccaagagctttgttaacaccagagattaaaagatagcgccgtagcgcaatgaaggcaccatcgctactggttcggtgtttccctggcttgcttcccagcaaggacactagttgtgtgccaattgtgtccgagaaggatctgcagctaccatcactagccgttgaaataattccctcaaagagtgctcacccgtacaaatatgctggagagaaggttgatgtgcaaggttttgatattttcaagggtaaagttagtgtagcagatatgatatccttctcaccttctgaagtagcatcatcaaaatatgatggagctctgaaaagctgggagaattctattactcttgtcaacattattcgaaatgagatccgtgatggccagttgagcttcaggggcaagcgggttctagagcttggatgtggatctggcgtctccgggattttttcatgcttgaagggtgcatccaccgttcactttcaggacatgaacgcagaaaccatacggtgcagaacaatacccaatgttcttgcaaacctcgagcaggctcgggacaggcagaacagaccatcagaagagagccccgtgacgccatcccggcagctcttggatccaaacgtgcatttctatgccggagagtgggatgaactcccgacagttctctcggctgtgccgccacccgcggcgccagcagacctcagcttctccgaagacgatttcatggatggcggcagcagtagtcatgatggaagcagtgtagtcgtcggccaggactactgccccagaagatctaggaagctctccggtagccgccgcgcgtgggagagggctaataacgagaccgaccaggcagatggcggctacgatgtgattttggtctccgatgtcccctacgcagctaactctctgaagaagctccatgcgcttatttcaaagtgcctacgccctccgtacggagtcatgtactacgtggcatcgaagaagagctcggttgggtccaacggtggcgccaggcagctccgagctctgatggaagagggaggcgtccttggcggccacttgttgaccgaggtgtgtgacagggagatatggaagttcttcttcaagtgagcagatccagggactgggagtgggaacggcaggggaaatggatccttcctgacgttgaaatgaaacccagtttttttttttggtttctatctgcagcgatgtacatacataccgcgaggcgtatagtacgtagttccattaattctttggcagcagcagcagcaacgttgaagcttcaagaatcaaatacctgtagctgagcttgcacgaatccttcgccgcctttgtagagatctgtctgctatgtgctgtgctagtgtcgttctgttaaagtacagagagcaaattgtagtgacctttttgtgtatatcgaatacacggtgatggc

SEQ ID NO: 422 - DNA, 651 bp, Zea mays
  Clone ID: 700074691_FLI
gtgcttggttcttgggctttgctaggagattagaacagttttcaagtgagcctaggatccatgtgaacgatttgaatatctcgcctcttgtcttgcaagtgttctcatctgctgttaatacaaaatcagcaagagctagtattttgttcttccttgtccttgccatagcatgtggtttcgtgctgctgcccattcgttcgatgatggtttttatatgatggggttgtggaaagcgcttgcggatgtagcccttcatgtttgggaaattcgtacgcttcttatttcgacataagtgaccggcaggcgttcttttatcaatccaagtttttttttcaaaatatatatgttggagagagaactccagccggtgggcgaatgtacctgcctatgtattgcttggagggaaaaactctagctaggtggcagaatgtagtcgtataactctaagaagagggggcattctaggttttgcttggagggatggataaacacaagaacatgcgagggttaaaagtggttcggaatgtaatatctttatttgtgagttgtattgtttagagcttgagcgcggatggtgtggattttgagtgagcttgttcccttgacctttgtatcgtgcttctccttttatagtccaacggcccattttat

SEQ ID NO: 423 - DNA, 1080 bp, Zea mays
  Clone ID: 700074711_FLI
aacatatcaagctcagagcctcagagcgccagccaagtcttgcggtcgcgaagagcaacgcaacaagatggtgaagctcgcattcggaagcgtcggcgactccttcagcgtcacctccatcaaggcctacgtggcggagttcatcgccaccctcctcttcgtcttcgccggcgtgggttccgccatcgccttcgggcaactgacgaatggcggcgcgctggaccctgcgggactggtggcgatcgcggtggcgcacgcgctggccctcttcgtgggcgtctccgtggccgcgaacacctccggcggccacctgaaccccgccgtgacgttcggcctggccgtgggcggccacatcaccgtcctcaccggcctcttctactgggtggcccagctgctgggcgcgtccgtggcgtgcctgctcctcaggttcgtgacccacggcaaggccatcccgacgcacggcgtctccggcggcaccaccgagctggagggcgtggtgttcgagatcgtcatcaccttcgcgctcgtctacaccgtctacgccaccgccgccgaccccaagaagggctccctcggcaccatcgcgcccatcgccatcggcttcatcgtcggcgccaacatcctcgccgcggggcccttcagcggcggctccatgaaccccgcccgctccttcggccccgccgtcgccgcggccgacttcgccggcaactgggtctactgggtcggcccgctcatcggcggcggcctcgctggcctcgtctacggcgacgtcttcatcggcggctcctaccagcaggtcgccgaccaggactacgcctaagtagtgtgctccgttcgtctggattgagctcatccaacgcagccgcgcgtttcgatcggcgtcgtcatttgctttgctcttcatttcatcacgttatgtaacgtgccaatgatgtgtgtcgtcctggtctgttccgtcgtccttgtattcatttcccttcttttttcggggtaaaatcgatgtaaagatctcatccgatctgccgttttcgatcgccttggagtggaaaaaaaacaggtgattttcgtttcgacttcgtt

SEQ ID NO: 424 - DNA, 2029 bp, Zea mays
  Clone ID: 700074722_FLI
cattagagtacttgaggatatacaacagtttcttaattgatggaaggttgaaggactgcgtggatttgttagaaagcatggaacaaaatggactgcttgatatgaggaagatacaccatgccagctttttcagtatgtgtaagaagcaaagagctgtcttggaagctcttcgcttttgcagatttattgggaaccccaagataagtaccttcaatatgcttttgtcggtgtgtgctagttcactagattttgacggagcgctccaagttatggagctcctaaaggaagctgggctaaaacctgattgtaaactttacacaacgctgatatcaacttgtgcaaagtgtggaaaagttgatgccatgtttgaggtattttatgagatggtcagtgctggtatagagccaaatgttaacacatacagtgcattaattgatggctgtgctagagctgggcaagtggctaaagcatttggtgtttatgggattatgagttcaaagaaggtgaagccagatcgagttgtcttcaattctttgatcagtgcatgcggtgaatctggagctctggctcgggcatttgatgttttatcagaaatgacagcagaatcctctgaatctaaaggatggaaaccaatcgttcctgatcatgttactgttggagcactgatgaaaacatgtattttggcgggccaggctgatagagctcgtgaggtgtacaaaatgcttcaggagtataatataaagggtaccccagaagtttacacaatcgcattaagaagctgtagcttgactggtgatttagggtttgcactgaagatatatgaagatatgaacaggattggagtaaaacctgatgagatgtttttgagtgctctagttgatgtagctggccatgctaggagggcagatgctgcctttgaaataatgaaagatgcaagagcaaaaggtttactcgttggaacaattgcatacagttcgttaatgggggcttgctgtaatgcggacgactggaagaaggcactgcagctatacgaggagatcaagtctatcaaattgaccccatcggtttcaatgatgaatgctttgatcacctctctgtgtgatggtgatcaggtcttaaaggctgttgatatccttaatgagatgaacatattaggggtccatccaaatgagataacatactcagtcttatttgttgcttgcgaaagaaatggtgaagcacaactaggtttggatttgtttgaacaattaaaaatggatggcattgacatcaatccgaccataattggttctcttactggtttgtgccttcaaatgttcaacattgatttttcgcttgggaatattattgtcaacttcagctcagggaaaccacagattgacaacaaatggacttcctcagcagttatggtgtatcgtgaggcagtttcagctgggctactaccctcaagtgatgttttatctcaagtgttgggatgtctgaggcttcctcatggcagttctctgaagagtactttcattgaaaacatgggagtaagttgtgacattccacaatacccaaatataaattcacttttcgaaggattcggtgaatatgacattcgagctttttctatattggaggaggctgcttcattaggagcagttgcaagcatttccataaaagaaacccggattgttattgatgctagaaagttaaagatcttcacagccgaggtatctcttcttagaaccttaagatctttgaagcatcgattggctgcaggtgaatgctagattttattttaaaaaattatattagtgtgtttatcctactattttccattgaatcaaagaaacaaagtatacatgctttgcagtaccgacacaggacaaatggacatggtgtgagaaacaataaatatggagggtcaatggattatttgtgcttctgtacattttgtttagattgtaaactatataaatacagaatattggccatttgctgataaggcgagctgacaaatatattctggacattttttctgagt

SEQ ID NO: 425 - DNA, 1852 bp, Zea mays
  Clone ID: 700074723_FLI
ccaatagatggatgcggttgacacatgaagtaaaatcaggaaagagtggaaagctagaatgtttgtctgtgaaggcgacaataagcaaacaccttgtgatttgctgccatgctgaaagccctgcttccatggaagacttcccattatggaaatttgagaaccaagtggagacactgcccacaaaggacaccactcttgccttctctggacagaaacttattcaagttgacgagccagatgctcaagttgaccttgtcttaaattctgctggccctgctttagttggagagttatttactttaccagtgatcatagagtcaaaaggacatgcagtccattctggtgaactgaaaattaacctcattgatgctagaggtggtggtctgttgttgagtccgagggaagcagaagattctgaaagtcatcatgttgaacttcttggtgtctcaactgtgtctgaggataaagagtcaaaggaagaggctgatagcataagaaagatccagtattcatttggggttgtatctgttcccacattgagtgtgggtgattcctggtcatgcaaattagaaatcaaatggcatcgagcaaaatcagtcatgctttatgtttcacttggttactccctaggctcaagtgaagaagaagcattgcaccggcttaacgtccatagaagcttgcaaattgaagggcagatccccttattagttagtcatcagtttttgagatcatttaggcgagaaccgttgttgctatcagggatcaggtccttaggaagtgatgataaaaaatgttctcttgctatgaatgagtctaacatgctaattgtgactgcaagaaactgcactgaagtgcctttgtgtttgcattcaatgaccattcaacctgatggtgattcagagcagctgtgttcagtgcaacagatcagtggaatttccaatcgtcatgcaattgttgctcctagggaggaatataaaggaatattttcggtcaatccacgggctatcagtacaaacttcagactaggtgaaatttgcctgaattggtcaagagattcaagcctcggtgaggatcaagataggcttattatcatgaaagtacagttacctgaggtcaacattgaggagccgccgcttgttgtgggcatggagtgccctccctatgcaatcctcggcatccctttcactatctatgtgaagattcacaattcaacgtctttgcttcaggaaatcaagtactcccttgttgattctcagaatttcgttttttctggtgctcacaatcatgctgctttcattctaccgaaatcagagcacactgttagtcataagtttgtaccgcttggttctggctctcagcagttgccaaggatcacagtaacttcagtgcggtattctgctgcattgactccttcagcctcagcagcgactgtctttgtgtatcccagtgagcctaaattcaacttggaaactagccattcaacatccgatgaggtcgtgagttgagacctaagcagcctgaagtctcccctctcctgacacttagctcgacccgggcttcatgtgaggtaaggtatgctactggaaagaccaccagcttgacatttcatgttgattgttgaagaaacgaatcagattcctgtcggcgagaaggtcgctgtgcaaaagttttggcattatatttcgaggtttcgattttgtagcgcttctcgattaaccacatatgtgtaacttatgattacttcattgtttttggttcaatggtgcaacatacacaggaagataggctcttgtaaattaccatcccaccagtaaagtgggggaacaaaccagccccatgtcagtttttactc

SEQ ID NO: 426 - DNA, 473 bp, Zea mays
  Clone ID: 700074763_FLI
aataagaacgcgatgaggatatgctgcattaatatcataataaacaggataacatggatatgtacatatatgtactcctacgcgacaacagttatataggtgatcagacatcgattatggtttgcacaagaacatttgatccgacagcacgaaatcccatggaatcataccgtgctttctttttgtttcacaatataaaaaaaaaacccgtgaacacaagtcatagtgccatgcagattgccacgcgtatcacatgacagaggtaaatcagagaggtcaaccaccgcatccgccgccgcagccaccgccaccgcatccgccgccgccgcagccgccaccgccaccgcagccgccgccgccgccggagtcgagcgccgagccgatgatggcgccggcggccagcccgccgaccgcgccgacggcgagccccgcggctcccgacccaagcccgctgcggccgggcctccctccgg

SEQ ID NO: 427 - DNA, 759 bp, Zea mays
  Clone ID: 700074764_FLI
tgaatgcgatccatggctctgcattctccacaatccatgtgacgcccgaggacggtttcagctacgccagttacgaggttatgggcttggatgccactgctctgtcttatggtgaccttgtcaagagggtcctccggtgctttggcccctcagagttttccgttgccgtgaccatcttcggcgggcgtggccatgccgggacatggggaaaggcacttggtgcagaggtctatgactgcaacaacatggtggagcaggagctgcctggaggcgggctcctcgtgtaccagagcttctgtgctgctgaagacgctgttgctacctcgcccaaatctgttttccactgctttgacggcgagaacgtggagagtgctcctcctcctatgaagaaggactacaagctggctaatcttctctgctgggaggaggaagcggatgccatggaggagaaggcgggagtgcttgatgagtaagacgggcttctggggtcgatttgcttctgagttgtttattttatatcgtcgcaatttcgtggttgtcgtttggttattctgtgaagcagccaagccaggctattgttatgaaaatttgtcgtctgtaagcatgtgaacttccgatgttgccacatgctggatcagtctgaataagtaagtatgcagctctaggtggtcagctgcgtctaccacaatgagcatgaacgtatggagaaatatctgtgaacccattttgtttatgaataagatttgtttttttcgagtt

SEQ ID NO: 428 - DNA, 1350 bp, Zea mays
  Clone ID: 700074808_FLI
aaagctctcaactttgaatgaagatgaacccatgagtgatgacaacttgagggaatcaatggatattgatagttctttgtctgatacagcaaatggtagaagatggagaagtcaacacgaacagcttcagcactggcagatgaacaggagaaaactggcattctcaactgttggaacaccggattatattgctccagaggttcttctaaagaagggatatggaatggaatgcgattggtggtctctgggcgcgatcatgtatgagatgctagttgggtatccaccattttatgctgatgatccaataactacatgcagaaagattgtgcactggagaaaccatttgaagtttcctgaggatgcaaagttgtcaaatgaagcaagagatctcattagccgattattatgtgatgttgaccacaggatcggcagtgcaggggcagatcaaataaaggcacatccttggttccgaggagttgcatgggataaactttatgaaatggaagcagcatttaagcctcaagtaaatgatgaactggacacacagaatttcatgaaattcgaggaattggaaaatcctccagccaaaacaggctctggaccttcaaggaagacgatgctgaactccaaagatctgagctttgtggggtatacgtacaaaaacttcgatgcggtgaaagcaataaaaatttcagatctgcaaaggaattcatctctaacaaggccttccattggttcaatattcggtccaccaggcatggattctcccatggaaccaaacgggaggggcacacatatgcacacagtttcatctggtgatccaatgattccctaacctgcagtgctgtttgtcctcggcaaatttctgaactaaatcagcatgcaaacgcctggatgatgtggctccagctggataacctgctcatttttagccaggtttctgctttctcaatcgtgggcaagcggtttgtagaaatccaccagagtttctagttgtaaaatagtattccacggactttaacaaaggtcccatgtactaagggctcatcatcagacaccgggacagtttttttctggagaaattgcaccttgcggctggctgcccaggttggtagagcaaattgcggccttctcttgtggcagttcccggtccgctaacatttgatcagggaagggaaataagatggtgttgttgcggcaggaattctcatgggggggagttagtgttgttgtttgatatgtatcaggaattttcacatttgtagtagggtttctgttagcatattttagaaacatcctttttgcagagttgctatttctcattgatgtatggaaaacaacataatttgg

SEQ ID NO: 429 - DNA, 1301 bp, Zea mays
  Clone ID: 700074810_FLI
tagctttggtgcaaacaagcaagcagcagagcagatcaagtaaaggtagcaatttgagtagtgtgcaagctaagatggggcaacaagaaaaggaagtgatcccgctgatgaccccgtacaagatgggacagctggagctctcccaccgcgtggtgctggcgccgatgacgcggtgccgcgccatcggggacgtgccgcagccgcacgccgccgtgtactactcgcagcgcgccagcaggggcggcgtgctcatcaccgagggcacgggggtgtccgccaccgcgcagggcttcccggggtcccccggcatctggacgcaggagcaggtggcggcgtggaagcccatcgtcgacgccgtccaccgcaagggcgcgctcttcttctgccagatcgcgcacgtcggaagggcatccaccaacgatttccagccggacggccaggcgccggtctcgagcacggacgcgcagctcccacccgacgccgagtccggcacggtgttctccaggccacgccggctgcgggccgacgagatcccggggatcgtcgacgacttcaggcgcgccgcgcgcaacgcgatcgaggccgggttcgacggcgtggagatccacggagcgcacgggttcctcctggagcagttcatgaaggacggcgccaacgaccgcgccgacgagtacggcggcagcgtcgagaaccggtgccgcttcgtggtcgaggtcgtggacgctctggtccgtgaagtcggcgcgagccgggttggcatcaggctctccccgttcgcggactacttggactgtgcggattccaaccccttggcgctaggtcactacatggtggaacagctcaacaggcacgaggggtttctgtactgccacatggtggagcctcgaatggccatcgtcgacgaccgcaggcagattccgcatcgactcctgccgttcaaggcggcgttcaatggcaccttcatcgccgcgggcgggtacgacagggaggaagggaacaaggtggtcgccgaaggctacgcggacctcgtcgcatacggaaggctgttcttggccaacccagacctgcctaaaaggttcgaggtagacgagatcctgaacaagtatgatcgttccaccttttatacacaagaccctgttgttggctatacagattaccctttccttagggaggacagcgaagacttagctgctcaagcttaatggcgtggatgatcgatgtaatcacggttactgcacgatcgagatcgatactacatccatttgaatatatatatgtctaagatgcattgtttttgtttt

SEQ ID NO: 430 - DNA, 2632 bp, Zea mays
  Clone ID: 700074818_FLI
gaagcacatgtgtctatggtggtgcacctaagggtccacaaatacgggaccttagaagaggagttgaaattgtcattgcaactcctggccggttgattgatatgctggaagctggtcacacaaacctacgtagagtgacataccttgtgttggatgaggcggaccggatgctagatatggggtttgagccccaaattcggaaaatagtagcacagatccgcccagacaggcaaaccttgtactggagtgccacatggcctagagaagttgaagccttagcaagacagtttctacaaaatccttacaaggtaatcataggctcacctgaacttaaagctaatcattccatacaacaaattgttgaagttatttcagatcatgagaagtatccaagactcagtaagctcttgtctgatctaatggatgggagccgtatcttgatattcttccaaacaaaaaaggattgcgataagatcacccggcagcttagaatggatgggtggccagcattatctatacatggtgataaagctcaagctgaacgggactatgttcttgcagagtttaagagcggcaagagccccataatggctgccacagatgtggcagcacgtggtcttggtatgatgatttatttgaatattaggattaggtagtagttccaagtgctcaagggtgataagtcggagggttgttgagctgcgattggttgagtgaactgaacttgtggattggtggtgtataccaaggtgccatcatgtcaaaggtagataatttccccccgtggtttacctcatttgagcgtgagcattggcagtgttacacaggcagttcaactttgagctatcatggtaatgttccctttccgaataagccttttagggagcctacatttggataaaatggaaatcctcaaaaagtagcatgcaaccgaatatgcatttcacactatagttgatttcttagcttgatttgaattccttgatccctgcatatctgaccattttggaacatttaggtattgtgttgctgccctcttcattcattctttgtccttgtaattgaattcttttcaatccaatagtctgcttttcttgcaagtatttttggcttacctttctacattttctttgtaaatccatgtttaatttgtttagaattaattggagcaataattcttttcagagatgtattgcaaaattttaggcataaaacatttgtatacaaatgacaatatcaatttcaaatatatttgtttgcacaaatgcacattcttcatgagtagcatgtccatggatctcctttgctttcccctagttttacatgaacctttagaaagtcgttctgctttctcaatcaagctcctcatcatcggtatcactgccaagtgtgaactggtcaaaaaggatggttgtaatcagcattcttttcagttgattcacgatagtgacctctgatgcagcaccttacacattacagcctacgttggactggcatgtcctacagaattttgtttgggttatggatattgatgctgttacattattggataagtggttacccaggcatgccagttgcagtcttccaacattttttgataaggctgagaggttaatcaccatcaattccacatccagcagtgattgatgcctggttcagtttttcagctccttcgacttgtgttttagaattcaaaagtgcagcactgtggactttttggtgcttgtctagaccatgtaccttctatggggatcgacaatgttgatgttccagcgtggtccagcatggtattcaggacaacacatcaattttgattaagtactgataatatttgttgattttgcagatgtgaaggacataaagtgtgtgataaattatgattttccaacaactcttgaagattatattcacaggataggtcgaactggccgtgctggtgctagcggaactgcatttacttttttcacacacgcaaatgcaaagttctcaaggaatctagtgaagattctgcgagaagctggccaagttgtgaatcctgccttagaatccatgtccaggtcttcgaactcaacgggaggaggcaattttcggtcgagaggcagaggtgggtttggtaaccggggccatatgtctggatcaaatacctttcctttaggaggaagaaggccatattgatgtgtgcaaaagaactgtgggagtatgggactatttgtatactactcggcattaagtgcattctttgggaaatttctgagaaatttcccctactaccaggattgataacaccatcgattttcgctacagtacctggagcttcttatatgaaagaacaacacatcaactatctagcaacagcatatgcattccattcagatatttcttttggaaggaccctgtcttgttttagtggagtccctgtgatcgtttaaagtcgtctgtatacttgtactgaacttcttgtggtgttactgttaggatttatggttgctctctattggtgtgcggtgttactgaacaaatttagttaagaagttaggcatttccatatttaatctgattctgaaataaactagcaaatttatgatgtacactttataatagtagctaatatatatatgcaaactctatatgc

SEQ ID NO: 431 - DNA, 1206 bp, Zea mays
  Clone ID: 700074853_FLI
ccaagctcctgctcaccattccaagaatccttgagcttgctgaagagctgtctatgccacttgctgctgtgaagtactcccgtgggacgttcatctttcctggcgcacagccagccccccacaggagcttctctgaggaagttgctgcacttaaccgctactttggcggcctgaaatctggtggtaatgcttatgtgattggagatccagcaagacctggacagaagtggcacgtcttctacgccactgagtacccagagcaaccaatggttaaccttgagatgtgcatgactggtctggacaagaagaaagcttgtgtctttttcaagactaatgctgatgggaacacaacatgtgccaaggaaatgacaaagctctctggcatctctgaaatcatccccgagatggagatctgcgattttgacttcgaaccctgtggctactccatgaatgcgatccatggctctgcattctccacaatccatgtgacgcccgaggacggtttcagctacgccagttacgaggttatgggcttggatgccactgctctgtcttatggtgaccttgtcaagagggtcctccggtgctttggcccctcagagttttccgttgccgtgaccatcttcggcgggcgtggccatgccgggacatggggaaaggcacttggtgcagaggtctatgactgcaacaacatggtggagcaggagctgcctggaggcgggctcctcgtgtaccagagcttctgtgctgctgaagacgctgttgctacctcgcccaaatctgttttccactgctttgacggcgagaacgtggagagtgctcctcctcctatgaagaaggactacaagctggctaatcttctctgctgggaggaggaagcggatgccatggaggagaaggcgggagtgcttgatgagtaagacgggcttctggggtcgatttgcttctgagttgtttattttatatcgtcgcaatttcgtggttgtcgtttggttattctgtgaagcagccaagccaggctattgttatgaaaatttgtcgtctgtaagcatgtgaacttccgatgttgccacatgctggatcagtctgaataagtaagtatgcagctctaggtggtcagctgcgtctaccacaatgagcatgaacgtatggagaaatatctgtgaacccattttgtttatgaataagatttgtttttttcgagtt

SEQ ID NO: 432 - DNA, 2225 bp, Zea mays
  Clone ID: 700074867_FLI
aacaagcgtagcgattgtcaatgtcaagtcggatttgggcatctccaatgcgacggcatgacaccgtaacagaagggaatgctcagctggcacgtgtgtgccattattaattgtagcggcagcggcctcttccactctcgcctcgccgtcgccgtcgtcatctcagctttaattcgcagcaggcgggcagtggcaggccaggccacggcgtccagcaccagctacgcctgtgcgcgcgcttgtgcagtacctacgttggtgggtgggtaggtagctagtgcggcggagcatcgatcgcgcggtactctcagttccatccgtcgagagatcgaccggtcgtcgatcgacatggcgggccggggaggagcctcggcggcggcgccgttgctggagaagacagcggcggcggcggagtcgggcggcgggtgctgctacgtggacgggtgccccgggtgcgccgtggaccggcacaaggcggcgaacccgggcattccctacggcaacttcatctacgtctggatcgtcaccctctgcacagccttaccgatatcgtcgctcttccccttcttgtatttcatgataagagacctgaatgtcgctaaaagaacagaagacatcgggttctacgctggttttgtaggtgcctcattcatgtttggtagatgcttgacttcaacagtatggggcatagcggcagaccgcgttgggaggaaacctgttgtcgtgttcggcatttcctctgtagttgtgttcaacacattgtttggtctgagtgtcaactactggatggcaatagctacccggtttctgcttggtgccttgaatggtttgcttggaccgataaaggcttatgccattgaagtttgccgacctgaacatgaagccctagcactatcacttgtcagcacagcatggggaataggtctcattattggtcctgctcttggaggctaccttgcactgcctgcagaaaattttccaactgtcttttcacctgactcaatctttggaaggttcccatatttcttaccatgcttatgcacgtcaatcttcgctgcggttgttctcataagctgcatatggatgccggagactttgcacaagcacaaagtccatgaaaatagaagtcggaacattgaagctttggaggcccgtctgattgattcaaatgaaaaggttgaagaaagtggtagtttagatagtaagaagagcctattcaggaattggccattgatgtcatcaataattgtctattgtgtcttctccttccatgacatggcttacacagaggtgttctctctatgggctgaaagcgacaagaagtatggtgggctgagtttatcatctgaggatgttggtcaagtgcttgcagtcacaggtgccagtcttcttgtataccaactctttctataccccagtatcaataaggttcttgggcctatcaaatcttctcgagttgcagctatcctgtgcatacccatcctctttgcctacccctacatgacgtacctgtcggaacctggattatcaatcgttttgaatattgcgtcagtgataaagaataatctcggtgtcaccatcattacaggcactttcatccttcaaaacaatgccgtgcctcaggaccagcgaggcgctgcgaatggactgtccatgactgggatgtcctttttcaaggcacttgctccagcaggagcaggcattgtgttctcatgggcgcagaaacgccagcatgcgtttttcttcccaggtgaccagatggtattcttcctcctgaacgccgtcgagctggtcgggcttctcctcacgttcaagcccttcctggcagtaccagagcagtacgatacgagatagttagacgatctatctatctatacaagttctggaacgttcaagacgattcatcgtgtgcggctgtaccagtgaaggagaagcgccaaagcgtgtgccctttacgccgcggaaggtctacaaacagggacatactcctatataggaagatgcaatgcaagagctgtggtgtacttttaattgtaggtgatgtagtagtgtatggtagtatcagcattttctgcattcatgaaatgcacacgcaggtggtgggaaatgtgggcatggatcgagagtcgctgcgctgttaagtagcaataaatgttaaggttcagtgactcgctgttatttgttgggaatgaaattactgggcatctgtaccctcgttgttttat

SEQ ID NO: 433 - DNA, 1664 bp, Zea mays
  Clone ID: 700074907_FLI
gttgaattcggccaattgattcatgattttgatatctatggagatgaagataacccatctccagcctctgaggatccatctatttggtttgagataatgcggttcttcacaaatcctaggaaacctatgattctggctattgcccgtccatatgctgagaagaatatcgcaacgcttgtgaaggcatttggtgaatgccatccgttgagggaacttgctaaccttacattgataatgggtaaccgtgaggctatttccaagatgaacaaaatcagtgcagctgttttgacatcagtgcttacattgattgatgaatacgatttatatggtcaagtggcatacccaaagcatcacaagcactctgaagttcctgatatttatcgtttagcagcaagaacaaagggcgcttttataaatgttgcttactttgaacaatttggtgttaccttgatagaggctgccatgcacgggctgcctgttattgcaacaaaaaatggggctcctgttgaaattcatcaggttctggaaaatggtctccttgttgatccccatgatcagcatgcaatcgcagatgccctctataagatgctgtctgaaaagcaattttggtcaagatgtcgagagaatggattgaaaaatatacaccagttttcttggcctgaacattgcaagaattacttgtcaaggatattaactctaggtccaagacatcctgctttcgcatgcaaagaagaccataaagtgcctgtgaagtgcaggaagcatatattcgttattgctgtagactccgttaacaaggaagatttaattcagattatcagaaattctgttgaggctacacgctctggaactatgtcagatttgacaggttttgtgctgtcgacttcactgacaatagcagagttacagtctgtaatagtacgcacaggcatgctccctactgactttgatgcctttatatgcaatagtgggagtgacatatattatccatcacagtctagtgatgtgccaagcaattcccgtgttacatttgcatcggaccataactaccgatcacatattgagtatcgttggggtggagaaggtttaaggaagtacttagttaagtgggtctcttcagtagtagaaagaagggggagaaccgaaaagcaagtcatctttgaagattcggaacactcttcaacatattgtcttgcatttaaagtgattaatccaagtcatttgcctcctttgaaggagctgcaaaaattgatgagaatccagtcactgcgttgtcatgcactgtataaccatggcgccaccaggttatctgtaattccaattcatgcatcgcgatctcaggctctaaggtatttgtctatttgctggggcatagagttgccagatgctgtggtcattgttggtgaaactggtgattctgattacgaggaactgtttggaggtcttcacaagacagtcatccttaagggtggattcaacactcctgccaataggatccatacggttagaaggtaccctttacaggatgttgttgctcttgatagctcaaatatcattgcaattgagggatttagcactggtgacatcaggtctgctatgcaacaacagcttggtatacccacacgatgacaccaagtgcgatctattttgttattaatagaaag

SEQ ID NO: 434 - DNA, 1047 bp, Zea mays
  Clone ID: 700074961_FLI
ccaccggagcgcggaggaggcacaggcgccgatctagagacgatggccgccgcgggctcctcgccgtccttctcctcctcgagtaagcgactggaagggaaggtggccctcgtcactggtggcgccaccggcatcggcgaggccatcgttcgcctcttcatggagcacggcgccaaggtctgcatcgcggacatccaggatgaggccgggcagcagctgcgcgacgccctgggaggtgacgcgcagggcgccatgttcgtccactgcgacgtgacgtcggaggaggacgtgagccgcgccgtggacgctgcggcggagcggttcggcgcactggacgtgatggtgaacaacgccggcgtgacgggcgccaaggtgacggacatccgcgccgtggacttcgcggaggcgcgcagggtgctcgacgtcaacgtgcacggcgtgttcctggggatgaagcacgcggcgcgcgctatgatcccgcggaagcggggctccatcgtgtcgctggccagcgtggccagcgccatcggcgggacgggcccgcacgtctacacggcgtccaagcacgccgtggtcgggctcaccaagagcgtcgccgcggagctcggccgccacggggtgcgcgtcaactgcgtgtccccctatgccgtgcccacggcgctgtcgatgccgcacctgccccagggcgcgcgcgcagatgacgcgctcaaggacttcctggcctttgtcggcggcgaggccaacctcaagggcgtcgacgccatgcccgaggacgtcgcccaggcggtgctctacctggccagcgacgaggcgaggtacgtcagcgcggtcaacctcatggtggacggaggcttcacagccgtaaacaataacctcagggcgtttgaggattagttgaggcatgtatgccagctctgggattgggagggagtattaccactatttcttctgctgttgtgacaagtgtgtgcaagactaataaaccgcagcatgttcatgtagccaacagatgattgaacattccaagtatcattgctgaattcacgc

SEQ ID NO: 435 - DNA, 1399 bp, Zea mays
  Clone ID: 700074963_FLI
gagactcgcagctagctgacacggccgagaagcagcttgcattgcaggcgtagtacgtacccagcagcagctagcactagcagtccatcggagcgacgatggtgagaaggacggtgctggcggcgctgctggtggccgccgccctcgccggcggcgcgcgggcgcagctcaaggaggggttctacgactactcctgcccacaggcggagaagatcgtcaaggactacgtgaaggcgcacatcccccacgcgcccgacgtcgcctccaccctgctccgcacccacttccacgactgcttcgtcaggggctgcgacgcgtcagtgctgctcaacgcgacgggcggcagcgaggcggagaaggacgcggcgcccaacctgacgctgcgcggcttcggcttcatcgaccgcatcaaggcgctgctcgagaaggagtgccccggcgtggtgtcctgcgccgacatcgtcgcgctcgccgcccgcgactccgtcggcgtcatcggcggtccgttctggagcgtgccgacggggaggcgcgacggcaccgtgtccatcaagcaggaggcgctggaccagatccccgcgcccaccatgaacttcacccaactcctccagtccttccagaacaagagcctcaacctcgccgacctcgtctggctctcaggggctcacacgatcggcatctcccaatgcaactccttcagcgagcgcctgtacaacttcacggggcgcggcgggcccgacgacgcggacccgtcgctggacccgctgtacgccgcgaagttgcggctcaagtgcaagacgctgacggacaacacgacgatcgtggagatggaccccggcagcttccgcaccttcgacctgagctactaccgcggcgtgctcaagcggcggggcctgttccagtccgacgccgcgctcatcaccgacgccgcctccaaggccgacatcctcagcgtgatcaacgcgccgcccgaggtgttcttccaggtcttcgcgggctccatggtcaagatgggcgccatcgaggtcaagaccggctccgagggcgagatcaggaagcactgcgccctcgtcaacaagcactaggcggcggaattcatgcgggagatggctccattgctcgcaaaaaatccttgtgagacacacaacatgctctgcatctgcaggcgttgtcgtcaccttggtggacgtagtacatcggtgcatggattatctgttgtttaatttgtacgttcagttcattctgtttcttgtattcttttggttcctttcctcttgtttattcatggatgatgaggtgtttctgttttattctctggttcagctgtaaccatgtaacatgtaaggtgcgcgttttgtcctcgtgatctctgcaactgtatttattttaaaaaaaagtt

SEQ ID NO: 436 - DNA, 1274 bp, Zea mays
  Clone ID: 700075032_FLI
gcgtgaacagagagacctgaccctgaggcaggtgaggaggtccagggagcaatgggtttcggcgtagtgcacctcctcgacgcggtgttccgccgcatgttccggtcggccggcctccgcccgggctcggccacggtgaacgccgaagacgacacggtcatccactactgggcccacccgtccctcctccgcccgccgccctccgactccgactccgagcagcggcagccggtggtggtgctgatccacgggttcgggccggacccgacgtggcagtgggcggcgcaggcgggcccgctgtcgcgccacttccgcctggtggtgccgacgctgctcttcttcggggcgtccggcacgcgcgcgcccgcgcggtccgacgcctcccaggccgccgcgctcgccgcgctgctcgcgggcccgggccagcagcacctcccgggcctcggcgccggccgcaccgtgcacgtggtgggcaccagctacggcggcctcgtggcgtaccacctcgcccgggagctggagcggcaaggcggcggcgttcgcgtcggcaaggtggtgctgtgcgactcggacgcgtgcaagggcgccgaggacgaccgcgcgctggcggccaggagcggcgtggcggaggtggcggagctgctggcgcccgccgacacccgggcgctgcgccgcctcatggcggtctgcgcccaccgccccgtcaagtacgtccccgagtgcctcctccgcgacatgctccggagatacttcgcggacaagagggaggagaagatggcgctcatcagagggatcgccaccggagaaggcttcgagcttgctccgctgcctcaggaggtgctcatcatctggggagagttcgaccagatcttcccggtggacaaagcgcacaaggtgaaagagaagctcggggagaaggcgacggtgaaggtgatccccaacgcggggcacctgccgcagcaggaggacagcaagctcttcaaccgagtcctcctcgacttcctgctgcgcccttcgtccaccgccgcctgacctccaacggcagcgcccaagccaaacagcttagcttgctcggctgccttcttctttggttatccattatcatcctgccgcgcgcgtttccggcgttcttgtttgtttgtagagtggaggaggcgctgccgccttctgtttttgtttgagggtggcaatgtgcagatcctacctgtttggttgtgctgtgaaaaaaagttgctgtgggctgtggaaaaagattttatcattattttatcatt

SEQ ID NO: 437 - DNA, 1239 bp, Zea mays
  Clone ID: 700075048_FLI
tcctttctccatcacttcagcacctggagatgactacctcagtgtccacatccggacaaacggtgactggacacaggagctcaagcgcatatttgtggagaactacttctcgccgcatctcaacagaagagcttcgtttagcgagctaggtgcggcagaaccaagaagcttgccaaaattactcgtagatggtccctatggtgcccctgcgcaggattttagaaactacgacgttctacttctcgtcggcctcggaatcggggcaacaccgttcataagcattctacgggatctgcttaataacattaagatagctgacgagctgatggacttggcaatggagaccagcaggtctgaagacagcgccaacagctttagcgtctcaacggcgagtagcaaccggaagagagcatacagaacaagccgtgcacatttctactgggtcacccgagaagccggatcctttgaatggttcaaaggggtgatgaatgaggttgcagaaatggacaagaagggtatcatagagctgcacaattacctcactagcgtttacgaggaacgcgacgcacggacaactctgctgtccatggtccaggctctgaaccacgccaagcacggcgtcgatatcgtatcggggaccagggtgaggacgcatttcgccagacccaactggaaggaagtcttcaccaggatcgcctccaagcatccgaattcaacagttggtgtgttctactgcggcgcaccgacgcttgccaaggagctgaaggctctggcgcacgagatgagccacaggacgggcactcgcttccatttccacaaggagtacttctgagtttcgacggatagaatgggcagtcgatgctcgttctaacgtgatctggtcttttctgatctgatctcgatagcgttaggtaccggtaaagaagacagaattttgcacagatgcaagacaaaccaagctgacctctcctcctgatctggaactgtacatagcataaaagaagcaccacagggttagcttagtatacgtagcacaattcaaataaatatattgacaaagaaaagagagacagagaaagggcaggatagaggctgttgttgttaactcgaagatattgatgataggcatggcggtatacgtgtatacattatagttaggtgctaggtggtagttatatatatactgtatatgatatgggtcgatgaatatacgaggagccacatgctgctgccattctc

SEQ ID NO: 438 - DNA, 1197 bp, Zea mays
  Clone ID: 700075058_FLI
caaatttctccatagttatgggcacttccattctcgacgccctgaacgttcgcgtggaaggttccggcgacaagtaccttgtcctggcccacggcttcggcacggaccaatccgcgtggcagcgcgtgctcccttacttcacccgcaactacagcgtcattctctacgacctcgtctgcgccggcagcgtcaaccccgaccacttcgactaccgccgttataccaccctcgacgcctacgtcgacgacctcctcaacatcctcgacgccctccgcgtcccccgctgcgcctacgtcggccactccatctccgccatgatcggcatgctcgcctccatccgccgcccggacctcttctccaaactcatcctcatcggcgcctcccctagattcctgaacgacaaggactaccacgggggatttgagcagggagaaatcgagcaggtgttttcggcaatggaggcgaactacgaggcgtgggtcaacggattcgctccgctggcggtcggggcggatgtaccggcggcggtgagggaattttcccggacgctgttcaacatgcgccctgacatctcgctcttcgtgtcgcggacggtgttcaacagcgacctgagggggattctgggcctggtgaacgtcccctgctgtattatgcagacggcacgtgacatgtccgtgccggccagcgtggctacctacatgagggaccacatcgccggaaagagcaccatccagtggctcgacacggaggggcacctcccccaccttagtgctccttcatacctagctcgccagctagagattgcgctctcgcagtagcgcgtgtaagtctaggcgcgtggctctggtggttaattaagtaattaactctactagtactattactaccagattaggctagaagctactgctacagaacaacaacaacaacaacaacaagtgtacgaaaggctccgaaactggacacctggcgaataacgtgtgggtgttggttctttgactgggatttttatttaaggataagaatctgcacgtggatttcacgtgatgcgtggccatttttagtattattaatcaactattattgctcttgtgcttctctccttttaaaggaaagaaaaaaaaaagagaagaaattagagagacttgtttgttagtgtgattgtttgtttttattaatattattattattattatc

SEQ ID NO: 439 - DNA, 779 bp, Zea mays
  Clone ID: 700075093_FLI
tctgcttccagagccccccgccgccgctgcgccctcctctcggtcctgccgtccgtcgaggtaaaaggacagcatggtgagggtcagcgtgctcaatgatgctctcaagtccatgtacaatgctgaaaagatagggaaacgtcaggtcatgatcaggccgtcatccaaggtgatcatcaagttcctgacggtcatgcagcgccatggttacattggcgagttcgagtacgtggatgaccacagagctgggaagatcgtggtggagctgaatggaagactgaataaatgtggtgttattagcccacgttttgatgtaggtgttaaggagatcgagggatggacggcgaggcttcttccatctcgccagtttggctacatcgtcctaacaacttctgctggaattatggaccatgaggaggcccgccgtaagaatgttggtggcaaggttctaggtttcttttattgaaaatgtgtttttttgagccacagatgcgtccaagaactcgtctgatgttttgaggtttgttaagactgggtgtccgagcctttgtggtttgttaagacagcgatgtgtcatgtatttcagaaattgggatttttatgagatgtacctgcgagagccctgtctgtttcgattttcagatattggttttgatttatgcgatacaaacaggtcctttagtccatataactttttgatgctgactttattggtgtaaggtagtgtgctaggcactgctttcatatggtaatctgaaaccgatcaaaatcaggtggac

SEQ ID NO: 440 - DNA, 949 bp, Zea mays
  Clone ID: 700075153_FLI
gaattatggcaggcatttccatacagaaaacaagcacttatggttactccctggcctaccactgaccttcctaaagatttgaggtccatcaaacggttccagaatttgcaatcattgataagaggaatcagaaatgttcgagcagaatattctgttgagccagctaaacggatatcagcttctgttgttgctactgcagatgtcctggaatatgtatcaagggagaagcaggtcctagcattactttcaaagcttgacgttcagaacgtacattttactgaatcagcaccaggcgatgcaaaccagtcggttcacattgttgctgatgagggtttggaggcgtatctacctttggctgatatggttgacgtgtctgaagaggttaagcggctctccaagcgcctctccaagatgcagtcggagtatgatgctcttgttgcccgactcaattccccaagttttgttgaaaaggcccctgaagatattgttcgcggagttcgtgaaaaagcgtctgaggcagacgagaagatctctctaactaaaaatcgtctcacttttctgcaatcaaccattaccacttaaatacagtaatccacggggactctaccaggatgccattttgatcgatgacgcaggagaaaactgattgttaatagtttttggttgaaggatatgatagattggcaacgaagttgtgccttgtccagcagaaacacacattctttctagttcatatctgttgtctcttgaaacttaaaacatacattcggctaggcatataatttatattcctgacttatggttttagagcctttcgggatgcccttagttgaggtaaattttgttctgcctctgaagttgtgctgatgccattgttagtaatattcatattttgtaaggtgggcgcacgttattagatatgaatgatctgtaaggtcggtgcacatgt

SEQ ID NO: 441 - DNA, 1279 bp, Zea mays
  Clone ID: 700075169_FLI
gcacgcaacactgtctcgctcctcccctcttctacctcgatccatcacctttgcatagcatatatagcgcagcagctcactgcaggcagacgaaacaccatctcatcacatcacatcagagcagagcagagcagagcatcacccgatcccgatcccgctattcccagcctgcagtagcagcagcagtcgcgccgccctgcccatcgatccatctggctatcatacctgtcgacatggaaggcggactgagcccggagcggcacgcggcggctgagccggtgcggtcgcggtggacgcccaagccggagcagatactcatcctcgagtccatcttcaacagcggcatggtgaacccgcccaaggacgagacggtccgcatccgcaagctgctggagcgcttcggcgccgtgggcgacgccaacgtcttctactggttccagaaccgccgctcccgctcccgccgccgccgtcgtgcgaggggatgatgggcgacctggactactacggcggcgacgacctgttcgccatctcgcggcagatgggctacgccagcggcggtggctccggctccgcgtcctcggcggccgtcgcacaccacgagcagcagcaccagctttactactcgccgtgccagccagcgagcatgacggtgttcatcaatggcgtggcgacggaggtgccgcgggggccgatcgacctgcggtccatgttcgggcaggacgtgatgctggtgcactccaccgccggcctcctccccgtcaacgagtacggcgtgctcacgcagagcctgcagatgggcgagagctacttcctggtcacgaggggctactaggtagctagctatagcacattgcattgccgacatggagaccccagagctagctgatgcagtacacgtactcctccttaccatgcatggaattggatgttattcggatcgtcggagacgcatgcatgcattgcatgctgcagtacctagtatctctgtctctgtgtacgtgttcttcagtgaatgtctgtcagctcttgccgtccgtccgtccgtccggtgtagatcagaaaaaggaggcaaagaattcgataccagcagtgtgtgtgtgtgtgtttactatatatatatataaagagagagacacacacaaacaaatagagtgttgtacctacgacgcatccacatcgaacatctataccaagtatgtatgtaatgatgaatcatatgatgagtagtcgcaccattgcacgcatttgctttaatgaacctgaatgcaatgcatgttgc

SEQ ID NO: 442 - DNA, 1977 bp, Zea mays
  Clone ID: 700075182_FLI
acgcgcaccgccagccgatacgaatccgacgagctcgatcgctccacttccccgatcgcacgccaatcagcaccagccaccgtggcgatgacggaggaggcggaggcgaaggcgaagggcaacgcggcgttcgcggccggccgtttcgaggaggctgtccagcacttcagcgacgccatcgcgctcgcgcccgacaaccacgtcctctactccaaccgctcggcggcgtacgcgtcgctctggcgctacgcggaggcgctagatgacgccaagcggaccgtggcgctgaagccggactgggccaagggctactcccgcctcggcgccgcgcaccttggcctcggtgacgcgcccaaggccgtcgaggcctacgagaaagggcttgcgctcgagccgtccaatgaggcgctcaaatccggcctcgcacaggcgcgccagtccgcatcggcgccgagacgtccggtgggctccggggctgacgccgttggcaagatgttccagggccctgagctatggagcaaggtcgcggccgatcccaccacgcgtggctacctcgaccagccggacttcgtgcagatgctgcgggaggtgcagcgaaaccccggcagactgaacagctacctttctgaccaacgaatggttcaggtgctcaccctcatgctgaacatcaagttccagaaccagagcagtggggcgcctgacccggcagcagcacaatcgaacccgccgccaccaaagcagcagccagaggcgaaggcaagagaaccagagccggacccggagcccgagcctatggaggtgacagaggaggataaggagcagaaggagaggaaagcgtcggcgcagaaggagaaggaagcaggcaacgccgcttacaaaaggaaggattttgataccgcgatccagcactacacagaagccatggagctcgatgacgaggatatctcctacatcaccaatcgtgctgctgtttaccttgagatgggaaagtatgatgaatgcattaaggactgtgataaggctgtcgagagaggaagggaactgcatgctgatttcaagatgatctcaagggcacttaccagaaaaggaactgctcttgccaaacttgctaaatcatcgcaagactatgatgctgccattgagattttccagaaggcgttaactgagcaccggaacccagatacactgaaaaaactaaatgatgcagaacgagcaaagaaggagctggagcaacaagagtactatgacccaagaattgctgacgaggagcgagaaaaaggtaatgagttctttaagcagcagaaatatccagaagcagtgaaacattacaccgaagctctcaggagaaaccccaaggaccccagggtatacagcaatagggctgcctgttacaccaagctaggggcccttcctgaaggtctgaaagatgctgagaagtgcattgagctagatcccacattctccaagggatacacaaggaaaggtgctatccagtttttcatgaaagaatatgacaaagcgctggaaacttatcaagctggcctaaagcatgacccgaaaaaccaggagttacttgatggtgtaaggaggtgtgttgaacagatcaacaaggcgagcagaggcgaactcagtgaggaggaactgaaagagagacagaacaaagccatgcaagaccctgagatccagaacatcctgactgatccgatcatgcagcaggttttgacggatctgcaggagaaccctcgggctgcgcaggcgcacctcaagaaccccggagtgatgcagaagatccagaagctcgtcagcgcagggatagttcagatgaagtagacggtggctggaatgtccgggttcagatctgggacctgtgctggaaatgctgtgaacttgatcattgtttcgcattttggaaactgaacccttttgtgcgaccatagtttggtcatggctgttaatgatccatatatgggttttccc

SEQ ID NO: 443 - DNA, 681 bp, Zea mays
  Clone ID: 700075276_FLI
ctctggcactgttcttgtctggatacagcaaaatgtcgcttggtctcttggattcggcatctcctcgatatgccttgttatcgccgcagttgcctttttggttggaacaccgctttacagggttcaacttccaactgggagtccactcaagagtatagtcatggtgtttgttgcctcttataagaagagaagagtggcggttcctgctgatagcacactgttgtttgaagggaatgacgctgaatcaagcagcatagtgccgaacaaaattgaacacactgatgaattcaggtgcttagataaggctgctgtcgttgtagaggaccaagagatgaaggacagccatcgcccatggctactatgtacggtaacccaggtggaggaagtgaagattctgatccggatgcttccgatatggttcacctgtgtcttctattcggctgcaatgagccagactgctaccactttcgtccagcaggggaacgcgatgaacactaagatcgggtccttctcggtgccggcggcctctatgaactccgccgaggtgatcttcatgctcgtctgggttgtgttccaggacagcgtcgtcatcccgatagccaggaggtacacggggaacccgatggggctgacgctgctgcagcggatgggcgtcgggcggttgctggcgatcccgtctct

SEQ ID NO: 444 - DNA, 1393 bp, Zea mays
  Clone ID: 700075316_FLI
ctcgacgacacaccgatcaggcgcgccgaagcagcgtccgcagccgacggtcatctcccggcgccggtcgcggccatgtcgaagaagaaggcggtcacgacgatgacgctcaaagacttccacggcggctccatcccctccgagctcccgctcccctccgcccccggcgtcaccccgcgccccgcggatcgcaccgtcgcctccgcatcccccgtcgcagccgcggtcgcacggccacgcgtaccggtcgcttcgcctgccgccgctgcggcggcagccgcgatgccttccttcctcacaaacccgtcccgaatcggccgtcacttcgacgaggacgagcgcacccccttcgagcccaccacgccacgccgtcccgcgccgtccccaacgtcgttcgcacccgctcccgtggtggcgcccaccagatcaggtccggggaacgcatggggcccgaagaaggaggcctcttcggcgccttcccctgtgggtcatgctcctgcctccgccggcgaccagatctggtccgcgacacgcatcgcccaggcgagcgcagtggagaaggtaatctccggaagatggcacccgccgaagcccacgtctccgccggcgccggtgtcagttccggtgttggagactcccgtggccccgccagagattgagaggcctaggtccgttggggtgagagagctggatagtggggtggagaggggcgccgcaccagtgagacccgcgtcacatgaaggaaggattggggaagggagagctggggaggtgccagagagacccaagttgaagctgcttcctcggtccaagccaattgaggatcctgaacagcgtcctacctatgtcgaagcgaagcaggtgcaccaggtccaggttactgctggcctcatgaaggctgaggataaccatgatctgcaccagaatgcaagggctactgaaacaggagttttgggagcagatgctgagagcagggtagcagagcgaccacggctgaatctgaagcctcgttcctatgtaacaggacagtctgatgaaattgctgtcaaggaaaggccatctctctttggtggtgctcgccccagggaacaagttctcaaagaacgtggagtggatgttttggccagtgatctcgagaagacttcaccagttggcaggttgttatatgttgtgatgcatcatgttaacattgatagatgcatttcagttgtggcagggcataagttcttatttatttattggatcttgatatcaaagggggttagagcatcttcaagagttcctaaaaagacaattggtaaatcaatgaattctctatgtggttaaaaaaagttgggttcctccaattgtttccaaaaatctttcttttaagagatataaggaatttttttgt

SEQ ID NO: 445 - DNA, 1090 bp, Zea mays
  Clone ID: 700075339_FLI
ctatagccctgcagttagtagcatctcgtttcagagctcagaggagggaggaggaagaagaagcagcagcaaggcatggattgctgcatctgcagccccgtggcgtccgtgtacaggctgccaaggaacgccatctgcgctccctgccaccaaggcgccaaggccatcatcggttacctcgacagggatggtgagcgggaagaggacgacggcggtggccgttctgtccagctccagcctcgcggctcggccaaggggctgagagatgcgtgggagcaggtgaaggagatgagagccagggaggaggagaccaggcagagagctgccttcctccagcacggcttcgcgtcggcgtggaaggagggaatccacaccgacatcgtcgtcaaacctggcaccggtcccgcgattccagcccacaaggccatcctggccgcgcggtcggaggtgttccggcacatgctgtccggcgacgaccgctgcaaggcccccgccggcggctccatctcgctcccggagctctcccacgacgacctgtccctcctgctcgccttcctctacacaggcgctctggaggcgccaggagaaggaggaggagaggccagccaggaccaggagcggcagctgcacgcgctcctcgtcgcggccgacaagtacgatgtgccgttcctgaggcgggtctgcgaggcgcggctggcggcgggcgtggcgccccggaacgcgctgcggacgcttgaggtcgccgagctgagctccagcgccgcgctcatggagcgcgccatgggcgccgtcgtggagcacgccgaggaggtcgtgttctcggcggaatacgagcggttcgccgcacggaacgcggggctgtgcgtcgagatcacccgcgcgctgctggccaggatgccgacgccggcgaggagtgatggcccgtgcttagagcttggaagcagctagctgatgcatgcagttgtattgtatcagatgatgatggatcggaaagaatactactcttgttccagtttcgagtcacgacaatatgtaattgtaaacgcataagttcttctgaaacacgggcgagcacgatgagctagactgc

SEQ ID NO: 446 - DNA, 1675 bp, Zea mays
  Clone ID: 700075354_FLI
ggtggccggacggtggtggcatcgccaattcaactccgcatctgaatcggcactcggcagcgcgccagctccatagtgtaggaggagatggcgctcacaagaatcggtcttgctggccttgcggtcatggggcagaaccttgccctcaacattgcagagaaagggttccccatctctgtgtacaacaggacaacctccaaggtggacgagaccgtgcagcgtgccaaggcagaaggaaaccttcccgtctacggcttccatgaccccgcgtcctttgtgaagtccattcagaagccacgggtggtgatcatgctcgtcaaggccggcgcgccagttgaccagaccatcgcgacgctcgcagctcacttggagcagggcgactgcatcatcgatggggggaacgagtggtacgagaacacggagaggagggagaaggccatggaggagcgcggcctcctgtatcttggcatgggtgtctctggaggagaggagggtgcccgcaacggcccgtccttgatgcccggaggctcgttcgaggcttacaagtacgtcgaagacattgtcctcaaggtggctgctcaggtccctgacagtggcccgtgtgtcacgtacattggcaaaggtggatcgggcaactttgtcaagatggttcacaacggaatcgagtatggcgatatgcagctgatttccgaggcatacgacgttctcaagtcggtcggtaagctcaccaacagtgagctgcaccaggtgttctccgagtggaacaagggcgagctcctgagcttcttgatcgagatcacggccgacatctttggcatcaaggacgagcatggcgatggctacctggtggacaaggtccttgacaagaccgggatgaaagggacagggaagtggacggtgcagcaggccgccgagctgtcggtggccgctcctacgatcgaggcgtccttggactcgaggttcctgagcgggctgaaggacgagcgggtggaggcctccaagatcttccagggtgactactactccaccggctcgccggtggacaaggcgcagctggtggaggacgtgaggcaggccctgtacgcgtccaagatctgcagctacgcgcagggcatgaacatcatcaaggccaagagcgcggagaaaggctgggggctcaacctcggcgagctggccaggatctggaagggcgggtgcatcatccgcgccatcttcctggaccgcatcaagaaggcctacgacaggaacccgggcctcgccagcctgctcgtagaccccgagttcgcgcaggagatcatggacaggcaggcggcgtggcgcagggtggtgtgcctcgccatcaacaacggcgtcagcaccccgggaatgtccgctagcctggcctacttcgactcctaccgcagggacaggctgcctgccaacctggtgcaggcccagagggactacttcggggctcacacctacgagagggtcgacatgcctggctctttccacaccgagtggttcaagattgcgcgcaacatctccaacaactgatgagctgctcaacggatggcatgcccggtgttgactactccagtcggtaatgagatttcctgcaggaacttgtctattgatctttgtaagttaattatttatatgaataaaataagagcagacatgcttgtgtttgggc

SEQ ID NO: 447 - DNA, 1709 bp, Zea mays
  Clone ID: 700075357_FLI
tgcaactattgctgctgtcggtgaaaataaaaatagtggtcctgagtcagttgtcatgagacctacaaagtcacaattgggtgatgaaaacatgaacagcgaacacaatggttttgttggtgttagaaaagatgcagtgcaaactggcattgtatcacacaatttagatggttcaattaggagggatgggaatactgaccaggcaggcaattcacatggcccacttgtgcagggaggcaaagatcacaaggcttcagatgcatctactgatcatgagaaaggacgactgtttcaacaggcatcactgcaaaatgcaggggcaccgggctcttatgtgcccccaggtgtggtaccacatccatctggaccagataaaatgcttcctcagcatatgacgaatcatggtcatatgcatggtttctctgaaaatatccgtcctccgctgcaacaaccatatggtgtgtttcattctggaacgataacaaggccatttggagagaaccagattcagatgccaatgccacagcctgggggtatcagacctggtgatggtatgattcgtccttgtttggttggcccattacctggacatcatggtgcagtgttgccttcttttgatcttgaacgtttgggtcagccacgtcctcttggaatgttgaacagcaatgactttggtggtgaggggttcaacgcttcagggggtgcagcgtatcctgaaagacatgataataccgaagacagtcggaaacattttccagcaccagcccctctagatgatcagggcttgcgaagggaccctagacattttgagagagctttaggtagacctgatggtttccttgattcagtacctggaaggcctccatttgcaaaccacagaagtgcaggtttgcatgaggattttccaagaaagcaaaatgcaactgccagtcaccctgacttcctgtcacatggagcagaatttgatcatcacagggctattggaatgcctaatttcagaaatccaggcccatttgctcaagggacaagtggcggtcctggtggccctcctaaacaccagcttggctctggtgacatgcatccaggtgaccctcatcttgtcgctgaatatgctcagcatggatttcctaaaactgcagcacactttggtttgggtggattcttgagaaacgggaattctggttggtgccgaatatgcatgtttaactgtgggagtgcagagaatctggatttgcatgtacaaacaagggaacatcagcaatgtgcaatggacattgtcctgaaaatgaagcaagatgttgcaaaaaggcaaaaactgaattatggagggcccaagtcattcaacaacaaaaaggtttctgggaagggccattttcgtgggaacaggcgctagtgttaactgattaaaattgatgtggttttgaaggttgctactggtgcttatggatgtgtcaatggcaatcgagaattgagatcttttcagacattctgttcatgcggttcagcgtatttgaagggaaacttgtaatggtcccaaacttttgttccatgttgatctgcagagttcacatggctatgtttacttcacgtatttttgccgaagttgttctgggattgcttaacatgctaatatccttcttctgtacgtgctgatttataactcctgtttctttcaactaggctcatgctttttctaatggcgacctaat

SEQ ID NO: 448 - DNA, 2112 bp, Zea mays
  Clone ID: 700075364_FLI
cacattattcttcctccaccatctcttgagtcgcctggccggcggcttggtttccctctagagctcaacagcagctagctgtgtagcctagaggtttaaccatcagcggagcacatcgccatggcgatctcctctgctcttccgtgctccctcctcgtggcggccctgatgctcctcgcctccgtcgtccaagtgcaaggcatcacgaggcgctacgacttcaatgtaaccatggcgaacgtgacacggctgtgcgccagcaagagcatcatcacggtgaacgggcagttccccggacccaagatcgtggcgagggaaggcgaccggctcgtcatccgcgtcaccaaccacgcccagcacaacatctcgctgcactggcacggcatccggcagctgcgcacggggtgggcggacgggccggcgtacatcacgcagtgcccgatccagacggggcagagctacgtgtacaactacaccgtggtggggcagcgcggcacgctgtggtggcacgcgcacatctcctggctgcgcgccaccgtctacgggcccctcgtcatcctgcccaagctcggcgtcccctacccgttcccggcgccctacaaggaggtccccgtcatcttcggtgagtggtggctggcggacacggaggtggtgatcaagcaggcgcttcagctcggcgctggccccaatgtctctgacgcccacaccatcaacggcctgccagggccgctctacaactgctctgccaaagacacgtacaagctgaaggtgaagcccgggaagacgtacatgctgcgcctcatcaacgcggcgctcaacgacgagctcttcttctccgtcgccaaccactcgctcacggtcgtcgaggtcgacgccgtctacgtcaagcccttcaccgtcgacacgctgctcatcgcgccgggccagaccaccaacgtgctgctcgccgccaagccgtcctacccgggcgccaactactacatgtccgccgcgccctactccaccgccaggccggccaccttcgacaacaccaccgtcgccggcatcctcgagtacgagatgtaccccgacgcgccccggccctccgcggggagcttcaacaaggccctgccgctctacagacccaccctgccgcagctcaacgacaccagcttcgtcggcaacttcacggccaagctccgcagcctcgcgacgccgcggtacccggcggccgtgccgcggacggtggacaggcggttcttcttcgcggtcgggctcggcacgcacccgtgccccgccaacgccacgtgccagggccccaccaacaccacgcagttcgcggcgtccgtcaacaacgtctccttcgtgctccccaccaaggcgctgctgcactcgcacttcaccggcctgtccagcggcgtctactcgccggacttccccgtcgcgcccctggcgccgttcaactacacggggacgccgcccaacaacaccaacgtggccagcgggaccaagctcatggtcgtcccgtacggcgccaacgtggagctcgtcatgcagggcaccagcatcctcggcgtcgagagccacccgctgcacctgcacggcttcaacttcttcgtggtcggccaagggtacggcaactacgacccggtcaatgacccgcccaagttcaacctcgtcgaccccgtcgagcgcaacaccgtcggcgtgccggccggcggatgggtggccatccgcttcctcgccgacaaccccggggtctggttcatgcattgccatttggaggcgcacacaacatggggcctcaggatggcatggttggtgctcgacggcagcctcccgcaccagaagctgctcccgccgccgtccgacttacccaaatgttgattagactcttcctccatctctatcctgccggtcgcttcaaattaaagggaattgtgaattagacatgtttgttttttttgtttactttcttcattgccaattgcaatttttttcaacttgcattttaactagtccgttccgttcctagctgacctggactttttgtaatttttttcttccatttgtttgccaccacaaatgtttttgtacactcttctgaaaataaagaatggcgtgacttgcacc

SEQ ID NO: 449 - DNA, 1334 bp, Zea mays
  Clone ID: 700075370_FLI
cttgccagagtgctctccctgctgaggagtgcagatgcaacgtgtgcgctagcaggaatggtttttgcaacctgtgcatgtgtgtcatctgcaacaagtttgatttgaggtcaatacatgccgttggattggctgtgatttttgctctcactggacacatacagattgtgcaattcacaatggccagatcggaatgggacaatcagtgaaaagcagcattggtcatgctgaaatgctttttaggtgccgagcttgccagaggacctcagagctgctgggttgggttaaggatgtcttccaacaatgcgctcctggttgggatagggatgctttgttacgcgagcttgagttcgtttgtaagatattccgtttaagtgaggatgcaaaagggagagtgttgttcaggaaatgtctagatctgattgaaaggctgaggaacactccagctgattccatcaatcctaggatgatactacaagcactccaagagcttgagatggactcccccaagatctctgaaaatgaagatgttgggcatctgatcacaccccaggaagcctgcaaccgcatagcagaggtagtccaagaggccgtgagaaagatggagctcgtggcagaagaaaagatgcgactttacaagaaggctcgcctcgccgtggaggcctgcgaccgagagctggaggagaaggttagggaagcccaggagctgaaggcagagcgtcagcgcaagaagcagcaggtggaggagctggagagcatcgtgcggttgaagcaggcggaagcggagatgttccagctgaaggcgaacgaggcccggcaggaggcggagcgtctgcagagcattgcgctcaccaagtccaagacagccgagcaggactatgccagcatgtacctaaagcggcgcctggaggaggcggaggcagagaagcagttcctcttcgagaagatcaagctgcaggagaatcagaggccaacggtcggcgtgggcagcagcagcggtgcgggaggggactccacgccgacgatgatgctatccaagattcaggatctgctcaagaacgtccgcagcatgccagcaaagtcggagggtcactagtcggagtaagagctttcgctgctgacactttcggtaattatgtgtgatctgctgacttgttcgagcagaggtgtaacgaaatcgtgtggtgctgtgagaaattcgaatcccttcgcgttactgtcggtactcgctaggcgtgctgatgtattaactctgttgtcgcaggtgatcatagtgtgcttgaaacaatgttaaagttacatcggtagacacgaaacaaccaacagttgtggcc

SEQ ID NO: 450 - DNA, 2085 bp, Zea mays
  Clone ID: 700075375_FLI
gagaagctggctttgctcgaagctgagaatgaaaagttgactggtgtgaacgagacattaaaagacgaagtggatgctaagctggccatgtttgatgagcttcaggaacggtttagctctactcatgctgagaaggaagaagttgcagagaaggtagctgttcatgagaggacaatctcacacctgacagaggaacacacaagaaccttggagctccattctgtagctgaatcaaagaacggagaaattgaagctcagctccgtgaggctcttgagacaatagcacagaaagaaggtgaagctaaagaattgtgtaagaagctggatgcccttgaaattgagttgggatattatgaggagcaggcaactgaagctgctgctgctgaagagaatcataaggttaaatttgatgaagcttcacagaagataaaaatcttggaggaacaacttgcagagacacagagcaagttggagcatttccttatagagaaggaaagcttgactcaaacaaatagtactttgaatgaggagttggaagtacatcagaacaagttgaacgatttacaacttgcacttgctgctgcagtagcagaaaaggaggaggcatctgaagagattcattcgctgcataaaacgctcgatggaatgattgagcacaaagcagaattagaaatacaggtatcttctactatacaagagcatgaagaactgaagagcaagtaccaaaatacaatggaagagaaacatgcgttgagtgataaatatgaaaccgcaaagaaagagctcgaggatgcaatagccaagttggaggaggaaatgaatgtagacaagtcagaaaaagagtctcacatctcaaaactggagcgacagattacattatctgagataaagtacatggaggagataaagaccatgcaagtggagacaactgaaaagaatgaagcactaacagccaagatgcaggaacacacagacctacagcatgagaaagatgagttggaacaacagttgctggaagtgaggaaggaattggatggtgcctaccacaccatagcaaatcaggaagaacaggcttctgtgagggagataaagtgggacgcttttaggaagtacacggaggatcgtctggaagctgagcagcagcgtgctgaggagctggaactacaagtagcagctcttaaacaacagctccaagaagctgagatccattataagcaaaaggaagaacaagtttctctaagggaggttcaatgggaagcggatcaaaaccattcgctggatgagcttaacgctcagcgtcagtatgccacagacttggagaaacaaatcgaagatctgacacagaagttaacatcagctgatgcacactacaagcagaaggtgacagaagagagggacaaacttgttgaggtcaccaaagagttgagcgagttgacacaaaaagtaagcgagagtgttgaattggagaggaaggtgcaggaccttgagcagaagctgcagctagcttattccaagtgtgacgaacaggcagtggatactgtggagtcgagatcccgtgaattcagcctggattcatcaacgacttcaggcaagcagcaagacaaaactcaggctgtctcaccaaacccaaccctgcaaggagtgcaagaaccttccggcatcatggccttcaagttcatcctgggagttgccctgctgtctgtcctaatcggcgtgtttcttgggaagcggtactagcgctcaggtcgtgctgaaagggctcagccagcggcaagtttgaaaggattggtggccttgatggtaatggttcgacgactttctgggagaagggctcatcggcgtgtttctttttgccgtaattttcacttttcgggtaagggggggccaaggaatttgatttttgatcattcctaccctttcatgcaaatggccaactgcatgcgactggttttgcctacagcaagtttccgtatacatttcttgtccgtaaagatcacaagtccagcgacgaaacatgaagcatttgctactatatgtctgtctatatgctcgtatggagagagtgcaagttttgctaccttgtac

SEQ ID NO: 451 - DNA, 1354 bp, Zea mays
  Clone ID: 700075440_FLI
cgcaaggaagcttggaagttggttccctctgcaccacttttcgagtctgaaacacactttccagctctcctccgacaaagactcagaccgccggcggcatgctcctcctcgacggcgaccttgtcctctcctcctccggaagcaccggcgctgcctctcgcacgagcgacagcgggagggagctcgtggcggcgctcttggagagccccgggatccgccacgcggtcgaccggctgaaggtcgcgccggagaggcggatctcggcagggcaggagggggcgccgaagcacgtctacgtgttccagcgggagtacgccacggtggatccggcgcgcgtcgagttagttggcacagatgaggctactacatgcattggtgttgtaattcgcaacaacaagactggaatgacctctgttagccatatggattttccagaaattgtggagggagggatcaagcagatgttagaattacttggtgatgacaatgcaccatttgatgttcaccttattggtggctttgctgatgcttccacaaaggttgttcgttcctctggaaagaaacacatcaaacaggaagggtattcctatccactatgttgcaaaatagttgaagtgctgcataagtcccagctacaattccaccttcgatcattttgtgtccttgagaataacacgaagagtgactcatttggaaatgcgctacctataattggtggatttgtggttgaaacctcatctggagttgtgataccagcaacctttgatatggattcaaggtgcccagatgaagttgtcaggagaattcgtgtgagcgttagctcttatgatccaacttggcaaggaaggttgctggagacttacgatactcaggacgatgttttccaaattgcacctgcctgctggatgccagattgggccgatatagcgtcctcactcaaccagctctcggactccgaagtcctgctgcggtgctccacctctccagccgcagaaccacctcacttcgtggaaaacgaaagaaggatctggaaatacctgatcgataacccggactgggaagagacgttcccaaaacacaagccccgggtgttccatagggccagtgccggaagctggtcaaggtactcgtagtgcaagccaagggcttccatcgtctgctgttatcgtcggtgctcccacacatggaacgaaccagaagggaaccccccccccctcctctccgttgatttgaacagtggcatattgagtttgagtgcaaagttttctgcgcactgcgattagcacatccgtggacgcttggagatgggagtaaattttataaagactgggccgaaaaggatgagcgattcctc

SEQ ID NO: 452 - DNA, 3057 bp, Zea mays
  Clone ID: 700075455_FLI
cccacgtctctcccatcccatccccgtgtagatttcaaatccgcgtcagagctcaggtctgggtctcctccttcgccgccagttgcctcctccagtcgagatccgccgtcggggagaccactgaccatggaggccatggaggagctatcggagctcgccgagtcgatgcgccaggcggcgtcactcctcgccgacgacgacccctccgacgacgccgcgccgcgtcgccccaccaccttcctcaacgccgtcgccctcggcaacgtcggcgctggcaagtcggccgtgctgaacagcctcatcggccacccggtcttgccgacgggggagaacggggcgacgcgggcgccgatagtggttgacctgcagagggagccggggctcagcagcaagtccatcgtgctgcagatcgacagcaagtcgcagcaggtttccgcaagtgctctccggcattcactgcaggacagactcagcaggggagcatctggtggatcagggaggggccgtgttgatgagatttacctcaaactgcggaccagtacagctccctcattaaagctgattgatttacctgggatagaccagcgagctgttgatgattccatgatcaatgagtatgctgggcacaatgatgcaatactgctcattgtcatacccgcaatgcaagctgctgatgttgcatcatctcgagctctgaggttggccaaggatatcgatgcagatgggacaagaacagttggtgttataagcaaagttgatcaagcaaatggagatgcaaaaactatagcctgtgttcaggccctactgtcaaacaagggcccaaaaaaccttcctgacattgagtgggttgctctaattggacaatctgttgcaattgcgtcagcacaatcagttgggtctgaaaactcactagaaacagcctggagagctgaagctgaaagcctgaaaaacatcttaactggatctcctcagaataagcttggtagaattgctttggttgacacaattgctaagcaaatccgtaaaagaatgaaagtgcgggttcctaacctattgagtggacttcagggtaagtctcaaatggtgcaagatgaactggcaaggctgggagaatctatggtacaaagtgccgaaggaacccgagcagttgctttggagctgtgccgagaatttgaggacaagtttcttgctcacataacatctggtgagggatctggatggaaaattgttgcaagttttgaaggcaagtttccagacagaattaaacagctaccgttggaccgacatttcgatctcaacaacgtcaaaaggattgtcttggaagcagatggttatcaaccatatttgatatctccagagaaagggttgagatccttaataaaaatagtactggaaatggcaaaggagccatcacgactatgtgttgaagaggttcatcgtgtattgttagacatagtcaatgcttccgcaaatgccacaccaggacttgggagatatcctccattcaagcgtgaggttgttgcaatagcatcaaatgcattggagaccttcaaaaacgacgccaaaaagatggtcgttgcgcttgttgatatggaacgtgcttttgttcctccccaacatttcatccgcttagtacaaagaagaatggaaagacagcgtcgggaggatgaattgagaaatcgatcttctaagaaaacacaagaagctgaacagccaacatctaagagggcctcaagtccccaaacagatgctgagcaaggtggtggcagcttaaaatcaatgaaagacaaatctggccagcaagataaagacacaaaagagggatcaaatttgcaagttgctggtcctgctggtgaaattactgcaggttaccttttaaagaaaagcgcaaaaactaatgggtggagcaaaagatggtttgttcttaatgagaagagtggaaagcttgggtacacaaagaaacaagaggagagacattttcgtggtgtcatcactcttgaggagtgcaaccttgaggaggtagaggaggaagagccttctaaaagttcaaaggactcaaaaaaggcaaatggatcagaaaaaatctcaagtcttgtatttaagattactaatagggttgcatacaaaacggtcctcaaagctcacagtgctgttgtgttaaaggctgagagcatggccgacaaggttgagtgggtaaataagatcaaagctgttattcagagcaaagggggttctttcaagggtccaagtactgagggtagttcaatgaggcaaagcaattcggatggcgctttagatactatggcacgtagacctgctgatcctgaagaagaacttagatggatgtctcaagaagttcgtggttatgtcgaggctgttttgaatagtctggcagcaaatgttccaaaggctattgtgctttgtcaagtggagaaagcaaaggaagacatgcttaaccagctatacagctcgataagcgggcaaagcaatgctaagattgaagagctgcttcaagaggaccataatgctaagcgcagaagggagaagtaccaaaaacaatcatctctcctgtcaaaacttactcgtcaactcagtatccatgataacagggcatctgtttcctcttattctaatgacaccactgaagccgagagccctcgaacaccaacccgctcaggtgaggactggaggtcagcttttgattccgcttcaaatggtcctgttgctggaagcacaaacagtcaatcaaggtccaaaagtgctgacggtcgcagtcggcgctatgagaacggggacgtgagctcaggtgccaactctggcagccggcgcacaccaaaccggttgccaccagcaccgccaaaatactaatcgtgctgattggtattcatgaacatttatgtattcttgcctggcacatgcgcccagatcggctgctagagattgtggtgtagtggatggagtatcgggtgattgcgtgaacattgtgttcgcaggtcgctgcgtctcagatgagctgtttatagaaaaatatacaggtaaccgtggtttctactgttt

SEQ ID NO: 453 - DNA, 866 bp, Zea mays
  Clone ID: 700075490_FLI
gcgagttctgtgcctgtgcctctgctccacctcccctgcccctgcgccccaagtccacgtccaccactcagcactcacgctgctcgctcgctcgctcgtacacgcgcccgcttcgcgcagggaaggaaccgtgggagggaagcggacggacatgatgcacgccaagtcggagtcggacgtgacgagcctggcggcgtcgtcgccgcctcggtcgccgaagcggggcggcggcggcgccggcaacggcggctactacgtgcagagcccgtcgcgggagtcgcacgacggcggctacaagtcctcgtcgatgcagcccacgccggtctacaacagccccaacgagtcgccgtcgcacccctcctacggccgccactcccgctcctcctccgtcagccgcttctccggcaacctccgcaagggcgccgccggggaccgcaaggtgctcaacgacaaggggtggcccgagtgcaacgtcatcgaggaggagggcccgtacgaggacctcgccggcgatagcggcctctcccgccgctgccagatcatactcggcttcctcaccttcgtcctcctcttcaccgtcttctgcctcatcatctggggcgccgcccggccgtacgagcccgaggtcatcgtcaagagcttggtgatggacgacttctacgcgggtgaaggcacggaccacagcggcgttccaacaaaattggtcacaacaaactgttctctgcacatagctgtctacaaccctgccacaatgtttggaattcatgtcacttctggccccatccacctgatgtattcagagatcccaatagcagtcggtcaggtatatccatcctccgtccttggcctatttaatagccgctttt

SEQ ID NO: 454 - DNA, 1126 bp, Zea mays
  Clone ID: 700075601_FLI
ctgggggttcaaaaaaacaaattagatagagctcgccgagcaagcaagcaagccaactcggccgtccgaacgaaagcgaagcgcggccaaactcactcgctaaacgctcccgttctcctccgcctgcccccaccggctccccttgtacacgagcgccggagacgccatggcggcggcgcagccgaagccggccaagaggctgggcggcatggcggaggcgctcgccatcgccgccgacctcggattccccgcctctaccacgcaggaagatcagactagctccgacaaaagcgatgatttggtgaaggttttgagggaactgactgtcgtgcagaggaacattgccaacttgcaagtggagctacagggaagaaaggatgataaaaacattgctcatttgactcatgtgagtgagatggaaaagaagtgcgagtctttggccagaatgactgcaattttgaaagatgtaattcagaacaaggatcgtattattgctcggctgcaacagccttattcccttgactgcataccagttgaagctgaataccagaaacaattctcggagctacttctgaaagcagcaagtgactatggggcattgacagcatcagtcggcgatttccagtggagccaaaactttagggaatcaccagctgtctggggggaaatgctgcgaccgattcctgctgcacttgcttcctgcacccggttcttcgaggcaatgtctgcgatgagggaatccttttctactcttcagaaactacgcgttggccattcctctctgtcaataaccccaagtgactccagcgacgattcaaagttcttgacgccacctcagtggagagacggctcgatactcgatagctggaagcaaatggatgacatcaacctggagagcagtggaattgacgccatgaatcagaggaggttgtcttggccctccatcaagagggacccgtaggtcgcaggtcacccattggatttaggttcccatgttacataaataggattccaccttgtgtagttggcattgattctctgtatttttaatccgatcacctgcacccatttggcatgttcgacttgtgagagatggtctataagttccttaaatcaatgtcgtggc

SEQ ID NO: 455 - DNA, 1614 bp, Zea mays
  Clone ID: 700075606_FLI
ggaagaagggcctcctgtctcctctcacttcctcagtcctcgtccgtctctgctccctcctctctctacctagcaagctagccagccttcctgtagcgcggcagagatggctgcccctgcctccaccacggcggcggcggcggcggcgctgctgctgctgctgctcgtgtcgctcgccgcggcggcggacatgtcgatcgtgtcctacggggagcgcagcgacgaggaggcgcggcggatgtacgcggagtggatggcggcgcacggccggacctacaacgccgtcggcgaggaggagcggcggtaccaggtgttccgggacaacctccgctacatcgacgcgcacaacgccgccgccgacgcgggcgtccactccttccgcctcggcctcaaccgcttcgccgacctcaccaacgacgagtaccgcgccacctacctcggcgccaggaccaggccgcagagggagaggaagctcggcgccaggtaccacgccgccgacaacgaggacctgccggagtccgtcgactggagggccaagggcgccgtcgccgaggtcaaggaccagggcagctgcgggagctgttgggctttctcaacaatagcagctgtggaaggcatcaaccagattgttacaggcgacttgatctccttatctgagcaagagcttgtcgactgtgatacttcgtacaatcaggggtgcaatggaggtctgatggactatgcgtttgagttcatcatcaacaatggcggaatcgacaccgagaaggattacccttacaagggcacggacggacggtgtgatgtcaacaggaaaaacgcgaaggttgtcactattgacagctacgaagatataccagcgaacgatgagaagagtctgcagaaggcagttgcaaaccagcctgtcagtgtcgcaattgaggctgctggcacagcatttcagctctacagctcgggtatcttcactggaagctgtggaacagcgctggaccatggtgtcacggccgtcggctacggcacagagaacggcaaggactactggatcgtgaagaactcatggggcagcagctggggcgagtccgggtacgtgaggatggagcgcaacatcaaggcgtccagcggcaagtgcggtatcgcggttgagccgtcatacccgttgaaggagggcgccaacccgccgaaccctggccccagcccgccgtccccgaccccggcgcccgccgtgtgcgacaactactactcgtgccctgacagcaccacctgctgctgcatctacgagtacggcaagtactgcttcgcctggggctgctgcccgctcgagggcgccacctgctgcgacgatcactacagctgctgcccccatgactaccccatctgcaacgtcaggcagggaacctgcctcatgggcaaggacagcccactgctttcagtgaaggctacgaagcgaaccctggccaagccgcactgggctttctccggcaacacagctgacggaatgaagagcagcgcatgagaaaacgcagcgtggcattaggtcgtcagcagcctgggtgatcgattagagcccctgcgtgggaaatggtcacctggccccctgattgacgacggaagcatggc

SEQ ID NO: 456 - DNA, 410 bp, Zea mays
  Clone ID: 700075612_FLI
actctttgaagaatataaatatggtggaaaaagtattattcatgccataatctctcttaccatgaaacttacggagggcacttttaggccactttttcttcgtactttggaatgggctgaggctgaagaggaagcgccgaaagatgaggcagagatccaagtaggctgatggggattgtggatggtggtgtcggcatagttgtgttacgtttcttcgatgcgtgagttcatggagagatgtcacatcctagttcgtcgtcaccgtttgccatgggtccaatggctcgtcttggaaacctgcacttcagtaggccatctatcgtggtttctagctatatccagagttttgtgctaagacaaatcagtcagtcgttttgtgaacctattatgatggagctttatttgctgct

SEQ ID NO: 457 - DNA, 1209 bp, Zea mays
  Clone ID: 700075656_FLI
cttttctgtttctttttctcctcctccagccgcccgtcctctcggtctccgaccacgactgtgcgccttcctaagtaaccctagctcggcgccctccctccgcgacatccaagcccggcaatctcatcgtcgcgcttgcaccgttacgcagtgcgacctctgcgtcttcgaatccaggaaggtagagaggaggaggaggaggtttgtggcaggatttgaccagcccaatggttccatccgagatggggagcgtcgccaccgccgtcagcacgcctgctgcggacaagctgctccatgggcctatctctggcaagaagtgcaagaaaccaggcccgaggaagattcataaggctgagagggagaagcttaaacgagaccacctaaatgatctctttgttgagctgggtaatatgctagaagcagataggcagaacaatgggaaagcatgcatactgactgacactactcggatactaagagacctgcttgttcaagtagactctcttcgaaaggaacatagcgacctacaaaacgaatctcattatgtaacaatggagagggatgagatgcaggatgaaaacggcgtgctccgcaaagaaatttcagagcttcaaaacgagttgacaatgcgggtttcaggcagtccagcaggttggggccatggcaccgccagatcagatccccctcttcctcactcaacggcagtgttctcgtcggagcaggcgatgcaaccacccaccattgcaagcgttgtattcccgttgcagcagccactggcaccatcagcaatgaccaaaccacctcatgccgcaccaccactcgaactgaagctctttccagaagtggcatctgccgaaggccatgagccgtgtgaagaccacaaagctcccaaccatgtggcacgaccacaggcaaggtacccaacgcaatcagcctcatggcccgtaaacctgttctctggccttccacggatggaagatgagcaatgcagtagcagcacaagcggcagcagcaaagaggataacacagatatagaatgagtggatcagctcctacaatcaaagagtctctgttttgagtctagtggatgtaaatttgaatctcctttttggatttcagaacgatagattatactctgttggaaataggacccctcccattgcaaatctttgttggaatctctataaatgcgaatcaatcttactggca

SEQ ID NO: 458 - DNA, 569 bp, Zea mays
  Clone ID: 700075694_FLI
gggatgttgaagctgacataatcccgacctgcagggagcttggcattgggatagtagcctacagtccactgggcagagggttcttgtcgagtggtcctacgatggtcgacaagttgtccgatcaagatttccgcaaggagctgcccagattccagccggagaacctggagaagaacgccgtgatattcgagagagtcaacgcgatggcggcgaggaaggggtgcacgccgtcgcagctggcgttggcctgggtacaccaccagggagccgacgtgtgccccatacccgggacgacgaaggtcgagaacttcaacagcaacgtggcggcgctttcggtggagctcacgcctcaggacatggctgagctcgagtcttacgcgtcggcgggcgtccagggcgatcgctaccatgacttcctcaacacttggaaggattcagagacacctcccctgtcgtcctggaaggctgatgaataacctgcggcttaattcacacgcggtgttgtcccattgaaagatggatgaggtgaccagatggaatgaataagagccaataaaatttcttcgcac

SEQ ID NO: 459 - DNA, 419 bp, Zea mays
  Clone ID: 700075757_FLI
ccacggtccgtgccagtatatgccacttgacaatcaaggagaggtcccaaatcatacacatgacgaagatcgttcataagtgtgcagatcattacgtggtgggcccatatggcctaatctgacaccaatgcagatcgtcgtgagctctacaaacagaagctacaggccaataatagcttgatttttagagtacaaaaatctgttatttgcctgatagtttatctggagcagtttcattttacatatgactgtaatttgtgagaatgcacatcttacgatttttgttgaccagtattcataggtttttagttagcaatgtgttgttggcccgttgctagtccttgtaatacaagcccacctgtttttttgcgcacggcaagacttaaactgacaacattttgtagtaccttttattttgt

SEQ ID NO: 460 - DNA, 1279 bp, Zea mays
  Clone ID: 700075768_FLI
gagataacagaagaattcatgaatactctcttcaacaagtacagcattgattacattattcatggagatgatccttgtcttctacctgatggcactgatgcatatgcgctagcgaagaaggtcgggcgttacaagcaaatcaagcgaacagaaggtgtctcgagcactgacatagttgggaggatattgctaacattcaggcagaaagatgctgacactgatttaagtgttgtcgttgctgagaagtctggagagaaatcaaatgatgaagtgaaaagtcagctatctcatttccttccaacttctcgccggatcatgcagttttcaaatgggcaggctccttcgccaggtgctcgtgttgtctatgtagatggcacatttgatcttttccacgctggccatgttgagttcctcaggagtgccagacaacttggtgactttcttcttgtgggtatctatgacgacgagtcgatcagggatagaagaggctgtcgtcctataatgcatctccatgagcgtactcttggtgttcttgcctgccgttatgttgatgaagtcattattggtgcaccatgggaagtttctaaggacatgatcactacgtttaacatttcattggttgtccatgggactgtagctgagggcaattcagctggtgaaattgatccttatgctgttccaaagagcatggggattttccagacaatcaggagcccaaaatctataacaacattgtcagtggcgacaagaatagttgacaatcatgaagcttacaagaagaggaacctgaaaaagaaggctagcgaagaccggtactacacacaaaagaaattcgtttctggagactagtgctgcacaaggagtgtatatttctgccagcagtccgaggaaatgcatgtgccaccctgtattgatgttattctacagcagagactggaacagataatcagcaatagaaaggtcacaatgatagtttgagcaatggtgtggatggaccaagctagggaagagagagagagagagagggagaaaactgtcacattcttctgctgtcgcccttttaggaacgctcacatgacatgaggagttcacataaacgattgtttttctttctgactttgttatccccgtatggggatttatatatatctgtagctgaaggccttcagcaaaccgttgttgtatacttgtgtgttgttacttaacagcgtgtgtagtgattagcactgcacactccctgattgtaccatggtatattgaatgtttatactgctggaag

SEQ ID NO: 461 - DNA, 1910 bp, Zea mays
  Clone ID: 700075769_FLI
gctcaggaacgcgctccacaccgagggcgtcgtcatccactggcacggcatccgacagatcgggacgccgtgggcggacggcacggcggcgatctcccagtgcgccatcaaccccgaggaaaccttcacctaccgcttcgtcgtcgacaagccggggacgtacttctaccacgggcactacgggatgcagagggcggcggggctgtacgggtcgctggtcgtggacgtggcggagggggaggaggagccgttccagtacgacggcgagctcaacctgctgctcagcgactggtaccacgagagcatccacacccagatggtcgccctctcgtccaggcccttcaggtggatcggcgagccacagtctctgctgatcaacgggagaggccagttcaactgctcgctggccgcagcgcacacgcagggggccaccaaccagtgcgccgctaccgccgccaacacgcagtgcgcgccggtggtactccccgtgcagcctaacaagacctacaggctcagggtggccagcaccacctcgctcgcgtctctcaacctcgcgatcgggaatcacaagctgacggtggtggaggccgacggcaactacgtggacccgttcgttgtggacgacatcgacctctactccggcgacagctactccgtcctgctcacgacggaccaggacacgtcctcgaactactgggtcagcgtgggcgtgcgcggcaggctgcccaaaacggcgccggcgctcgcagtgctcaactaccgccccaaccgcgcgtcggacctgccagccctcgcgccgccggtcaccccggcgtgggacgactacggccacagcaaggcgttcacgtacaggatccgcgcgcgcgccgggacgcccccgccgccgccgacggcggcccgccgcatcgagctgctcaacacgcagaaccggatggacgggcgcatcaggtggtccatcaacaacgtgtccatggttctgcccgccacgccgtacctgggctccctgaagatggggctcaagtcgacgctggcggcggcgcgccccgcggagacgttcagccgggaatacgacgtgacgctgccgccgccgaaccccaacacgacggtcggggacaacgtgtacgtcctggcgcacaacaccaccgtcgacgtgctactccagaacgccaacgcgctgtcgcgcaacgtcagcgaggtgcacccgtggcacctccacggccacgacttctgggtgctgggctacggcgacggcgcgtaccgcggggacgccgctgacgaagcgcggctcaaccttcgggacccgccgctgcggaactcggcggtcatctttccgtacgggtggacgatgctccggttcgtggcggacaacccgggcgtgtgggccttccactgccatatcgagccgcacctccacatgggcatgggcgtcatcttcgctgaggctgtggacctcgtcgccaaggtgcccaacgaagctgtgtcctgtggcgccacggccaccgcgctcatggccggcggtcacctgtgattgccatcaaatattggtggccaggctagggaaccgccttgcctcgcgcgcatgcatattaatgcccttctgtcgtacgagatctctggccattaattagtgttatttattaatatttcttctatcttttttccgtttattgagacgtgaacctagagtgtttgtgcttggctaaccatcccatcttagataggttgttgcatcgtaagccaattccttaaattaatgaaaaagcctttttctcaggtgttgatagaccacctctattccacaattgaaacaaaaatttaaggcctgagaaagtgatggactattctataccaaaaaaaacaaactcctaagtgatatatactattcgaaggaggtcagacattttgcttct

SEQ ID NO: 462 - DNA, 1055 bp, Zea mays
  Clone ID: 700075811_FLI
cttctggatagaagttggggcccgcgtgcagcgtcacagcctcccacccacaaagagataggcggatagcgtctatccccaatcctcccgccgcggcgacgccttcccctccctccttcctccgtcccatgctccgccgctgacacgttcgcccgacttaaccttacgatggccgccgccgcctccgccatcaccgccgtctccggcgttgtgcttccccaaaccttcctatcccaccgattgccgccgccgcaggtcctagccgtggcctcctcattccgccggctctccttgtgcgcttctcctcaccggatcactcacataatcccccgcgctgatgcaagtgccgaagctggagaaccggagcctgccactgcttcagctgaatccgaagaggaggtggccgagggatctgtcgctgtggcggaggcggaggaaccgacgccgccgagcaagccgaaggttaagttcggcgaaataattgggattctgaataagcagttcattgaggaggctgagaaggtgaagactgtaccggatctgaggcctggcgatatcattgagcttaggatgcaacggcccaacaaaaggagattgtcgctctttaagggcataatcatcgcaaagcacaaagctggtgttcacaccacaatccgtgtcagaaggatcattgctggtgtaggagttgagattaccttcccagtgtactcacccaggatcaaggaaatcacggttatcaggcacaagaaagtgaggagagcaaagttgtactacctgaaagacaagcttccccgcttttcaacattcaagtgaaatcagatatgctgacagaacaacttttcccaccaccatctcgatttctcttaaaccttttttttcacttccctatcgatatcatcatatttcactgtaatctctgggtatcagatatgtaatatctacaactttatagcatacttggcttagcgcaatgttttgtttgttgtcggtgtacaaaattcatactagcaccttgttattatgaattcgcaaatacaaggttatgtactcttgtg

SEQ ID NO: 463 - DNA, 1174 bp, Zea mays
  Clone ID: 700075829_FLI
gcaacatccgcagcttcaacctgtcggggatgggatgcagcgccgggctcatctccatcgacctcgcgcgggacatgctccaggttcacccgaactcgaacgcgctggtggtttcgaccgagatcatcacccccaacttctaccaggggagccggcgcgacatgcttcttcccaactgcctgttccggatgggcgcggctgcgatcctgctgtcgaaccggcggcgcgaggcccggcgcgccaagtaccggctggtgcacgtggtgaggacgcacaagggctcggacgaccgcgcgtaccggtgcgtgtacgaggaggaggacgagcagggcttctcgggcatctcgctgtccaaggagctgatggccatcgccggcgacgcgctcaagtccaacatcacgacgatcgggccgctggtgctgcccatgtcggagcagctgctcttcttcttccgcctggtggggcgcaagctcgtgaacaaggggtggaggccctacatcccggacttcaagctggcgttcgagcacttctgcatccacgcgggcgggcgcgccgtcatcgacgagctgcagaagaacctgcagctgtcgccgcgccacgtggaggcgtcccgcatgacgctgcaccgcttcggcaacacgtccagcagctccctctggtacgagctcgcctacatcgaggccaagggccgcatgcgccgcggcgaccgcgtctggcagatcggcttcggcagcgggttcaagtgcaacagcgccgtctggaagtgcctccgcagcatcaagacccccaccaacgggccctgggacgactgcatccaccgctaccccgtcgacgtcccggaggtcgtcaagctttgacctacgggctacggctacggctacgacaacgagcgagctcggccggcaccgccgccgccgccgccgtcctactgtgtacctgtacgtcctctctgttctcttctcttcccatttccttcgctattaatataaaaaaggtaaaaaaagaaagaaagatccatatacactctgactgttggaagtattgtcatccctcaggcaagggattgggtgattgtaatttgcttgaatgagaatgaatcgtgcacttgtaaattgtaatccacgttgtaactgtgtgaaagggatacatgcattctcctgatacttggttgatg

SEQ ID NO: 464 - DNA, 1516 bp, Zea mays
  Clone ID: 700075887_FLI
tcccatcccactaccacccatctcgtcgtccgccgattcgatccggttcttccaacccaggggcagtgatggcgacgaagaggagcgtgggcaccctcggcgaggcggatctgaaggggaagaaggtgttcgtgcgcgccgacctcaacgtcccgctcgacgatgcccagaagatcaccgacgacacccgcatccgcgcctccgtccccaccatcaagttcctcctcgagaagggcgccaaggtcatcctcgccagccacctgggtcgtccaaaaggtgtcaccccaaagtacagcttgaagcctcttgttccacgcttgtctgagctctttggagttgaagtcgtgatggccaatgattgcattggtgaagaagttgagaagttggctgccgctttgccagaaggtggagttctgctcctagagaatgttagattctacaaggaggaagagaagaacgaacctgagtttgctaagaagctagcatctgttgctgacctttatgtcaatgatgcttttggcacggcacacagagctcatgcttcaaccgaaggagttaccaagtatttgaagcctgctgttgccggcttcctcatgcagaaggaacttgactaccttgttggagctgttgccaacccaaagaagccatttgccgctattgttggtggatccaaggtctcaagtaagattggtgtcattgagtccttgctggcgaaggtcgatatcctcatccttggtggtggtatgatctacacattttacaaggcacaaggatattctgttggaaaatctctcgtggaagaggataaacttgagctcgcaacttctcttattgagaaggcgaaggcaaagggggtttctcttttgcttcccactgatattgtagtagcggacaagtttgcagctgatgctgagagcaagattgtccctgccactgctatccctgatgactggatgggtcttgatgttggccctgatgccaccaaaacattcaacgaagcattggacaccaccaagactgttatttggaacggccccatgggagtgtttgagttcgagaagtttgcagctggcactgaggcgattgccaagaagctagctgagcttacaaccacgaagggtgtcactaccatcatcggcggcggcgactctgttgctgctgtcgagaaggctgggctggccgacaagatgagccacatttcgaccggcggcggtgcgagcttggaactcttggaaggcaagactctacctggtgtccttgccctcgatgacgcctagatccgctgctgctgctgctactcaggttctgccagctttgcgtgtcatcttgtttcggaccttggtgtagcactgcaaggctaaggtttactcctccgcacatggacttttggggataggcttgccaccgtgttttgctagatgagtcgtggaataagcttttacttcctcgctgctgtgggtgaagtgactggaattcggaaatttggaactaacaaaaccccccgtggatttgtatg

SEQ ID NO: 465 - DNA, 818 bp, Zea mays
  Clone ID: 700075893_FLI
caagcgccttcaaactttcagaacacgcacttctgctagctagtagccatggcttccgcagtctcgtctctcttcttcgccacggcgctcgtgatgatgacgctcatgatcatgctcgagggcagcaccacatgccacgccgcgcggcatcttgccgacacgacgaccgccccgaccgctgctcctaccgccatcccggccattcctgccatgccgaagccgccggtcgtgcccaccgtgcccgcggccacccttccaccgatacccgccgtgccgacgtcgacggtgcctgcgctgggcgtgccaccgatccccgcgttacccaagatccccgcggtgccccctatgccggctgtacccgcattgccaaaggtgacggtgacgctgccgccgccgatgcccgccgtcgtcgtcgtccctaaggttggcgccttgccgccgatgcccgccgtgcctaagttgacactgccgccgatgccctcgatcccgggcgtgcccatgccgtttgtggcgccgcctccttcggcataattcaattcaccaatgtctgatagattgtccatatatctgagtattcgagttgatctcactctcgatcaatccatgtgtacgatcttcgctgggcacgcatgctgcagatttacctaattggtgtatgtatgtgattctatatacttctatatattgttgtattcagtctttttcaaagttataatgttgtgtcaagctttgtcagttcattttctttcatttttttggttggaggtcgtcatttgttgtaatctgtaagtggatacgtatgtacagagtgctcgact

SEQ ID NO: 466 - DNA, 1403 bp, Zea mays
  Clone ID: 700075920_FLI
aaagggatgacgagggacagttgcaagttgtggtggagaagggcgacgaccccatgacaacatggggtgaatttctatatcagttgccaatcataagaaacaaatcttattattgcactccagcaataaaagggccagatgctattattgttggctatatcagacagtttgtcatcaagcctttgtctggattcctttttggcactcttatggagtactaagccacactgaagaatttgggcttaagagtgaggttttgaaggtgactcttgcaactgacgtcgtgaactgagtgtgaatatctactggatgggcaagcaagtttccaaccccatgccctcccatcgattctgctgcctgatccggctagagtttattaggactcgcaactacctcggagttcactgctgtaaatatgggtaacaccctaccagtgcatgatatgtcggaatccacagcagccataggatctcccaacaaggaggatcttgcaacaatgacattgatcaagaattggatgttggaaattatggtttggcattgttacttctcttactcctgtttcatgtcccaatctgaggtgactcgtgttggtaatcatgtaatttttccttcgtgcttctattcttcctatacgctttaggcatggcatgttgtgcactaacattttgattaacaatacaacacatggtcatacatatggtattgttgcactatttttttgttgcaacgcacgggtattcaaccagggcatctcagattgggagtgggaggaggatgaggagatgatttggtgctaccagggacaggccccatctcctagaaatggatcttcctcctttgcatgggcaacttgtgcatcgggctactcttcaccaacagaaaaccatcactgagaaagagcagttagcaactggtgttgtcgtgttgcgactcaaaagggcttgcctatgggcatccaaataggagccatccccaaatgctgactgaccaaatgttcggtatgggagccacaaatagcagcacgatgggaatgcagcagcagcagcagcaaggggtatacgggaacatgcaggcaggtgcacagaacgtgcaaagtatggcgggccttcagaaccagacccagaatcccaacttcactcagcagattcaacaaaaccaacaatgattcaacactaacggtcatggaggttgaaagatgagcaatatagccatcgttttgctatttgtctgttggtctttactcagcttatctgtgagactgatagtagccccaggttgatagccttcgtttttctgtaaatcaatgtagatgcatcgccattagcgagatgcaggtcaattatatacgttgtaactgtgttttggatatgtgaatagtgttacgtgtgttccttttattt

SEQ ID NO: 467 - DNA, 1904 bp, Zea mays
  Clone ID: 700075928_FLI
aacgaacccagattttcaaaacagaccgctcccggcggccatgcccatgccgatggtgcggcagcggcagcggcggcgctgagcccgactgccagaaaccggccacgggatcaggtccgtcagaccgatgcctgcgcccgtcgcacctgtaacctccaggctgaagcgggaagactgcccccgcaccaagcacgactccctcttttccccatggaaggtccttgtcgggccgtcggactggagggaccacgccgccggcaaggaaggggtccagaggtaccgcatccgcaacctcccggacaacttccccggcctctacgagctaggcgttgcctgcgcggccgacgagggcgtcaggtcccggaggcgtgacgcgcgaggcgtcgtcgtggtgtacctcggccaggccgacagtgtccgggcgaggctgcagcagtatggccgctcggggtcgcatctggacactacgaactcgccgggctcttctgatagagatgcggcgaatgcgctcgccgagggtcctggactcttcagagaagtgttctccagaggctactccgtcgtgtttcgatgtgcgctgatggacaataaacaagaagctgagaagactgaagcactactcctgagagtatttgattatgcatggaacaagcttcagaatggtgcttgtcgccggcaagaaatactgcataagttagaactgcgagcagccaaccataggtctctacttagcagagtaagtgacatgaaacaaaaaatatttggacagaaagcaggtataaatataaagggaagtgggccagctaacacctcgcctagcataattaaaagtatgctcccaagggttcgtacaatcgttcgtttcagacctcagtcagtaaaccctaacaacagtgaaggtgggataactggtattccctatgcaaatagacaagcacatagaaggaagtccaaaggataccaagtaaaaaagttcgatgttacaaaacggagaactgtgccgatacatgattctaactctgtctgtggagtgctgctggaagatggtttttgtctggagcacccagttcatggaagaaagaggtgcagcttacacaaaggtaaaagagtcaaaggcagcccaaaaagttcgcctactagccatccttgccaagttgggattgcaattactgagttttgcctaactgaagatttggacagctcggtcccaaaacaggaaagcgaaatacggcccaaaaatatgtctacaactctgaaagaacctcagaggcaaagcgataatttggaatcacaaaaggtgaatactggagaagcttctacagaagatggaacacaagaagtttctagggatgcttgtatcttagaagagaaggccttcttccatgctgactctgagtctcaggagcagcagccttctgggagaatgtggtttgagctgctcaaatcacagaggaaaccggcgagcgcacatccatcaagaagaggcttgggatctcagataacagcaatgacagataacaggtcctgcaaaatggtgtcaattgcaggaatggaaaggactgagaaggacagtggagtagaggtcactgctgcttcgttttccagaagctcaggatggccctgtacctgtggcgcccgtatgtcggacggttcacgttgtatgaatatgccgattgaagggaggaagagatgtgcattgcacaaagggcaaagggcagcattcccccctacaccatcggcataatagacaggacgggtttttttcttacttccaattgttgttttcacatttctgttagcaaattgaaacacagaaagctgttttcatatttcatgtgccccaaaacgactacatacattttgtaactgtattgctcatcattgaatttttcacatcaattttt

SEQ ID NO: 468 - DNA, 1716 bp, Zea mays
  Clone ID: 700075953_FLI
ctagaccaatttccttgcagagagtactgttttggcgatggacgttgccttaagcaccattgtgtttgtcatcgccattttcatcccggcactgctgacgctggtgcaaagaagccgtagccggcacgccggccataaccaaccacctccgccggagcccagagccattcccctggtcggccacctccaccagctcctgagaaagaagccactccaccgcaccctcgcccacctcgctgagcgccatggagacgtcctgggcctgcggttcggctccagccgagtcgcggttgtgtcctctgcctcggtcgcccagcagtgcctcgtcgcactggacacctcgttcggcaaccgtccacggctgccgtccgcgaggatcctctcctacgagtggtcgaccatgggccattccaactgcgggccgtactggcgccaagcccggcgcaccaccagcacggagttctcctccgtggaacgagtgcagcacttcgctgatgtccacgagcaggcggcccgggccatggcacgcagcctttgtcgtctggcacttgcttctggccggggacgcgctcttgtagacgtcaagccacggctattcgagatgctaatgaacggcttactggacatgctcttcaaggggacagcctctcggagcgggagtagtgacgaaaaggacgaggccgtggaagtgagcgaggaggcccgatgcttcatggctatggcggaggagacgatggagctcacgctgacggtgtgggacttcctgccgccactggcgcggtggctggacgtcgacgcggtgggccgccggttgcagcgactgcaagcaaacaggacggagtttttgcagaggttgatcgaggaacacaaggagatggagaagggcggtcaagtcacacgcaggacgttggtcggggtgatgctggagctgcaggacaaggatcccgaagcctacacggatcagctcatccgctccatgtgtgttagcgcactcgaagctgggacgctcagtacaggctatacaattgagtgggtgatgtctctcttgctaaacaaccctcacatcatgaagaaagctcgcgacgaaattgacgcatgcgtcggggaacccaaacgcctactggacgcgactgatctcccaaagctgccgtaccttcgatgcattatcctggagacgcttcggctgtaccctgtggtaccccttctagttcctcgtgaatcatctaccaactgcacggtcaacgggtttaatatcgccaaaggaacgatgcttcttgtgaatacgtttgctatccatagggatcctaggacatgggatgacccagaaaccttcctcccggaaaggtttgaggatggcagtaaccaagcagggaagacgacgatggatctgtcgtttggcatggggagacgacgctgcccagcagagaacctggggatgcagctggcaggcattgctttggggactatgattcagtgcttcaactgggaacgagtgggcacggaacttgtggacatggctgagggctctggcctaaccatggcaaagaaggttcctttggaggccttctgtcaacctcgtgcttctatggtcgatctccttgcaaacatctagctgctatatatacaagttgtactaataaggcaagcacgtcgtgttattctcgttgttaattgttactattacagaataaatcaaaagtgttgctactttgatat

SEQ ID NO: 469 - DNA, 1049 bp, Zea mays
  Clone ID: 700075965_FLI
agagcgccagccaagtcttgcggtcgcgaagagcaacgcaacaagatggtgaagctcgcattcggaagcgtcggcgactccttcagcgtcacctccatcaaggcctacgtggcggagttcatcgccaccctcctcttcgtcttcgccggcgtgggttccgccatcgccttcgggcaactgacgaatggcggcgcgctggaccctgcgggactggtggcgatcgcggtggcgcacgcgctggccctcttcgtgggcgtctccgtggccgcgaacacctccggcggccacctgaaccccgccgtgacgttcggcctggccgtgggcggccacatcaccgtcctcaccggcctcttctactgggtggcccagctgctgggcgcgtccgtggcgtgcctgctcctcaggttcgtgacccacggcaaggccatcccgacgcacggcgtctccggcggcaccaccgagctggagggcgtggtgttcgagatcgtcatcaccttcgcgctcgtctacaccgtctacgccaccgccgccgaccccaagaagggctccctcggcaccatcgcgcccatcgccatcggcttcatcgtcggcgccaacatcctcgccgcggggcccttcagcggcggctccatgaaccccgcccgctccttcggccccgccgtcgccgcggccgacttcgccggcaactgggtctactgggtcggcccgctcatcggcggcggcctcgctggcctcgtctacggcgacgtcttcatcggcggctcctaccagcaggtcgccgaccaggactacgcctaagtagtgtgctccgttcgtctggattgagctcatccaacgcagccgcgcgtttcgatcggcgtcgtcatttgctttgctcttcatttcatcacgttatgtaacgtgccaatgatgtgtgtcgtcctggtctgttccgtcgtccttgtattcatttcccttcttttttcggggtaaaatcgatgtaaagatctcatccgatctgccgttttcgatcgccttggagtggaaaaaaaacaggtgattttcgtttc

SEQ ID NO: 470 - DNA, 2505 bp, Zea mays
  Clone ID: 700075986_FLI
ccggaccacatccctatttcatcttggtaccccgtccgtctccgatttcagaagcacggcgggctccccggcagcctctaccgagcagaaagctgagttctaccccagaaccgaggcatggaggacgaagaaaacatcgagggagaactgttgctcgtggagtcacaactccacgacatccaaggacaaattaaaacattactcgatcgccaagaggagttgtatgaacgccaggcacagttgaaggctttgctcgaagcatctaaattgaccagaaatacaacaattaacacatcttcagttgctccggaagattggtctgggagcttcccatgggatctggaggctgacgataccaggttcaatatatttggcatttcctcctaccgatcaaatcaacgagaaataattaatgcagtcatgagtggaagagatgttctggtcataatggcagctggtggagggaagagtctatgttaccagctcccagctgtacttcgtgatggaattgcactggttgtcagtcctttactttcccttattcaggaccaggtcatgggactgtcagctttaggtataccagcatacatgctaacttcaactaccaacaaggaagttgagaagttcatctataagacacttgataaaggagaaggagaactaaagatattatatgtgacacctgaaaagatctcaaaaagtaaaaggttcatgtctaagctcgagaaatgccatcatgccggtcgtctttctctgattgcaatagatgaggctcactgctgtagccaatggggtcatgattttcgtcctgactacaagaatcttggcattttgaaaattcaatttcccagtgttccaatgatagctttaactgcaactgcaacaagtaaggtccaaatggatttaatggagatgctccacatcccgagatgcatcaagtttgtcagcacagttaacaggcccaaccttttttataaggtgtctgagaaatcgccagttggaaaggttgtcattgatgagatcacaaagtttataagtgaatcatacccaaataatgagtctggaattatatactgcttttcaaggaaggaatgtgaacaggttgcaaaagaactgcgcgaaaggggtatttcagcagattattatcatgcagacatggatatcgttaatcgtgagaaaattcatatgcgttggagcaaaggtaaatcacaggtcatcgttggaacagtggcatttggaatgggaatcaacaaaccagatgttcgatttgttattcatcacagccttagcaagtctatggagacatactaccaggagagtggtcgggccggacgggatggattaccttcagaatgtattttgtattatcggcctggtgatgttccacggcagagttcaatggtgttctatgaaaactgtggcctgcaaaatctttatgacatcgtgcggtattgtcagtctaagaggagttgtcgtcatggtgcattctttcgccattttggagaggtccctcaggactgcaacggaatgtgcgacaattgtgcttccactattgagcagaaggatattgatgtcacctgtatgatttattttgcgtcagtttaaaaattacaacaaatgaccaacatttattcactttatttcagggggaaaatgttttttatttcatgatattctcacagtaattttttctacttcctgtttagaccatacaaaaattatagtttcacttcttcacgatatgcaacttaatgatcaaagagctacactactacagctggtggataagttcaagtcaaagtggaaaggtttaggtagtttcaatgaagctgttgatcttagaaaagaagaagttgagcagttgatagttaaccttatactcgacaatgttttgaaagaagaatttcagcacacagcatattcaaccaacgcttatgttaccttaggagcattgtggaagccagcactacaaggaaacagagtagtcaagcttgagattgctattgcttctaaagatagagatgttagatccaagggcgcaaaacgaggtcgcatgagtgatttggaagccaaactagatgaactgcgtagggatctgtcatccacgggtagcgatgccatatttccccatgcagttcttactgcgcaacaaatttcactactgagcagccagaagccaaccactccagctgagctagaaaaggttatagggaaggtgaagacaaggaagtacggcagcaagatcattgagctgatgaggtcacatgacaattcaggaagtggccgaggcaaggaggctggcgatgaacacagagctaagaagatcaaaacgaaggatgaggatgttgtttgtgttgagagtagcgaggaagaatagaatatgcccttcacatacttggctttttagtctatcatctcatggttaattattttgccaatcatttcctccgacgtcatctttctgtaatttagactttcacggattaatgcacagtcatatttctt

SEQ ID NO: 471 - DNA, 1329 bp, Zea mays
  Clone ID: 700076005_FLI
ccacgcgtcggttcttgggtttcaactgaacccaactccaatgcacatgcctgggcttataataccatcatctgatgactcaaaggtatttctcacttactacaatgactccctagtgagagatgggacatcaggtcaagttgttagctttgccggagttgctaaaatattagggggtctaaatccaaattatggaaattctgctccgaaagtaatgttctattctgctaggggtcctgaccctgaggacaatacactgtcaaatgctgatatcttgaaaccaaatctagtagcaccgggaagttccatttggggtgcttggagttcagttggattggattctgctgaatttgctggtgaaagtttcgcaatgctctctggcacaagtatggctgcgccccatgtcgctggcctcgccgctctaatcaagcagaagtttccttcttttagcccagcagctatagcttctgcactgtccacaaccacaactcttagtgacaggcaagggaaaccaatcatggcacagcgaacatacagcaacccagacttgacgcagtctccagcgacatcttttgatatggggaatggctttgtcaacgctaccgctgctttagacccggggctcataattgattgcagctatgatgatctcttctcctttctttgcggcataaatgggtctagcccagtcgtgaaaaactacactggcaacagctgcgtggcctccaccatgacaggagcagatctaaacctaccatcaatcaccatagccgtgctcaaccaaacaagaaccataacgagaacggtgatcaacgtggcggctgacgagagctactctgtcaattacagtgcccctaatggaactgcagtttccgtggtgccgacgcaatttttcattccaagcggacagaagcagctcgtgacctttgttgtgaacgccaccataaacagctccactgcgagcttcgggaacgttgggttccagggtaacaaaggccaccgggcgataatgccattctcggtgatctccaaggttgtatacagttcctgatgactgatgagccgagctgatgcagtggatgcaatgcaaatgcaaaccaaggcctgactgatccagcgtatgcagtgatgacttgactgcatggaggtggagcttgcctttgactagagaaattttttgttggttgtggcgtgtacattctgaagcatgttgatgtaagtagctgagtgattaaccagtaactgtaaagagaatgtactgccagatatccagaatgggaaatccttgtgcaaccagaatgttaaatagcactttgttggggtttgatt

SEQ ID NO: 472 - DNA, 1419 bp, Zea mays
  Clone ID: 700076024_FLI
gctcggctgctacgtagctatatatagctgcagaacagttttagttaccggactgtaggcacaccaagctagatatccaaggggcccccccggaaactagctagctaggatgccaacagcagaggcgacgacgcccgtgccgccggagctgtcctccgggcaagggcggacggtttgcgtgaccggagctggagggttcattgcctcctggctcgtcaagcgcctcctggagaagggctacacagtccgcggcacggtcaggaaccctgtggatccaaagaacgaccacctgagggcccttgacggcgccgtcgaccgtctcgtcctcctccgcgccgacctgctggacccacagagccttgccgaggccttctccggctgtgacggcgtcttccacgccgcctccccggtcaccgatgaccctgagatgatgatcgagccagcgatccggggcacgcgctacgtgatggcggcggcggcagacgccggagtgaagcgcgtcgtgttcacgtcctccatcggcaccgtgtacatgaacccctaccgtgaccccagcaagcctgtggacgacacctgctggagcgacctcgagtattgcaagaacacccagaactggtactgctacgccaagacggtggcggagcagggcgcgtgggaggtggcgcggaagcgagggctggacctggtggtggtgaacccggtgctggtgctgggcccgctgctgcagccgacggtgaacgccagcacggaccacgtgatgaagtacctgacggggtcggccacgacctacgtgaacgcggcgcaggcgtacgtgcacgtcagggacgtggccgaggcgcacgtccgggtgtacgaggcgccccacgcgcacggccgctacatctgcgccgagagcaccctgcaccgcggcgacctctgccgcgtcctcgccaagctcttcccggagtaccccgtacccaccaagtgcaaggaccaggttaaccctccggtggtaggatacaagttcaccaaccagaggctcaaggatctggggatggacttcgtgccggtcctgcagtgcctctacgagacggtcaccagcctccaggagaaaggcatgctgcccgtgcttccgacaaaacaagaccatgaccaactcggcaaatcatgatcatattcatatccctcgttgacgatactagctgctgctaccacgcatatcatatcatatatataagatatatatatatatagtggattcatatagttaaccttatatatatgtgtgtgtgtgtgtgttattgtgtgttattagtgtgtacaattaaatggcaactctaatgggtgcatgcatctgcatgcatgctttcctgacaagtgccacacatgcatgcaatgtatctctttggacgatttatatacaatactccgttgccaaat

SEQ ID NO: 473 - DNA, 1254 bp, Zea mays
  Clone ID: 700076026_FLI
ctggaatgcaggagagcttgccacggcaagagctgcagcttccgcaggaacaataatggtttgaaagatcacactgcctgtggtacctcaagtcatgacccaaacactaatccattgtgctgatcttatggtttttccagacattgtcctcatggtctacttccagcgttgaagaggtcaactcagttgggccgggcatacgtttcttccagctctatgtctacaaggacaggaatatcgtacggcaactcgtgaaaagggctgagatggctggcttcaaggccattgcactcacggtagacactccaatacttggccgcagggaagctgacattaagaacaggttcgccttacctccacatctggtgttgaaaaacttccaagcgctggatcttggcacgatggacaagacaaatgattccggccttgcttcctacgttgctggtcaagttgaccgcaccctttcctggaaggacgtcaagtggctgcagacaattacctcgttgccgatcctagtcaaagggatcgtgactgcagaagacagcttgcgatcgaatatggcgctgctgggatcatcgtgtccaaccacggcgcgcgccagctagattatgttcctgcgactatcagctgcctggaagaggtcgtcagggaagcgaaaggccggctaccggtgttcctcgacggcggcgtccgccgtggcacggacgtcttcaaggccctggcgttgggagcttcaggagtgttcgtaaggacgacgacgacgacgcgcccactgcctgctaaaaacgctgctatttcgttcgagcccggcacctgacgctgttgcttggtgcgtgctgcagatcggccggcccgtgctgttctcgctggcggtggacggcgaggccggcgtgcggaaggtgctgcagatgctgagggacgagctggagctcaccatggcgctcagcggctgcacgtcgctgagggagataacccgcgcacacgtcatcaccgacagcgaccggatcggccgctcgcggctgtagaatcattgtgcagttcacctcaggaatgatgttggtctcgactgaactgtcctgattcgggatctatttgtagctcttgtgctctcattttacgttaggcaaataaggaagctgcgtgcgtatgtgtgactgctgctgacgtttgtttgcgccgctgtcgtggttgcctggttggcacttggcagtgttgattggcgttagtggttggtttgggtgaaaggagtttatg

SEQ ID NO: 474 - DNA, 690 bp, Zea mays
  Clone ID: 700076088_FLI
agagcagccgcatccacaacctgcctctctcgtcccctggcggcgtccgcggcaggatggcggaatctacggcgaggacggtgaaggatgtcaacccgcacgagttcgtcaaggcctactccgcccacctcaagcgctccggcaagatggagctccctgagtgggttgacattgtgaagactgcgaggttcaaggagcttcctccttatgatcctgactggtactacatcagggctgcatccattgcaaggaagatctacctaaggcaaggcatcggtgtgggtggctttcagaagatctacggtggccgccagaggaatggctcccgcccaccacacttctgcaagagcagtggtgctgttgcacgcaacatcctgcagcagctgcagattatgggcatcatcgatgtcgatcccaagggtggacgcctcatcaccaaccagggaaggcgtgatctggaccaagtggctggaagggtcgctgttgaagcgtgagcagtgtcatctttggtttcaatggtgtcatgtttgatggttgagaaggctgcgctctatttgctcttttgggttaggattttcgagttcagaggactttaaggtttattgcatctagctatggcgccacactatgttccccgagtacctaatgtgatatcaagactcaattctcgaatctaagatatatgtttgc

SEQ ID NO: 475 - DNA, 1365 bp, Zea mays
  Clone ID: 700076148_FLI
ctgcggcggcgtgcctggcagtgaagcggtagcaggtagagccagccagtctagcttagccaccacactagtgtgatggcgaccaccggcggcggcaaggcggcactggtgctggggcggcttctgcttctgctgtgcgtgctcggccatggagctgcgcagcggtacaacgccatctggagcttcggcgactccatctccgacaccggcaacctctgcgtggggggcgggtgcccttcctggctcaccacggggcagccgccctacggggagaccttcttcggccgccccaccggacgctgctccgacggccgcgtcatcgtcgacttcctggccgagcactttgggctgcccctgctgccggcttcgaaagccggcggcgacttgaagaagggggcgaacatggcgatcatcggcgccaccaccatggactttgacttcttcaagtccatcggcctcagcgacaagatctggaacaacgggccgctggacacccaaatccagtggttcaggcagctgctcccctccgtgtgcgggaaggattgcaagaactacctgtccaagtccctgttcgtggtgggcgagttcggcggcaacgactacaacgcggcgctcttctcggggcggtccatggcggaggtgagagggtacgtgcccatggtggtgagcaagctcgtccgcggcctggaggcgatcgtgaggagcggagccgtggacgtggtggtgcccggggtgctccccatcggctgcttccccatctacctcaccctctacggcacctccaacgccgccgactacgaccgcgacggctgcctccgcgcctacaacggcctctcctcctaccacaacgcgctgctgcggcggagcctgtccggcctgcgcaggacgtacccgcacgcccggatcatgtacgccgacttctacacccaggtcacccacatgatccgggcccctcacaacttcgggctcaagtacggcctcaaggtctgctgcggcgccggcgggcagggccagtacggctacaacaacaaggcgcggtgcggcatggccggggccagcgcctgcgccgacccgggcaactacctcatctgggacggcatccacctcaccgaggcggcctaccgctccattgccgacggctggctcaagggcccctactgcagccctcccatccagcactgatcgagctagctgggccgggggactgaatagctaattaagctagcagcatattattcatgagtgacatcatcgtgctttgtttgtttacggctaattgccatgtgcatcatcctagcgctctagcaggttcatcaatgatgggtttgctatttggtttgtcaattagttgttcaattggtgagg

SEQ ID NO: 476 - DNA, 1688 bp, Zea mays
  Clone ID: 700076168_FLI
catcaacaacacagatcgatttcgatctaaaggcaatggcgattgctgcattagagctgctctacgtgctgggaagcttggtggcgctacggctggcatggcaggtgctggagtggggctggctgagcccgcggaggctgggccgggcgctgcgggccgagggcctccgcggcacggcgtaccgcttcccggccggcgacgccaaggacgaggagcgtctcctggcggcggcgcgggccaagccgatgccttcgctctcgcacgcgatcagcgctcgggtgggcccgctcgtccacaacgccatccacgaacacggtaaaatttcggttgtctggatcgggcctaccccgaaagtgatcctcagcgaccccaagctagtccgggaagtgctgtccaagtccagcaagttcggggacttccagaaacccaagctgccctcccacttcatcaagctgatcgcccaggggctgacggttcacgaaggtgagaagtgggcgatccatcggaagatcatcaggtctgctttccttgtcgagaagctgaaggaaatgctgccggcttttactgcctgcaccggcgagctgatgggtcgatgggaggaatcgatggggtgcgacggcgcgcgcgagatagatgtctggccggagatgcaggacctcaccggcgacgccatctcccgcgcggcgttcggtagcagcttgatcgaagggagaaggatcttccggatacaggccgagcaaatcaagatcgccaacgagatgacaaacctatacatcccgggttacacctacctaccaaccaagccgaacagaaggatcaaggcaaacgcacgcgaggtcgaagcgctgctgagaggcatcatcaccaagcgggagaccgccatgaagaacggccatgccgacgacagcgacctgctcggcaagctaatgcagtccaacgttgaagaggcccatggaggcggaggaagctccaagccgatgatgaccatggaagacatcatcggcgagctcaagctgttctacttcgccgggatggagacgacctcggcgctgctcgcgtggacactgatcgtgctcagcatgcaccccgagtggcaagaccgcgcgagggaggaggtcctggaggtgttcgggaagaacgagcccaacatcaatggcacaaatagtttaaaagtggtgaccatggttctatacgaggtccttaggctgtacccaccgatcatagatcttgagcggcaaacgtggaaggaaatggagctgggaggggtcaggtacccacccggagtgacacttctgctgccgatactggccattcaccatgacccggacctgtggggagaagacgtggaccagttcaggccggagaggtttgccgacggcatatccaaggcgtccagagacacgccggcgttcttccccttcggctgggggccgcggatctgcgtcggccagaacttcgcgctgctggaggccaaggtagcgctggccatgctgctgcaacgcttctcgtttgggctctcgccgtcctacacgcacgcgccgttctccgtctccaccgtgcagccggaacacggggcgcagatcgtggtcaagaaaatttaatcattttattgtatgtacttattacatatagtatggtcatcctgtcgtgtatgcatggatttatgtcgcttctctctatagataaat

SEQ ID NO: 477 - DNA, 949 bp, Zea mays
  Clone ID: 700076180_FLI
cccaaaccctttcgatctgctcaactaccaaactctgctcctccctgcttccgtcacgcgagagcactccactcccacgcgaaccctagcagtggttctccctcggggccccgctaagcagcttggttccaagctgtagaagcatctccgatcccatccgcggcgggttgaggccatcagctccggtttctgcagccggatttgggatccgcgagatgtcttggtccgcgcccgacgacatcctcctctccacctccctcgccggcttcttggacaagaaacttattgtcctgctaagagatggacggaaactgcttggcaccctctgctcatttgatcagtttgcaaatgttgttcttcagggtgcttgtgaacgagtgattgtgggggaacaatattgtgatgttcctcttgggctgtacgtaatccggggagagaacgttgttttaatcggagaattggatcgcgaaaaggatgaactccctgctcacatgacctgtgtttcagaagcagaaataagaaaggctgaaaaggcagaacgggaagccagagatctgaaagggacgatgaggaaacggatggagttcctggacttcgattaacaccgtcaccgcggccgttgccgctccccattgtggcggaatctttagtggcggcctgtgtgccatacatgcctggtgaccgcgccggcgcaccttggattgctggagggtttagcgaacagtttctttttaactagcagtgctgttttatactctcgtggccacagaccctttgagcgcctcctgatacagctttgtcaccactctgatcattgcctcgatgaatttatatacctgacgttttggattggatctgcgccaaaacgccatttctatgcagagagtctgtactcttatagctgagacagatttttttcctttaaacgatttgggattggatctgggcc

SEQ ID NO: 478 - DNA, 1655 bp, Zea mays
  Clone ID: 700076238_FLI
cgaagaggagcctcggttgcagttgcagtagcatcccaacttccaacctccaaatccaaagtgggttccagttccagagagaggaagcccaacggcggcggcggcggcgacggccgacgtgctcagagacgcggcgtggaggggcgcgccgccgtggcttcgtgcagggggtcggcccgaccgtgtgcccgtgagaggttgacgtcgctgatgggggagccgccgccggaccggaggaggctgtaccaggtttggaagggaagcaataaattcctcttcggcgggcggctgatttcggtcctgacgcgggctccctcttcctgtccacggtcctgatagcaagcccgctggccggcctgtgcttccagtgcgtcaccaagctcagcagctccggcggcagctcaccgctcggcctgccggtcctcctggccaccatactccttgggctatcggatctggcgttcctgttcctgacatcgagcagggaccccgggatcgtgccgaggaacgcgcgcccgccggagcagcaggagcgcggtggggtcgacgaccccgtcgtcgccgatgacgacgacatcgtctcggcgtcgaccgagtgggtggcgatgagcgccgcgaataacccgcacctccggctgccgcgcaacagggacgtggtcgtcgccggcggccatgtcgtccgggtcaagtactgcgacacgtgcctgctgtaccggccgccgcgggcgtcgcactgctccatctgcaacaactgcgtccggaagttcgaccaccactgcccctgggtcggccagtgcatcggcctgcgcaactaccgcttcttcttcctcttcatctcgacgtccacgttcctgtgcctctacgtcttcgtgctgtcctggctcaacatcgccgcgcagagggcgagccacggcgggtcgctgctgaggtccgtcaccggcgagccgctgtctctcgtgctcatcgtttactccttcgtcgtcgcgtggttcgtcggcggcctcaccgtcttccacatctacctcatgagcaccaaccagacgacgtacgagaacttcaggtaccggtacgaggagaaggagaacccgtacaacaggggcgtgctggctaacatgtccgaggtcttctgcaccgggatgccgccgtcgatgaacaacttccgggcatggatggagctgccggcgccggcaccggaggcgttcgacgccgggccgccgctcgcttctagggacaagatcgacctggagatggggcacaagggcggcgtgcaacaccatactggtgttccacccatcttgcaggggctgcattacgcgcaaatggagaagaattacagtgccagcgtccacatcaaggaccggcgatccgcggaggcgccggaccccttcatgatcccggaggcgccgcgacacgctgcagcaggagaagcttggcctccagctgtgtttcatgacgacggagtctaatgatgttacgagcagcgggcaagagtccgtggtgattgtgattataattgtaggaataggaattgtgtggtacacaacatagtgaggcgcttgcgatccatttttgtacatcttggaactcgagaggttaaacctcgtgatagtcaactgcatgtattgaaacatatatttatacacatttttttttgc

SEQ ID NO: 479 - DNA, 1388 bp, Zea mays
  Clone ID: 700076335_FLI
gcaagggagacaaggacgacgaagatcttgcgagggccatacaggacagcctcaacatgaacccttacacgccttacaacccctatgctccctctcacgcccaacctagagggcacaggctgtgcgcaggctgcaagcatgagatagggcatggccattacttgagctgcatggggatttactggcaccctcagtgcttccgctgcaactcctgcggccaccctatccgtgagaccgagttcacattgctgagtacagatccataccacaagctgtgctacaaggagctgcaccatccgaaatgcgacgtctgccttcagtttattccaacgaacaggagtggcctgatagagtacagagcccacccgttctggggccagaagtattgcccttcgcatgagcacgacaggacgccacgttgctgcagctgtgagaaaatggagccaaggaacacaaagtacatgtcactgggagacggccgcagcctgtgcatggaatgcctggggtctgcggtcatggacaccggtgaatgccagcccctgtaccattctatcagagactactacgaggggatgaacatgaagctggaccagcagatacccatgctcttggttgagcggcaagcgcttaacgaagccatggaaggagagagtagaggcccacaccacatgcctgagacaaggggcctgtgtctgtcggaggagcagactgtgagcagtatacttaggaggcccaggattggtggaaaccggttactggacatgagaactcagccacaaaaactgactaggagatgtgaagttactgcaatacttgtcttgtatggcctccccaggctactaacaggatccatcctcgcccatgagctgatgcacgggtggttgcgcctcaaaggttaccgaaacctaaacgcggaggttgaagaaggaatatgccaggtcatgtcttacctgtggctggaatcagagattcttccgtcgtcctcaaggcacgcgcagccttcatcttcctacgcctcgtcctcctcttcgtcttactcttatccaccgacatcgtccaagaaaggtgggatatctcataccgaaaagaagctgggcgagttcttcatgcaccagattgcccatgacacgtcgacggcgtatggtgacggtttcagaactgcgtatgctgccgtcaacaagtatggccttcgccaaacactgaaccacatacgcctaacaggaggactccctgtataataagagagagagagagagagagagagagagagagagagagagagagagagagagagagagagagagaagacaaaatgtccatgccagacgcaacacaaagatcacatggatatcaaaggttatatacatattgagatgaagttgctggct

SEQ ID NO: 480 - DNA, 1577 bp, Zea mays
  Clone ID: 700076345_FLI
cacggcacctacccccgccccattctgcaagccttgctccatttgcgactcgcgagctcaccttccacaccctacctactcctccactctgagctcacaccaaacagcccgtgcaccaaggccaccattcaccgccaccaagaacaaacgggaactcttcacagcttctcacctcgcgtcacaacaccaagacgcacgtaggagggaacctcaagcttcagtcgtccatggctcagcagcaaacaaatcccgaagaggtggtcctcgggcaggaggtcggggccgcgagggtggccactctcaaccgcccgcgccagctcaacggcatctccgacagagtggtgtacctcctcgcacagttcctggagaaatgggagaaggatgagaacgccaaattcgtcatctttaagggtgctgggcgtgcattttctgctggtggggacctaaagatgttttatgaagggaaatcaaatgattcctgcctcgaggttgtgtatagaatgtattggctttgctaccacattcacacgtacaagaaaaccatggttgctcttgttaatgggcttgtcatgggtggtggcgctgcaatggttgcgccactaaagtttgcagttgtcacagagaaaacaatctttgctactcctgaggctagtgttggattgcacacagattgtagcttttcctacatccattcccggctccctggatatttaggcgagtatctggctttaactggtgctagactgaatgcgaaggaaatgatttctgctggtcttgctactcattttgtcagttctgaaaaattggaagaacttgaaaaacgtctactggatttggacacaggtgctgagtctgcagtccgagctgttattgaagaattttcaacagatgttcaaactgatgaagatagtatattgaataagctttcaactatcaacaaatgcttctctgcagagactgttgaagatatcataaaagcatttgaatcagaagcgagcatagacggaaaccaatggatagctccagtcctaaagggtctgagaagatcatctccaactgcactgaagatcaccctgagatcgatcagagaaggtcgaaaacagagtttgcctgaatgtttgactaaggaatttaggcttacaatgaatatactgcggtctgttgtcaatggggatgtttatgagggcattagagctcttagcatcgataaagacaatgcccctaagtggaatcccactacccttgaggaggtgaagtacgaggacatcgaccgtctgttccagccgttcagtccggagctggaacttcaggtcccatctgatgattccaacaggtggagcggcaaatacgagaacacggtctatggcagagcttcccagtgactgtatacaagatcccccagccttttgttattttcatccgaaccactgcattacggaatattcagtttgcggcacgtgtgtatttcgagtgtttgtgtagtgcgacgttccaatgtatgaactgttgcaaaggttacacgatgacatgaagtttgatccaacaccaaaaccatctattagatgggaaagttctgc

SEQ ID NO: 481 - DNA, 2082 bp, Zea mays
  Clone ID: 700076440_FLI
caaaagcccaaaccaaatccaagcgcaagagggggcaaagccgcaaagggggaggcaccaggcaccggcagccattacttactggtcctcactcccacaccaaccaaccaacctcctctgcctgccgcttctcctgctgcgggcggtcacggctgcaagtactagaggaggacatccgcttccattactgcgcctgcggaggatcggaggaaccagtagcggaggcttcgattttcggcgggcgcaataaatttcccgcatggctcggagggccgcgtcctcgctcgtctcccgctgcctcctggcgagggcccctgccggcgcgccgcccgctgccccctctgcgctgcgcaggacagtgcctgcagatgggatgcacaggctgttgccaggtgtccttcagaggttcagcactgcagcagcagtagaggagcccatcacgccgtcagtccatgtgaactacacaaagctcctcattaatggcaactttgttgattccgcatccggcaagaccttcccaactctggaccctcgtacaggggaggtgattgctcatgtggctgagggtgacgcagaggacattaaccgtgcagtagctgcggctcgcaaggcttttgatgaagggccatggccgaagatgactgcctatgagaggtcccgtatcctactgcggtttgctgatttgatagagaagcacaatgacgagcttgctgctttggagacatgggacaacgggaagccatatgagcaagcagcccagattgaagtacccatggtggcccgtcttatgcgttactatgctggttgggctgataagatccatgggctcattgtgccggctgatggcccacaccatgtacagatcttgcatgagcccattggagttgcaggtcagatcatcccatggaactttcctcttctgatgtttgcctggaaagttggccctgctttggcatgtggaaatactctcgtgctcaagactgctgaacaaacccctctatcggctttgtatatctccaaattgttgcatgaggctggactgcctgagggtgttgtgaacgtcgtttctggttttggccctactgctggtgctgctcttgctagtcacatggatgttgataagatcgcatttactggatctaccgatactggaaaaattattctcgagttggctgcaaagagcaaccttaagacagtgacactggagttaggaggcaagtcccctttcatcataatggacgatgctgatgttgaccatgctgttgagcttgcgcactttgccctgttctttaaccagggacaatgctgctgcgctggatctcgcacgtttgtacatgagcgtgtttatgatgagtttgtggagaaggccaaggctcgtgcattgaagcgcgtcgttggtgatccgttcaggaaaggtgttgaacagggcccgcagattgacgacgagcaattcaacaagatcttgcgctacattaggtatggtgttgacggtggagctacccttgtgacgggtggtgataggttgggtgacaagggtttctacatccagccaacgattttctcagatgtccaggacggcatgaagattgctcaggaggagatatttgggcctgtgcagtcgatcctcaagttcaaagacctcaatgaggttatcaagagggcaaacgcgagccagtatggattggccgccggcgtgttcaccaacagcctggacacggccaacaccctgacgcgcgcgctcagggccgggaccgtctgggtgaactgcttcgacgtcttcgatgctgcgattccgtttggtgggtacaagatgagcggcatcgggagggagaagggcgttgacagcctgaagaactacctgcaggtgaaggcggtcgtcaccccaatcaagaacgccgcgtggttgtagacgctgcaagtgtggccttgtgcacgagaaccacgtatattcatttcctggtcacatccccgaacaatgtgaaggcgttaatcagatagatgacgatgaagaagaacaactataataagatttgccctagcctgggttctcagttatctctaataagttttatggttggtgcc

SEQ ID NO: 482 - DNA, 1154 bp, Zea mays
  Clone ID: 700076441_FLI
aaccactccaggtctccagcgaagcaggctcaggcgcaacgcaacaacacaaggcggcggttatggcctctgctgctgcgacggctacgatggggacggggaaggtggtttgcgtcaccggcgcatcagggtacatcgcgtcctggattgtcaggctcctactcgaccgcggctacaccgtccgcgccaccgtgcgagacaccgctgacccaaagaaaacattgcacctgactgcgttggatggtgctaaggataggctgcacttatttaaagctagcctgctagaagagggttctttcgatgctgcagttcatggatgcgacactgtatttcatactgcctctcccttttatcacaatgtcaaggatgctaaggcagagttacttgacccagcagttaagggaacactcaatgttctcggttcatgcaagaaagcttctattaaaaaggtggttgtaacatcatctatggctgctgtagcctacaacaggaggccaaggactcctgaggtcacagttgacgagacatggttttctgatccacaaatttgtgaaacaaatcagcaatggtatattttgtccaagacgctggcagaggaggctgcttggaagttctcaagggataatggacttgaaatcgttactataaacccagcgatggttattggtcccctgctgcagcctacactaaataccagtgctgaagcaatcctgaagttaatcaatgggtcatcgtctacatatcccaatttttgctttggatgggttaatgtcaaggatgttgccctggcccatatccttgcatacgaggttccctcatcaaatggaaggtactgcatggtggaaagagttgttcactactcagaactggtgaacattatccgcaacatgtatcctacccttcctcttccggacaagtgtgcagatgacaagccgtttgtcccaccctaccaagtatcaaaggagaagataaaaagcataggcatcgagttgattccactggagacgagcgtcaaggagaccatcgaaagcttgaaagagaaggggttcgctagtttttgactcgagcaagctgtgaaacataagtgttactgtactacgtgatgttgcattgtatacatgcatcggacttcgcagttcccaagctattttggt

SEQ ID NO: 483 - DNA, 1434 bp, Zea mays
  Clone ID: 700076450_FLI
gggtatggctgatgctattgtggatctcgtgagtagcggaacgaccttgcgtgagaataacctaaaggaaattgatggtggagtagttctggaaagccaggtaaactttctcgaacacacatgcatgtgtcgggcacacactcttcagtaggcaatattttacagttggtggttcctttgacaaagagaaaagtttacccctttcctgtttcctaagatataaaattctatgcaggccactcttgtagcaagtaggaaatctctgcacaagcgtaaaggtgtgctggaggttactcatgagttgcttgaaagattagaagctcacctaagagcaactgcagaattaatggtcaccgcaaacatgaggggcaacagcgcagaagaagtggcagagagagttcttagccaaacatcaatatggggattgcaggtaataattaggaatattataactagcaataatcatgaattcatgatcttcttagaagttagaactgtcaatgtattatgtgtagttttggggcaaaagtactgctttgtgttaggaaattgagttgcattcatcatatatcatgtggtaggcctatagtgcctatatttatgtccaaaacgtagacacatagttggagtcattatacaactgtagcagctccaatatacacacatgaagaatctaattattctgcatcatttaggttttccccactgattaaggaattatagtatttggatctttttcttcttcgttgatgagggaactggcccgttagagtgagacctgtctcctaattgtatagcaaattcagtgaaactaatcactatctatgattgtaacagtactttgaaatatcaaggttggattcttatatttctgtttttgcttatgatttcatttactcaatgttgatgtgaacagggcccgactgtaagtcctgtctatcgcagacgtgatggaaaagttgatgtggaatactatgccattaatgtggttgttccacagaagttgctttacaaatctatccaacaactgagatcaattggtggcagtggagtcttggtaacaaagctgacctacatattcgacgaggagacgccaaggtggcgcaatctcctctcggagctggggttgtaacttgggcgcatggtcaacttcgggtctcttctacaagttcccatatgtactgcaccacattcgtttgtcagtaccgaagcatgtaaacccatatgcagaagtgagaccgtgtggtatctgttttgtacctcttcgcttcaggaaattttggcctgtatcttgaccatctgagatgtattgatagagttgggtaatgctgttgggcgtatgtgtatttcttgtgcggttgtgcctgacttctcttgccggggcactgaataatcggccatgtttgaataaagaaagccggtatggttctcatt

SEQ ID NO: 484 - DNA, 764 bp, Zea mays
  Clone ID: 700076454_FLI
gtgtcgtgcgccgacatcctggcgctggccacccgggacgtcattgagctggctggcgggccgtcgtacgcggtggagctggggaggctggacgggctggtgtccatgtccaccaacgtcgacggcaagctgccgccgccgtccttcaacctggaccagctgacgagcattttcgccctcaacaacctgtcgcaggccgacatgattgctttatctgcggcgcacacggtggggttcgctcactgcagcacgttctcggaccggatccagccgcagtcggtggacccgacgatgaacgcgacgtacgcggaggacctgcaggcggcgtgcccggcgggggtggaccccaacatcgcgctgcagctggaccccgtgacgccgcaggccttcgacaaccagtacttcgccaacctggtggacggccgggggctgttcgcctccgaccaggtgctcttctccgacgcgcggtcgcagcccatcgtggtggcgtgggcgcagaacgccaccgccttcgagcaggccttcgtcgacgccatcaccaggctcggccgcgtcggcgtcaagaccgacccgtcgctgggggacgtccgccgcgactgcgccttcctcaactgaaaaaggatggacatggagacctggtttattatatctcacacaagtgttcatacacaatctagagtaaagctttttttgttgttgttattattatcatgtcaggtatgagcacaaggttgaattaatggttaatgcgattgatatactat

SEQ ID NO: 485 - DNA, 1724 bp, Zea mays
  Clone ID: 700076461_FLI
gcaatggggaggaagtactactgccacgccgtggccgcgctggccgtcgtgttcgcggcggccgtcgtcgtcgctgccgaccggcgcctgtcgctggtggttggcgccgcggtggcgcccgaggaggtgagtctgctccggaaggtggccaatctgatgtggaacggcgatggcaactcgtaccagcacgtgtggccgccaatggagtttgggtggcaaattgtgctggggtcactgatcggattcttcggtgccgcgtttgggagcgtcggcggagttggtggcggcgggatcttcgtgccgatgctgacgctcatcattgggtttgacccgaaatcatctactgcgatatcaaagtgtatgattatgggagcatctgtttcaactgtttactacaatctcaagctaaagcatccgactttggacatgccagtgatcgattatgacctggctgtgctcatgcagcctatgctaatgcttgggatcagcattggtgttatttttaatgttatattccctgactggctggtcacagttctgctgataattcttttcctaggcacatccacaaaagcctttctgaagggcattgagacatggaagaaagagacagtaatccaaagggaggctgcgaaacttttggagcaaactgcaggtgaggaagcagagtatgcagcacttcctactggaccagatgttgcaccaaacaaaaaagccctcacatcagatgaggcgccatcgcttataaagaacatacactggaagaaggttggtcttctttcatttgtatgggtggcattccttgttcttcaggtcacaaagaattacactgctacttgctccccatggtattgggtcttgaaccttctccaggttccagtgtcagtaggagtgacactgtatgaaggatttgggctgatgagtgggaagagggtgttatcatcaaagggaagtggacaaactaccatgaaatttcatcaggtagtcgtatacggtctattcggtatagccgcaggactagttggtggactccttggtcttggaggtggcttcattatggggccactgttcttggaacttggcatccctccccaagtttcaagtgctacagctacctttgcaatgatgttctcatcttccatgtcggttgtcgaatactacctcttgaaccggtttccagtgccttatgctgtttatttcatcgttgttgcgtttgttgctgccatcatcggccagcatgtggtgaggaagttgatcaactggctagggcgagcatcgcttatcatcttcatactggctttcatgatctttgtcagcgccgtttctctaggtggggttggcgtctctaacatggttcacaagattgagcgacatgagtacatggggtttgaggacctttgcaagtacgatgcgtaagaagcagggaagctgaagatgtgagctatgtggtgtgcagttctccgcaagcagaagtgggataattcaaggatagaagggttccatgatgcattttggtgcgtaggaccgaagaggttctagcagcgacagttcctcgaagggaggctagctgcatggattggcttaagatgaattttgggcactgaattttcaaaacaaatgtagagatgattttctgccacggcagaatgtcgtcagtgcatttcgttgtaggaaatgtacactgcacatcttcagataaccatcctatagtactacgcgatatg

SEQ ID NO: 486 - DNA, 1131 bp, Zea mays
  Clone ID: 700076481_FLI
atggatatcaatgattttgtcaggtttttgagaagcttgggccaagcttgtatgattttctaaagagaaatagataccaacctttccctgtggaacttgtgcgggagtttggacggcaactgttggaatctgtagcatatatgcatgagttgcggcttatccacactgatctgaagccagaaaacatactacttgtctcttctgagtatataaaagttccaagtacaaagaagaattcgcaaggtgagatgcatttcaagtgcttgccgaagtccagtgccataaagctgatagattttggcagtaccgcctttgataatcgggaccataactcgattgtttctacgaggcattatagggcacctgaaataatattaggtttaggctggagttttccatgtgatatttggagtgttggctgtattcttgttgagctatgctctacacacgagaatctggaacacctagcaatgatggagagggttttgggacctctaccagaggatatgatacggaaagcaagctcttcagctcagaaatattttaggagagcaacacgattaaattggcctgaaggtgctgtttcaagagaaagcatcagagctgtgaggaaactggatcgactaaaggacttggtatcgaggaacgctgaccattcaaaggtggcactggtggacttgctatacggtctcctacggttcgagccatcggaacgcctgacagcagaagaagctctggaccatccattcttcaggaacccaacatgacttgttgagcaggcttgactcatgtgtaactctactgaaggtggtggtgggaagcaggcagagctgtccattgcaaagctgaaagcattttgctcctctataccagagagtttgtgtaaggcctgtcaatggggcttcttgtggtgataaaactgatggctttagtcacccaatgtcatgtacactagcatttttcctagggagcttagttcgccagatggcgcttgtatgttgttaaccgggatacactatgagctgtgccccgatgccctggtgccataatccaatcgcaaatgttgaaatcaagcatagcatgcgtccgtatagtttatgactgaattgtaccttggaatgcttgcccttc

SEQ ID NO: 487 - DNA, 1882 bp, Zea mays
  Clone ID: 700077454_FLI
gctactcccagtcccagctgccaaggtcttcgtcgcctcgtcgggctcgggtcctttgccggcgacgagcgcgtgcacaccagaagaatacagtggaagtggtatgcggttgtaaaacgatttcgattattccaagcggccggcgatggctcggagcccctgcgacctccgcctcctcctcctcgctgcagctgcagctttcatctacatccaagtgcgcctctttgctactcagtcccattatgcggaccgtcttgcggaagcagaaagatctgaaaatcaatgcaccagtcaattaaagtccttgatcgatcaagtcagcatgcagcaggagaagattgtagcattggaagagataaaggtacggcaagatgaagaacgtgcacatctgaggattttgataaaggatcttgaaaaaaggagtgtgcagaagctactagacaagaatgtggttcccgttgctgctgttgtcataatggcttgcaatcgaccagactatttagagagaacagttgaatctatcctgaagtatcagacatcagttgcttcgaagtttccgctttttatatctcaggatggagcaaatggagctgtgaagaataaagctttggaatataaacaaataacatacatgcagcatgtggatcttgaacctgtgcaaactgaaaggccaggagaattgacagcatattacaagattgctaaacattataagtgggccttggacaacctattcattaaacataattttgctcgagtaatcattctagaagatgacatggagattgccccggattttttcgactacttcgaggctgcagctaaactacttgataatgacaagacgattatggctgtttcgtcttggaatgacaatgggcagaagcagtttgttaacgacccaaaagctctttaccgctcagatttctttcctgggcttggatggatgttaacaaagtccacttggattgaattgtcaccaaagtggcctaaagcttattgggatgattgggtgaggctaaaggaggtacatggacatcggcaattcatacgcccggaaatttgtagaacatacaattttggcaagcatggatcaagcttgggacagttcttcgagcaatacttggagcccattaagttaaacgatgttcaaatcgattggaattctgaggatctgagctaccttagggaggataagttttcaaccaaatttggaaaagaggtggctagtgccactcctctccgtggatcagatgctgtgttgaaagcccacaatatggctgaggatgtaaggatccaatacgacgaccaagaaggtttcgagcagatagctcgtcaatttggaatattcgaagaatggaaggatggcatcccaagaacggcttacaaaggagtggtggtcttccggtacaacagtagtcaaaggcgaatatttctcgtcagcccagattctcttcgtcagctgggggtgtagcatgttgagaaggtagatttttacccttggaatggcaaatatcatggaattgcttaactggtttctgtgagcatggaggaaccgggatgcatggtgaagaaattttttttgagaagtgattgtgttgacccaaggtactgagtagtagaagcatgggcttggtttataggacatttgcaagatataatacatcgttgttatatctttctccgcatccggaaatgtttagtcagtatgggacttgttatccttgagtgtatttagggtttacacgatgcagttgtatgcgctcaaaagagtgtagcaggagctcactagctgacctgacgctcgatcctttttggtagaagaaaggtgtatctttatgaccaaatttttcttattgggcatcttggaatattaagatgg

SEQ ID NO: 488 - DNA, 1588 bp, Zea mays
  Clone ID: 700081872_FLI
ttgcaagtaataaaatacgtaacaaaccatcctgacaacaggtgggttggtgtaggtgatgctacaggggattatccatttagtcaccacaagcttaccgttcaattttcagaggcgtctgctgcccaagataggaaattggagggattagtccataaggccatccgggagctttggaggccgaatcccagtcaattaattctcctacaaacaaggggaattggtgctttgcataaagagcttccaaaagcgtgtgctttgactggcagcagtgatccgtgctacatcgaagcatatcatttggcagatccaactgatggcagaattaccctacatctaaagattttaaatttgactgagctggaactcaacagggtggacatccgtgttggcctgtctggagcactgtattatatggatggtttctctcgcactgttcgtcaccttcggaatcttgtttcccaggatccagtccaaagtagtgtgactgttggagtttcacattttgagagatgctcgctctgggttcaagttttgtattacccgttttatggaagtagtggatcaacagactatgaaggagattatgcagaagaggattcacagatgatgaggcagaagcgctcacatcggcctgaacttggggaaccggttgttttgcggtgccaaccatacaagtttcctctcgctgagctcctcctaccattagagtgttctccagttgagtatttccggctatggcctagcctaccagccatggtggagtgcactggcacatacacatatgaaggcagtggtttcaaggccaccgctgctcagcagtatgacagctctcccttcctcagtggattgaagtcgatttcttctaagcccttccatcaagtctgctcacatttcatccggacagtagctggattccagttatgttatgcagcaaagacatggtttggtggatttgtgggcatgatgatatttggggcaagtgaagtcagccggaatgttgatttgggtgatgagaccaccacaatgatctgcaaattcgtcatgcgcgcatccgatgaatccatcacgagagagatcaaatccgacctccagggctggctggatgatatcaccgacggcgctgtggaatacatgcctgaggatgaggtgaagagtgtggctgccgagcagctgaagatctccatggagaggattgccctgctcaaggcagccaggccaaaggtcccacccgcaaagaccgatcaagaggaggaagaggagcgaaagcagagcgaggaactagatgggtttggaaaccccaagggcccctcgacgctctccaagctcaccgcggaggaggctgagcaccgcgctctccaggctgccgtgcttcaggagtggcaccagctatgcaaagagagagccatgaaagcgcagtgaggtcgatttggaccgtgtggatcttacgcgcatgtataattttgtattttttcttcgtctcccattctttgcgtgtctatactgctggtttcactcactgtataccgtcgccgatttgttcattgtattctcaaatacttgtgcacgaaaaaacctgttttgtaac

SEQ ID NO: 489 - DNA, 724 bp, Zea mays
  Clone ID: 700081875_FLI
gccggcgtgcttgtgatctcaacccaagtcgtgcctccgctccggtcacccgtcgctccacgcaaccatgtcgaggaggaagaccagggagcccaaggaggagaacgtcacccttggacccactgtccgtgaaggagagtatgtctttggtgttgctcacatctttgcatccttcaatgacaccttcattcatatcactgatttgtctgggagggaaactctggttcggatcaccggtggcatgaaggtgaaggctgaccgtgacgagtcgtcaccttacgctgctatgcttgctgctcaagatgtcgcacagcgctgcaaggagcttggcattactgcactgcacattaagcttcgtgccaccggaggcaacaagaccaagacccctggacctggtgcccagtctgccctcagggcgcttgctcgttccgggatgaaaatcggacgcattgaggacgttaccccggtccccacggacagcactcgcagaaagggcggtaggaggggaaggaggctgtaggcgtctcttctgcgtgccatttgctggctcttgtcgggtggccatcatgaagctagtcctctctgggtggtgttgctgttttctgtgtttgtcaagacgagctttaattttgctctatgtggatgactgtttaccgttagtcgaacctgtatgatgttgcatggataatgttttttggctgaggaattggctcgtcatatttct

SEQ ID NO: 490 - DNA, 1038 bp, Zea mays
  Clone ID: 700081934_FLI
cgctgtcgtcactcctcgtcacccagccacgaacagaggcaccacccagcatggccctgcaggcggcgctcctcccatccaccctctcatccgtccccaagaagtgcagcctcgccgtcgcggcgaaggacacggcattccttagcgtatcccacggcgcggacgccgacgttcacggcggacgggtacgagatgagcgtcggcgtcaaccacctgggccacttcctcctggcgcgcctgctcctggacgacatgcagaagtccgactacccgtcccgccgcctcgtcatcctcggctccatcaccggcaacaccaacacgctggccgggaacatcccgcccaaggccgggctgggcgacctccgcggcctcgcggcggggctgcgcggccagaacggctctgccatgatcgacggctccgagagcttcgacggcgccaaggcgtacaaggacagcaagatctgcaacatgctcaccatgcaggagctgcaccggcggtaccacgaggagacgggcatcacgttcgcgtcgctctacccggggtgcatcgccaccacggggctgttccgcgagcacatcccgctgttccgcctgctcttcccgccgttccagaagttcgtcaccaagggcttcgtgtcggaggcggagtccggcaagaggctggcgcaggtggtcagcgaccccagcctcaccaagtcgggggtgtactggagctggaacaaggactcggcgtcgttcgagaaccagctgtcgcaggaggccagcgatccggagaaggccaagaagctctgggagatcagcgagaagctcgtggggcttgcctgagctcgccggcacggcgacggcgacatgatgactctgtcgagcagaggagctttcgcttcgttgtattatgtgtaccattagcatccattttgtttgtttctagaagttggtaatgaccgtcggagaagagcctgtaattgttcgatcatgtattattgcttacaaaatttttttcaaaaaccgatgaaataaaacaacaggcttaacatctct

SEQ ID NO: 491 - DNA, 1348 bp, Zea mays
  Clone ID: 700083273_FLI
cgtatatttggaagcacctgtgttttcgttgctttacatagctcaatgttacgtcttggaaggttaggcactattattgtcacatcagcctttttcacaaatgtataaggaaaatatcctgaatcaggaaaactaaatactctggatgtggataaagctgtcctgaatcatcttagtgcattgtaaattgttattatgcttttatatgacatttttgcagtagctttgaatcatgcaatagcaatacacagagtaaaacatatcacatcaccaccctttgtctcgctcgaagtcaaggaactcttaggtgggcaaggtaaggtagccaaactttatgctagaccagtagagggcttgaggcaagagagccaaacatggcaaggtgatccataactaaataaacttacttaaacaatcatctatgtaaaatatagcatgtgtatggtttcaggtttgcacttgcattttatgggaatccaactcgaccacaactcatagcccttgttgctcaagaagaggttacttcgtctggtcgtcagtttgaaccgcctggcatgcacatgatctatcttccatactccgatgatattagatatcctgaagaagttcatgtgacttctgatgatgcaccgcgtgcaacagatgaacaaatcaagaaagcttcgaatatattcaaacgtattgatctgataaatttctctgcatgccaatttgctaacccagctttgcaaagacactatgggatcttggaggccttagctttaggcgaagatgagatgcctgatataaaggacgagaccctgcctgacgaagaaggcttgtctaagccaggggtagccaatgctattgaggaattcaagacttcagtctatggtgaaaattatgaccaagaggaggcagaagcggcagcagggaaagcttcccgtggtaatgcttcaaaaaagcggaaggaggtcactgatgcagctgcgcagataagtgctgcttatgactgggcagaacttgcagacaatggaaaactgaaggaaatgcccacggtggaattgagatcctacctgaccgcgcatgatctcccggtttctggtaagaaagaggtacttatcagcaggatcttgactcacctgggtaagtgaagccgggtatccgaactgttagtttcctgagacccgactgacatctgtagtgctgtctcgcggatccttgtggaccgtaatcctcccccgtgcaggctacgtgccgattttttgtatagcgacaggacagcaccagttgccaatgtaacttgtgttaagtttcgtcttgtggtatcatctgcttgtcattgtcaacatgaaacatcatgtaattc

SEQ ID NO: 492 - DNA, 588 bp, Zea mays
  Clone ID: 700083315_FLI
agaaagcaaaggaggttcaggctgagaagaagaaggagagggctaagcagaagaaggagcagattgagtcagtcaagaagtggaggaagcagaggcaacaagggggattcaccaagggaaatgatgatgcaccagaccttaattttgaaggagaagaaggatttaaacaatctaagaaaaggagacctggtgtttctcctggtgacaggtctggtggtcttgctaagcgaggtaaagaaggaaagaacaggagggcaaaggattccatgtttgggcacggtggtcgtaaagggctgaagaagcaaaacaccgctgagaccactaatgatttcagaagctttaaccaggggggtcagtctcaaaacaagaagagaaagaggttttgaacttttgatggatatattaagaatttgggtgagtctcaaaaccagaagaggaagaagttttgaacttttgtgttattactattcccccctgcggcattattttgttatggtgtgtgccagaaggaaaaatagtctagggaagcagtccaaacataagacttaatgttttgctttatctggtaatggtcttcttttatcacgg

SEQ ID NO: 493 - DNA, 1307 bp, Zea mays
  Clone ID: 700083403_FLI
cagagtgaaggggcaagatgttgcttttgagccagcaaagcttctctggcttatccagagggatttcctccaaggaaaatctgttcaacaaatggtcaatgaagcccttcaacgggtgcctaatgataatggtgacaaatatattgatgaggtcaatcaaatacgagattcgttggcagttatggggaacaacagcactgcttttagcttgcctcagccgcatcttcaaagaacaaaattatgtgatatggaggacaaagaacttgaacccttatatgtaaaacggcgggagcaattaaagcagcttgtttcgtctattgtaaaaccaaaaattgtgcagggcagaactctaaatgggaaggactttgtgtctttcttgcagcagattcttgaggctttgaataaaggcgaaattccatcaacagggtctctagttgaaatttttaaaagccattcttgatcgctgtctgaaggtgtacagggagaaaatggatggcttaggcctaccagtaccggtagacaaactgcagaaacttcatgagatggcaaatggtgatgctagaattctctttgataagcagcactttggcaaacatcatgctgctcagtcagcactcaagcttgaagatgatattaaaaaggtgtacagaaacttacttctagctaatgaatatcaatcgtcaaagctgtgtgaagctcgcttttctgagtgtgaagataagatggatcaccttcaagtcttgaaacttccttcgatggcaaaattcaatgcaggctttactcactgcaaccaaagtttcgtaaaggaatgtgttggaccttcaaaagaaagctatgaacgtagaatgtcaaagatgcttgccaagtctcgtgctcttttcatcaaggagtacaataacaagcttttcaattggttggtgaccttctctttggtcatggtggtcatcgggcgctttgtcatcaagttcttcctacttgaaatcgccgcctgggtgatgttcatcttcctagagacgtacacgagaatgttctggtcagcggaatcgctgtactataatccagcttggcacatcattgtttcttcctgggaaaccatcgtgtacagcccaattcttgatctggacagatgggccgtcccaattgtcataatgctattatttggggttctttactggagatgcttcggtggtagaaggaagcggggaaggggttcgctcctcccattgtacaagaattcttataactcgagtcgtcgctcgagatcagactagttatacacgcaatgttcaagtttttttcttttaaag

SEQ ID NO: 494 - DNA, 782 bp, Zea mays
  Clone ID: 700083421_FLI
atccagcgaataagaatgatggtgcttatccaccaacagaccctgatatgaagaaagctaataaggctagaggagctaggaagttttctgagcaaccaagacctgggaatttaactcaagtggatcttgcacgtccatctcattttgatgaagcaagtagccatgtgccagaactcaagaaaagccgatccagcaagttaactagtcaaaaagatttggttgcagaaagaaaacgacaacgcgaggatattgacactctgctttcgtcatctcttatatcatctacgaaaccttcctcaagtcgtaatactaagaaacagaaatgagaagactccagcaaagcttttgtgaagcaattttggtagcaatggtgcttggatcacgagtttccatcttccgaagcaagtagaggaaagctaactgcctgtaatctgggagctgtatgtgcagcaactgacaaacatccagtggacccaaggagccctccctccatacggttgcaaaagtgctggaattttttggacggctgttaatggtttattacgtcattttatttcccattttcatccgtttggatgcgagcaaaatgagaccatacagacaaatagagcaatcatactgcttgttgaggcgcaagccaattttgcagtgtacataactgtaagtagcacccttgtagcaagaaggcagattagcatttgaacatgcctggtggtgtccttaaaatgaaatgtagcatgtgtggtgtgcagccaaattacagccgaagctctttggccctc

SEQ ID NO: 495 - DNA, 1061 bp, Zea mays
  Clone ID: 700083446_FLI
gatagtttgttacttttgagtagatatttgcctatcccttccgatgcccaataccagcagcattgcttgcattatgttggtattgggcatcggaagggataggcaaaaaggatatggttgtgcttccttataaggatagtttgttacttttgagtagatatttgcaacaacttgtcatggaatctcttggaaaagaattcgacctggatggcaaccgtgttaatcaagggctaactgtatatggtaacaaaggaagcactgaccagcatgcttacattcagcagctgagagaaggtgtacacaacttctttgttacgtttattgaggtcttgcgtgacaggcctgctggtcatgattgggagcttgaacctggagtcacgtgtggtgactatttgtttgggatgttgcagggaacccgttctgctctttatgcaaatgaccgggagtctatctctgttactgtgcaagaggtaactcctagagctgttggagcactgattgcactttatgaacgtgctgtggggatttatgcttctttggtaaatatcaatgcctatcatcagcctggtgttgaggctgggaaaaaggcagcaggagaagtattggcccttcagaaaagggttctgactgtattaaaggaggccatctgcgagaaccctactgagccattgactctagatgaaattgcagatcgctgccattgccctgaagatattgagatgatctacaaaataatccagcacatggctgctaacgacagagcacttatagcagaaggcagctgcggctctcctcgcagtgttaaggtgtacctcggtgaatgcagtgtggacgaagatatgcaggccgcatagattctgtgtctggatccgtgtaacattgttggaataaatcagaagcaacacaatagcgatgctatgcatgggtgtcgctgatgctgatgtctcattagtttcttgtttggtggtgcttgcacacgattgccggaacgatgtaattttagaatttgatttttttggccccttaaaatataaaatacaaagatagaaggtggtgtccgc

SEQ ID NO: 496 - DNA, 1209 bp, Zea mays
  Clone ID: 700084906_FLI
gggcgagatctcctctctacaggcagccagagttctaaacttgaagctgggcagcaaaagattgcagcaaattcgtgagatataagattcgccacaccgacacctagatgtcacacgccagcccgcaggtggtatataataatagtgaaaaaaagagaagctgctgctgggatggctgcatttatgcaggcacaccgctgccggcagccacgactggttgggtagtagtaaaaccaggtaggtgtggctggctcgtgcagcggcggcaggcggcagtgagagcgatgagcgcggcggcggcggcggcgagctcggtcaccaagttcatcaagtgcgtcacggtcggcgatggggccgtcgggaagacctgcatgctcatctgctacacctgcaacaagttccccacggattatatccccaccgtattcgacaacttcagcgccaatgtctccgtgggtgggagcatcgtcaacttgggcctctgggacacggcaggccaggaggattacagcaggttgaggcctctcagctacaggggtgctgatgtgttcatcctctccttctccctggtcagcagggcgagctatgagaacgtcctcaagaagtggatgccagagcttcgccgattttcacctactgttcctgtagttcttgttggaaccaaactagatctccgtgaagacagatcttaccttgctgaccattctgctgcttccatcatctctgctgaacagggagaagagctcaggaagcagataggtgctgtggcgtacatagaatgcagctcaaagacacagaggaacgtaaaggctgtgttcgacactgcaattaaagtagtgctgcaaccaccgaggagaagagaagttaccacgaagaaaatgaagacaagttcgaaccagtctctgagaagatacctctgtggaagcggatgtttcacatcgtaaagcacagactcttctgcgactgttgtactggacttgctagatggttgcagctctatgaatgagtagtcccctccgcagccactgggaacttctggttctctgctaccttccgatagagtgctctttgcgttcaccagctgtgcaaaatgaagtgaggttctagtttctaaattccctacgaggtgtaccttctttagtatgaatggtgggctatttagcagttcagcaaagtgtgaagtgacccttctatgcatgttttgtttcc

SEQ ID NO: 497 - DNA, 1111 bp, Zea mays
  Clone ID: 700084920_FLI
gtcaacggtctcgagctacgcttctgccagcagtgcagcaggttccacaacctggccgaatttgaccagcaaaagaaaagctgtcgcaagcgtctagcaggccacaacgaacgccggagacggccacctcctggaccccttgcgtcacgatatggccgtctcgctgcaccgctcggtgaagagcccggcggcaggttcagaagcttcatgctggatttctcatacccaagggttccaagcgccatgagggatgggtttccagcggttcgacctggtggtgaaagggtgcctggcagcaatatccagtggcaagcagcgagcctagatcctcctccccctcaccatcagagcgcggcagcaggatacggtgcccactcgtacgggagcccgggtagctcgtcgtcgtcgaggccaccggtgttccctgctggcccggagctccccccaggcggtggatgtctcgcaggagtccccacggactctagctgtgctctctctcttctgtcaactcagccatgggacgctgctggccacagcgccggccacggccacggccacgccgcgtcactgcccgcaacagcaggcttcgacggcaaccccgtggccatggcgagtagctacatcgcgccgccaagcccctggaccgactcccgggcccacgaaggcgggcggcggaacgtgcctcaactgccacccgacgtccccctcggcgacgtgcactctggcccaggcacccatcacggccagttctcaggtgagctcgagcttgccctgcagggaaacaggccagccccggcgccgcgcaatggccagggctccgcgggcgcgttcgaccaggccggcagcacgacggagtggtcgctctaggaggccaaataaaagcgcggcacatcgtcgtagccgcacagcgagatggagcttgaagcctggctccgctagctacctgcatgcgctgtttgcttgcctagaggctagagcatccagtatgataataagcgaggaactagtgcagtgccggccaggagactgatttcttttgcgcttgtccatgaactcgtctgttgcgtctatgtacacctccatggtttgaactcgtcggggacttcgctcg

SEQ ID NO: 498 - DNA, 1168 bp, Zea mays
  Clone ID: 700084960_FLI
atcttgatgaacatcaagatcaggagaccaatccccttctgttagctctagatgaacagaggccaactaaagagcagattgtaaagcaatggtatagtcaggacgtgttcacagaagcagcaactggcattactgagcagagtgacactgaagatgaaagggagagtttgcaaaggaatatgaagaagatggttactggcaaaacggaaaaagtggctaaagcacagcgtttgcaacgagatgatattgagattgtaccagcagaacctgtccgagatgaagaggatacgtcttcatcttctggtgaatcagatgtttcggaggatgaactcgatgattacagaaaggctgaagtactagcctatgctaagaagatgctgaggaagaaacagagagagcagatacttgatgatgcttacaacaagtacatgtttgatgatgaagggttacccaactggtttgttgaggatgaaaaaaggcataggcagcccatgaagcctgttacacgtgaggaagtagctgcaatgagggctcagtttaaggagatcgatgcccgcccatccaagaaggttgcagaggccaaggcccggaagaagcgtgttgccatgaagaaactggacaaggctcgccaaaaggcagatgctatagctgaccagaatgacataaacgagctatcgaagaggaagatgattgaccggatttacaggaaggcgatgccaacgaagcctcagaaggagtatgtcgttgcaaagaagggggttcaggtgaggactggcaaagggaaggtgttggtggatccacgtatgaagaaggacaagcgggccagcggaacttgtaagaaagggaagaagggcggcaaaggcggcaaggggaagggtggtcagaaaggcatgagagggaaaactgggaagaaggccgggaaagccccgagttaaggaagatgaggagctaagcacggctgggatgctggatgccttcctcccagctaattttttgtctcgtcctactacagctactctcagtaggcagatgctttgaagtcgtgtgatgataaaatttatgtgttaagttttgtagcgtgagttatcatggctacaatttgttctgaaactagtggtcactaattgttggggacttgttctcaagtgctaagagttaagaacaaggc

SEQ ID NO: 499 - DNA, 2272 bp, Zea mays
  Clone ID: 700089741_FLI
gacctaaaaaagttggttccttgtactatcgaggaatttgccaagagaattgctggtgctgaagaaagtacgtcgtcagaatcttctgaaactcctgagtcaccagaagaagagaaaaggcctttccaaaggggagatagggtcaagtatgttggaacctctgcagtcgttgaagcagatcagaggatcattttggggaaaatacctactcaagatggctcaaggaatgcctatacttttattagtggaaggggtctatcaaatggacagcgtggggaggtatatgaggttaatggggatcaggttgctgtcatatttgatccttctatagagaaatcacacaatgcccatgaagatgtaactaacaaggaggaaaatggatcagcaactgtttactgggttgattctcaggatattgcgcatgatcatgataccgaatcagacgattggcatattgcacttgaagcactttgtgaggttttgccatctctactgccaataattgtctactttccagacagttctcaatggttatctagagcagtttcaaaatcagatcgcagagagtttgtgcaaagagttgagaaaatgtttgaccggcttaccggaccggtagtattgatatgtggccagaacttactggcagcagcacccaaggataaggaacaacctgcactgatgttccacaatctctctcgcctgtcttcactgccatccccactgaagcggttggtagggggcctgaagggagaaagatattcaaggtccagtgacatatcaaagctcttcaccaatagtctaactgttcctcttccagaggaagatgaacaactacaactttttaataatcagattgaagaggatagaaaaattatgatttcgaggcataaccttgttaaattgcacaaggtgcttgaggagcatgatctttcttgtgtggagcttttggatgtgaagttggatggtattgttttaacaaaacaaaaagcggagaaggccgttggttgggctagaaaccactatctgtcatcaacaactcttccttctatcaaaggtgacaggttaatcattccccgtgagagtctggatatatcaatcgagaggctgaaggaacagggtataacagctaagaaatcctctcaaaatctgaaggttttggctaaagatgagtatgagcgcaatttcatttctgctgttgtgcctccgaatgaaattggagtgaaatttgacgacatcggtgcacttgaggacgtgaagagaacattggatgagcttgttacacttccaatgaggagacctgaacttttttcgcgtggaaatttgttaaggccctgtaaaggtgttttgctttttgggcctcctgggacaggaaaaacactcttggcaaaagcccttgcaacagaagctggagcaaattttatcagtataactggttctacactcacatcaaagtggtttggagacgcagagaagctcacaaaggcccttttctcctttgcgactcgactagctcctgttatcatatttgtggacgaggttgacagcttacttggtgcaagaggtggtgcatttgagcatgaagcaacaagaaggatgcgcaatgaattcatggcagcttgggatggtctcaggtccaaagagaaccaacggatccttattcttggtgcaacaaatcgtccatttgatctggatgatgctgtgatacggcgtttacctagacggatatatgttgaccttccggatgcgcagaaccgaatgaaaattctaaagattttacttgcgaaggaaaaactagaatctgattttaagttcgatgagcttgcaaatgccacagaaggctattcagggagcgacctaaagaacctatgtgtagctgcagcatataggccagtccatgaactactagaagaagagaaaaagggacgtgtgagtaacgaaaacagttatctgagacccctttgcttggatgattttatccaagcaaaagctaaggttagctcgtctgtttcttatgatgcaacaagtatgaatgaattgagaaaatggaacgagcagtatggggaaggtggcagcaggactaaatcaccatttgggtttggcaactgacactacagtagagatttaccaatactgtatctttgtaacatttaggctgcctcttgttggtagattagggagtcagttccattttttttaccatgagcttatttgaacaacctcgtaatcaccccgtgcaaacaaaaaagaatctagttaaacgccaattttgcct

SEQ ID NO: 500 - DNA, 794 bp, Zea mays
  Clone ID: 700090059_FLI
cgagggactcgcgcagctcttcgaccaggccggcgtcgtcgaggtcgccgaggttatttacaacaaagagactggccagagccgtgggtttggctttgttaccatgagcactattgaggaagctgataaagccattgagatgttcaaccgctatgacattagtgggaggcttctgaatgtaaacagggcatctcctaggggcactcgcatggaaaggcctccgagacaatttgcgcctgctttcagagcttatgttggcaacttgccatggcaagctgatgactctaggctggtgcaattgttcagcgagtacggagaagtcgttaatgctgcggttgtctatgatagagaaaccgggcgctcacgaggattcggttttgtaacgatggtgtcgaaggaggaactcgacgacgctatctctgccctggatggacaggaattggacggccgccctcttcgggtgaacgttgcagcagagcgaccacagaggggcttttgatgcggcggtacgagagagatggctgcttgtttgtgatgagagcacggagacacaacgcaggaggaacggtacaaattagcggaagctgatgctgtcacaagttgctagatccctcccttagcttcctgattttggttcttgtcgacatcatcatgagttaaattatccaagtaggcttctatgtttgatctatcccgattcccgatgccttatcaatttatcatcgtggcaaatgttttgttggtaaaaccataggagcaaacggagattatttatatctgacgtataaaaccgt

SEQ ID NO: 501 - DNA, 1878 bp, Zea mays
  Clone ID: 700090136_FLI
tcagcgggtcttcaatatttacattaacaaccagactgcagtcaagggtgctgatgtgaatgcctgggcggccgtaagtggtgctaccacccttattggcactccggtgtatcaggactatgtagtgagcacatcgggtttaggggccatggatttatgggtagctctccatcccaatcccgactcgaagccacaaatatatgatgctatcctcaatgggatggaggtgttcaagctacagcttaccaatggcagccttgcagggctgaatcctgtcccaagtgttgccctggtgcctgatgggacaactaagaagaagtcaagtgttgggcctattgtcggtggagtggttggaggcttggtggttcttgcacttggctattgctgctttgtgatctgcaagcgcaggaggaatgccgggaaggatgcaggcatgagtgatgggcattctggttggctgcccctgtctctttatggcaattcacacacttccagttcggccaagtcacacactactggtagctatgcttcatctttgccatccaacctgtgccgccatttctctttcgctgagatcaaggccgcaacgaacaactttgatgagtcccttattcttggtgtgggtggatttggtaaagtttatcgcggtgaggttgatgggggaacaactaaggtggctatcaagcgtggcaacccgttgtctgagcagggtgtgcatgagttccagactgagattgaaatgttgtccaagctccgccaccgccatctggtgtcactgattgggtactgcgaggagaagaatgaaatgatcctggtctacgattacatggcccatggtactctccgtgagcacctgtacaagacccagaagccacctcttacctggaggcagcgtttggatatctgtattggtgcagctcgtgggcttcactaccttcacactggtgcaaagcacaccatcatccaccgtgatgtgaagacaacaaacatcctgctggatgagaaatgggttgccaaggtttcagattttggtctgtccaagactggcccatctatggaccatactcatgtgagcacagttgtcaaaggcagttttggttaccttgaccccgaatacttccgcaggcagcagctcacagagaaatccgatgtctactcgtttggtgttgtgctgtttgaggtcctctgcgcacggcctgccttgaaccctactcttgcaaaagaagaagtcagcttggcggagtgggcgttgcactgccagaagaagggcattcttgaccagattgtcgacccctacctgaagggaaagatagccccacagtgcttcaagaagttcgccgagacagccgagaagtgtgtttctgatcagggcatcgaccgcccttcgatgggtgatgtgctctggaacctggagttcgcccttcagatgcaggaaggcgcagaagagagcggaagccttggctgcgggatgtcagacgagggcgctcccttgatggtcgggaagaaggacccgaacgacccatcgatcgagtcaagcaccaccaccacaaccaccacttctataagcatgggcgaccaaagcgtcgcgagtatagactcggatgggctgacgcctagcgccgtcttctcgcagatcatgaaccccaaggggcggtgaggtaaagctggccccattcgttaccttgcaggcgtaatttattcattcagaatatattttttcttaaatgttctctcaagttaaggcttaagaaccagaagtgtgaggattgtttcgtattagatattctgccttgccttgtactacttccttctccgagtattgtaatgactatacaatctgttggcttgtattgtaccgctgctattgacccagccagt

SEQ ID NO: 502 - DNA, 776 bp, Zea mays
  Clone ID: 700090174_FLI
cactcgagagacgacacgacgcgagagccgtgccggggaagagaacgcgccgcaccgggcagcgaacgaaaccaagccaagccatggcagccaaccccaaccactgcctccgccgcctcgcctcagctctctcccacggtccccggcctccgactcctcccctatccctcctcttcccccgcctcgcgctctccagctccggcccctccacgggcccgccgccgccgccgccggatgccgtaaggaagggggagggagaggaagcggcggaagctagggccgccgaagccgacgccgaagcggggaaggaggaggagcatgaggccgacggcggtgcgcacgtgaacaaggccaccggcgaggtcggcggcccgcgggggcccgagcccacgaggtacggcgactgggagcgcgccggccgctgctccgatttctgaaccgccgctggccgcgaggtgaggccgtcagcgtcagcacggaacctgtggatgtggttccgtatcgtactgttggatctgtctgtcgtgtgctagtagtgtgcctgttgtcacctgtgcaaagggcggcgttaaatttgcgttttgcttcgtcttctggggaataaacagagttgacagtactcggctcaaaaagttcagatcgactcagttgttgttgtttttttttttttgccttgatttttcatctcgctcagctcgagtgagcaggttctgttgttaggttgcctgatcttggttatcaccggacgtaatgaaacaatggaacgcagtgcacac

SEQ ID NO: 503 - DNA, 1063 bp, Zea mays
  Clone ID: 700090183_FLI
gagaaatagcgttttgtgctatcacagctgatgagcaagttaaaggctatggaacaagattaatgaatcatttgaaacaacatgcacgggatgctgatgggctcacacatttcttaacctatgctgataacaatgctgttggctattttgtaaagcagggtttcacaaaggagatcacattggacaaagaaagatggcaagggtacattaaagattatgacggaggaatattgatggagtgtaaaattgacccaaagctgccatatgttgatgtggcaacaatgattcgacgtcaaaggcaggccattgatgagaagatcagagagctttctaactgccatattgtttattcaggaattgattttcaaaagaaagaagctggcattccaagaagactgataaagccagaagatatccctggtctcagggaagctgggtggacgcctgatcaattggggcattctaaatcacgatcatcattctccccggactataatacttacaggcaacagcttactacccttatgcagacagcgctgaagaatctgaatgaacatcctgatgcttggccattcaaagagcctgtggattcacgggatgttccagactattatgatatcatcaaagatcctattgatttaagaacaatgttaagaagagtcgactcggaacaatattatgtgaccctagagatgtttgtagccgacatgaagagaatgttcagcaatgcaagaacttacaattctccagatactatctattacaaatgtgcgacacggcttgaaaacttcttctcgggcagaattactgtactgcttgcacaactctcaaccaagagctaggctggcgtgggctcactggactggacactactgtcgcatgttgtaaaattattaagttgtattgatatagttgtcaccttgctgaatgttacgcacggtgatgaacttttagtttagcatgtagtttttattttaaccaggagggacactgattgatctttacatttcggtctcaacctggccggcctaataatatagattgaggagattcttcagtttcc

SEQ ID NO: 504 - DNA, 1293 bp, Zea mays
  Clone ID: 700092144_FLI
gctgcagtactgcaaatgaagtgcaaaatggccagcagtagtagagtagtagcagccgccgccgtccttgtagccttttgcgccgccgccctctcgtcggccacggtgaccgtgaacgagcccatcgtcaacggcctctcctggagcttctacgacgcgtcctgcccgtccgtcgagggcatcgtgcgctggcacgtcgccgacgccctccgccgcgacatcggcatcgccgccggcctcatccgcatcttcttccacgactgcttcccgcagggctgcgacgcgtccgtcctcctgtctggttccaacagcgagcagaagcagggacccaaccagacgctccgtcccgaggcgctcaagctcatcgacgacatccgcgccgccgtccacgccgcctgcggccccaaggtgtcctgcgccgacatcaccacgctcgccacccgggacgccgtcgtcgcgtccgggggtcccttcttcgaggtgcctctcggccgccgcgacgggctatcgccggcgtccagcgaccaggtcttcacgctgccgggccccgacttcgacgtgcccacgctgctcgccgcgttcaagaaccggagcctggacacggcggacctcgtggcgctctccggggcgcacaccgtgggtcgtggccactgctcctccttcaccagccgcctcccgcccaacgccgacgacggcaccatggacccggcgttccgccggacgctcgcggccaagtgcgccaaggacgccagcgcggcgcaggtgctggacgtgcgcacccccaacgccttcgacaacaagtactacttcgacctcatcgccaagcaggggctcttcaagtcggaccagggcctcatcaacgaccagaccaccaaacgcgccgccacgcgcttcgcgctcaaccaggccgccttcttcgaccagttcgccaggtccatggtcaacatgagccagatggacgtgctcacgggcaacgccggagaggtccgcctcaactgcgcagtgcgcaacgccgcccgcgtcgtctcagcagaccagctcgagaccgccgccggcgacgaggggctcgcggccgacgcgtgattagaattttgttttacaataaatgggtggcgagcgcgagttgcgagtagaacgagagccaagagctgactgttgtggtgtgtggctcatggaagcctgtcttttgctgttgcttctccagttctccttgtcctatctgtacggcgcgtgcactactctctccttatattttttttcttcatttctcgtgaaaaaggcacttcatttacc

SEQ ID NO: 505 - DNA, 1254 bp, Zea mays
  Clone ID: 700092716_FLI
ccggcctcctcctccttcccgtccatcgccgtcgccggggcgccctacaacttcaaaatggcggctaccgccaccgccatggctatagcaactatctcccccgccgctccgatcccatccgcgcccttcccatccctccccctcggcctccgcctccgccctcaacccctccttttcgctgcttcccgccgccgcctcctccatgttcccaaagccgcctcctgggacgaatccgtccccgaggatggtggagatgcggaggaatccgttgccgctggggacgacgaggacgaggacgagaagccgcggcccgagccggtgtcctcctccgagttccagttcgcggcgccacccgagggctacgtcgagcccgcggcgtttgacgagctaccgccggagtccccagaagacgtggcggcggcgtacgaatctctctacgggccggccttcagcggcgagacattgctggggaacaatgtcttcgaggtcaaggtggtcgaccccatcgacatggaccgggagcagcgtccgaacgacgatttcaccgagcgcgtcgtgcaggtcaaccgcgtcaccaaggtcgtcaagggagggaggcagctctcctaccgcgcaatcgtcgtcgttggcgacatgaagggccacgttggtgtcggcgtgggaaaggccaaggaggtcacggaggccatcaccaaggccgccatgaacggccggcgcaaccttgtcacagtgccgctaactaagtactccacattcccgcacagagctgatgcggactatggagcagccaaggtgatgttgaggcctgcttgccctggatctggtgttattgctggtggagctgtgagggttgtgttggagatggctggtgttgaaaatgctctgggcaagcagctgcgcagcaagaaccccctgaacaacgcccgagccactatcaaggcgacgcagatgatgaagcagttcaaggatgtcgctgaggagcgtggtattccaatggaggagctgtggaaatgataaaaacaattcgaaaccaaggcccccccttttgtagcattatttctcctgtcgctgtatttttcttaaggtcttcatttttctgctgtatctatcatcacggtttctttttttgcatctcttctgagattctgtgtgtgggaattgagtccatgagatctgaccctatatttgtactcttcacatatgtacactactcgtggaaggaaattcagaccaaagaatgaacagattcagcac

SEQ ID NO: 506 - DNA, 1369 bp, Zea mays
  Clone ID: 700076360_FLI
tagctacctactactcaagtatccatccttattgagtacagtgttgatccatggactcggaaggagttgtagcagcaaaggtggcagatgagactactaaaccggcaatccaagaagacggcgccgagagcaaggccgggatgactgatctgctgatgctgaccgacaagtcgcagctgcaggcgctggcgatgctgctgcggaacaacgaggagctcatgatgagccaggcgatcaagtcggagacggagcgcattgagtacctcaagacggtgagcgactgctacacgcggacgatgaagctcctcgacgattccatggcggccaggaccacgtacgagcgttcgggcggaatgaggagcctcgtcgcccgggacatggacgactacgtcgtctacggcctcaacgcgtgcttgcagaacgtccgcaactgctgcgtgcgcctggacgccatcgacaagctgcgggcgcactacgacgccctcgccgacgccgtcgccgacccggccgccaacgtcgagggcctcgccgcggaggcgtccgagtacaaggccgccatgtggcagtactgctacaaccagcggagcgcctccgcgcgggcgcactcccgcgcctactcccaggcgctcaagctggagggcatcgacttcgccgagctggtgcggaggcaccagctccggctcgggtacggcagcaagggcgaggagttcgaggacctggacgacacccagaagctggaggtgtacaacagcatcatcgtcgagtcggggcgggcggggctaccggtgcggatgttctcgtcgggccgctctgccggtggccctaagattgcagccacgacgtgggcggaggcagtgagcgtcttcatcatggcggcgggcaacctggcgtgggacgtgttcaccacggagcacgaggtggaggccatcctcaagggcagcctcaacctcctggcggggctaggcggctttgccgtggaggccgtcgtcggcgcggctgtcaccaaggcggtcgcaaacgtcggcgccggcgtctttgcttgctctctcgccggcttcgtcgtgggcgccatagccgggctgattttcgtcggcgtcagcggcctcctcattaacctcatcatcggctcccctaggaaggtgcctgacatgagcaagctcatgttccacaccgccgtcatgcccgatggaatggcccttgcgtatgcggtatctcattaattacttattatcatcgcagtgactaccaactgcttcagatcctactgttggaacgcgcgtggaaataagaagagagggcacaataaataataattgtaataaaattaataattattacaatgataataattatctatctatctctattt

SEQ ID NO: 507 - DNA, 1631 bp, Zea mays
  Clone ID: 700076361_FLI
ctccctcctgccgggtccttaataaagagcagcagcgcaagaggttggtagagcgagcgagaagaaggcaatggcggcggagagcttcctgttcacctcggagtccgtgaacgaggggcacccagacaagctgtgcgaccaggtgtcggacgcggtgctggacgcctgcctggcgcaggaccccgacagcaaggtggcctgcgagacctgcaccaagacgaacatggtgatggtgttcggcgagatcaccaccaaggcgagcgtggactacgagaagatcgtgcgcgacacctgccgcgagatcgggttcacctccgacgacgtggggctcgacgccgaccgctgcaaggtgctggtgaacatcgagcagcagtcccccgacatcgcgcagggcgtgcacgggcacttcacgaagcggcccgaggagatcggcgccggcgaccagggccacatgttcgggtacgccaccgacgagacccccgagctgatgccgctgagccacgtgctggccaccaagctcggcgcgcgcctgacggaggtccgcaaggacggcacctgcgcctggctcaggcccgacggcaagacccaggtgacggtggagtacgtgaacgagggcggcgccatggtgcccgtccgcgtgcacaccgtgctcatctccacccagcacgacgagaccgtcaccaacgacgagatcgccgccgacctcaaggagcacgtcatcaagcccgtcatcccggagaggtacctggacgagaagaccatcttccacctcaacccgtcggggcgcttcgtcatcggcgggccccacggggacgccggcctcaccggccgcaagatcatcatcgacacctacggcggctggggagcccacggcgggggcgccttctccggcaaggaccccaccaaggtggaccgcagcggggcctacgtcgccaggcaggccgccaagagcatcgtggccagcggcctcgcccgccgctgcctcgtgcaggtgtcctacgccatcggcgtgccggagcccctgtccgtgttcgtcgactcctacggcaccgggaccatccccgacaaggagatcctaaagatcgtcaaggagaacttcgacttcaggccagggatggtcaccatcaacctcgacctcaagaagggcggcaacaggttcatcaagaccgccgcatacggccactttggccgtgacgacgccgacttcacctgggaggtggtcaagcccctaaagaaggcatccgcttaagaatgtattgggaagttcactggacatgaggttcatcttcgtctggctctgctgatacctgcaaggattgctgctgctgctgccgcccctggatgtgtgtttgatcagtgactggctgctctgctccatagaagatgaatgaagagagagatggtgaagaaggctttggcaaatggcaattgccgcagcaagccatgtcggcgccactgaccggcttagtgattggtataatttggtgtggcagcagccaggattaatgcgctggtcttttatctttactactagtttggtctcgtccggtatcttatttttctttccccttttcgagtctgtactgaaactgctgagagatttgcagttttgatctatcatatcctttggt

SEQ ID NO: 508 - DNA, 1798 bp, Zea mays
  Clone ID: 700076402_FLI
ggtaggtggccggacggtggtggcatcgccaattcaactccgcatctgaatcggcactcggcagcgcgccagctccataggaggagatggcgctcacaagaatcggtcttgctggccttgcggtcatggggcagaaccttgccctcaacattgcagagaaagggttccccatctctgtgtacaacaggacaacctccaaggtggacgagaccgtgcagcgtgccaaggcagaaggaaaccttcccgtctacggcttccatgaccccgcgtcctttgtgaagtccattcagaagccacgggtggtgatcatgctcgtcaaggccggcgcgccagttgaccagaccatcgcgacgctcgcagctcacttggagcagggcgactgcatcatcgatggggggaacgagtggtacgagaacacggagaggagggagaaggccatggaggagcgcggcctcctgtatcttggcatgggtgtctctggaggagaggagggtgcccgcaacggcccgtccttgatgcccggaggctcgttcgaggcttacaagtacgtcgaagacattgtcctcaaggtggctgctcaggtccctgacagtggcccgtgtgtcacgtacattggcaaaggtggatcgggcaactttgtcaagatggttcacaacggaatcgagtatggcgatatgcagctgatttccgaggcatacgacgttctcaagtcggtcggtaagctcaccaacagtgagctgcaccaggtgttctccgagtggaacaagggcgagctcctgagcttcttgatcgagatcacggccgacatctttggcatcaaggacgagcatggcgatggctacctggtggacaaggtccttgacaagaccgggatgaaagggacagggaagtggacggtgcagcaggccgccgagctgtcggtggccgctcctacgatcgaggcgtccttggactcgaggttcctgagcgggctgaaggacgagcgggtggaggcctccaagatcttccagggtgactactactccaccggctcgccggtggacaaggcgcagctggtggaggacgtgaggcaggccctgtacgcgtccaagatctgcagctacgcgcagggcatgaacatcatcaaggccaagagcgcggagaaaggctgggggctcaacctcggcgagctggccaggatctggaagggcgggtgcatcatccgcgccatcttcctggaccgcatcaagaaggcctacgacaggaacccgggcctcgccagcctgctcgtagaccccgagttcgcgcaggagatcatggacaggcaggcggcgtggcgcagggtggtgtgcctcgccatcaacaacggcgtcagcaccccgggaatgtccgctagcctggcctacttcgactcctaccgcagggacaggctgcctgccaacctggtgcaggcccagagggactacttcggggctcacacctacgagagggtcgacatgcctggctctttccacaccgagtggttcaagattgcgcgcaacatctccaacaactgatgagctgctcaacggatggcatgcccggtgttgactactccagtcggtaatgagatttcctgcaggaacttgtctattgatctttgtaagttaattatttatatgaataaaataagagcagacatgcttgtgtttgggcaccctctgttttctcctccctgttaatcaatgcaccatgctccaaaggtgatgtacataattcagacaagtctcgatgatgtacatgttacagaactagcgaaagagttcagcttggtcgccgc

SEQ ID NO: 509 - DNA, 2213 bp, Zea mays
  Clone ID: 700076492_FLI
cttgcttgccagaatgatggcatcaaacttgtactgctctcagattgaggatctcatgtttgagttgtctatgtggcgatgcagtgatgaactgcgcatgcgagctgatgtgctgcatctctccactaagaaggatgccaaacattacatagagttttggaagaaggttcctccaaatgagccatatcgggtgatactgagtgatgtcagggataaactgtacaacactcgtgaacggtcacgagagcttttatccagtgggcattctgatattcctgaggaagctacattgacaaatgttgagcagctgttggagcccttggaactatgttacagatcactctgtgcttgtggtgactctgtaattgctgatggaacccttctggatttcttgcgtcaagtgtccacctttggactctcccttgtgaggcttgacattaggcaagagtcagataggcatactgatgtccttgatgccatcactacatacctggggataggatcttaccgtgaatggactgaagaacgccgccaagaatggttactgtctgaacttaatggcaagcgccctctgtttggctcagaccttcccaagactgaggaaatttctgatgttctagacacattccatgttattgctgagcttccctctgacaattttggtgcgtatatcatttccatggcgacagctccgtcggacgtccttgctgttgaactcctccaacgtgagtgtcatgtgaaaacaccacttagagtagtcccgctgtttgagaagttggccgatcttgaggctgccccggctgcattggccagactgttctcaatagattggtacagacagaggatcaatggcaagcaggaggtcatgattgggtattcagactcgggcaaagatgctggtcgcctctcagcagcttggcagctatacaaagctcaggaggagctcatcaaggttgctaaggactttggtgtgaagttaacgatgttccatggacgtggtgggactgttggaaggggtggtggtcccactcaccttgccatcttgtcccagccaccagacacgatccacggatcactcagggtcactgtgcaaggtgaagtcattgaacagtcatttggtgaggagcacttgtgctttaggacactgcaacgtttcacggctgctaccctggagcatggcatgcacccaccaaatgcaccaaagccagaatggcgagcccttcttgatgagatggcagttgtggcaactgaggaatatcggtccattgtcttcaaagagccacgctttgtcgagtatttccgccttgcaacccctgaaacagagtatggtaggatgaacataggaagcaggccatccaagagaaagccgagcggaggtatcgactcactccgagcaatcccatggatctttgcttggacacaaacgcggttccacctcccggtctggctaggatttggagccgcattcaagaatgtcctccagaaggacatcaggaacctccacatgctccaggaaatgtacaatgagtggccatttttcagggtgactattgatctggtggagatggtgttcgccaagggtaatcctggcattgccgcactgtatgacaaactcctcgtttcagaggaactgcatccattgggtgagaagctgagggccaactatgaggaaacccagaagcttctacttcaggttgctgggcacagggatcttctggaaggtgacctctacctgaagcagcggctccgcctgcgtgatgcgtacatcaccaccctgaacgtctgccaggcctacaccctgaagcggatccgtgacccggactaccatgtcgcgctgcgcccccacctctccaaggagatcatggactcgaccaaggctgcggcggagctggtgaagctgaaccctggcagcgaatacgcaccggggctggaggacaccctcatcctgaccatgaagggcatagcagccggcctccagaacaccggttaaaccacgaagaggggatcttttttctcctcctgatcattggctctaggtccttcgtattttcgcggattgtaacttcggccacctctctacaccgtgaggaaataatggtggtttctgcaaaagtggtggtaaataaaagggcgacaactatcttgtttttcatagtaacttataactttacgatgcgataatggaacatggcttgcgttatctgtttctcgtg

SEQ ID NO: 510 - DNA, 826 bp, Zea mays
  Clone ID: 700076531_FLI
gtgccgctgatgcttcgcgtctcctactccttcctgcttccacctattaatccaccccactctcttccctccccgttccacccgcctctaccgccgcgagatccggctccgcttccagaagcttctggaacgcccgttccatgagcgtctgatcggccgccgccatgggctgcgctggatccacccccaaagtcgacgagaacagcaagaaactgaaaaggcctaaggcttggaagcatacccaaccaattacaccggcacggctgaaacagatgcgtgatgagttctgggacacggctccgcactacggaggccaaaaagagatctgggatgctctgagggttgccgcggagtccgatctagcccttgcacagaccatcgtggacagtgctggaatcatcgtgtcgaaccctgacatgacgctctgctacgacgagagaggcgccaagtacgagctgcccaagtatgtcttgagcgagccagcgaacctgatccgcgacgggtgattctggaccccaaaaggttttgcagcagcacgaaacagggccacgtgaatttatgcggatggttgattcggtcgctggttctggattgtaactttcagggacagtgaaagctcgtttcagcgctggatgttgtatagtgatgttattggacacgatgtgtagtctctagacctgctactgctgaactcggtcattcagggacagtgaatgcagtgtcgtttaggctatatgctgcagacttattcacctcatatttcagacttcagacttaactgtatctatataaatagtgcagtttgcactcatatttcagacttcac

SEQ ID NO: 511 - DNA, 1354 bp, Zea mays
  Clone ID: 700076533_FLI
tttcttctttccctgccgggccccggcggcctctcctctcctcgcttgtccccaccaggtgccatggacgccggcgacgacgaaccccccgttctcctcgaccgcgccgcccgcgcctcccgaggcaagaggataaccaagctgctcgaggacgaggtcgagcaggacgaggctttctggaaccaagaagccctcaaggatgaggagaacgatgacaactacgtggaagagccggatgctggtgacgaattcgacagtgattttggtgaagatgaatctgaaactgatgatgagccggagaaggaagtacgcgagagattacctatcaagaaacggctaatgtttcctggcaagacgctgaggaagaccagcgtcaagaagaagaaggcgaccccaaaaccagaagatggcacaaaagccgacaagtctgctgataagccgagttcatccacacaagcagatattcctgatgaactggaggctgagaaggccatccggaaatcaaccagaacgtcggtcatcgtgaggcaagctgaaagagaagcgatacgtgctgaaaaagaagcaacggccaagccgattaagagaaaaaaggagggagaagaaaagcggatgacacaagaggagatgcttttggaagcagctgaaacagagatcatgaacatgagaaatctagaacgtgtcctggcaagagaggaggaagtgaagaaaaaagctgttgttcataaggacacttatgagggtcctacagttcgttttttctcaagagatggggaatcacgtctggaattcataaatggagcatcgtttgggtctgaactttgtacaacatcatctccttatccggagaaacctgtttgtgtggtgacaggacttccagccaaataccgtgatccgaagacagggctgccttatgcaactatggaagcatttaaaataatccgggagagtttcctgaaagaggaggctgatagaaagcgtccgaacatgtcgaatatgggagagcttttcgaatcaataactggtggacacttgatgcctaagaagagaagggttgagataaggtctccgaacatgttaggaggctctaggcatggcgggcgtacctggcgaatacctgcttttgatatggtggacgaggactaacgagacagatcccgtggctcccaatatgtccaatatgagagatctttctaaatcaatagccggtgaagaggaagaggaagatggataggatgttgtctttagtgttagatcttgtgcttgtagttatcttaatgtatttttgtcggttgataaattcatggttattaaagtggtaaaacgttaaaatgttatgaaacaactttttaat

SEQ ID NO: 512 - DNA, 1308 bp, Zea mays
  Clone ID: 700076553_FLI
agtttcaccagatttaaagctccgtaagcatatgctgctgattcgccggtgatcccctccctccttcgccgtcgccgtcgccgtcgccgtcgcaccagcttggccgccgcctctggatcgccgctggactcgcttccctgacccagaagctacgatgaattacatcatcggcgcattcaagccgccctgcgacatcttcgtcacattcgccgatgagagaacccggaagcaggtccagatcaagaaggacaacgggaagactgtcatggtgccgaccttccagacccttgagaccatagccggagaggtgtcgatcgctccagtcccaggtaaaaggcttgaacacacgggtgtgaagattgaactgctgggtcagatagagctgtattttgacagaggcaacttctacgacttcacttcaatagtgcgtgaattagatgtccctggtgaaatatatgaaagaaagacttatccatttgagttttctactgttgaaatgccatatgagtcatataatgggacaaatgtcagattgaggtacatactgaaagtaacaattggcagaaattatgttggcagcattgtggaatcgcgggacttctgtgtaagaaactactctctagttcccacaatcaacaatagcatcaagatggaagttggcattgaagattgcttgcatattgaatttgagtacagcaaaagcaagtatcatctcaaagatatcatcataggaaagatatattttcttctggtcagaataaagataaagaacatggagcttgagattcgtcggcgtgaatctacagggtctggtcctaacacatacgttgagactgagacactagcgaaatttgagcttatggatggcgccccagttagaggagaatcgattccggtgagactattcttgacgccgtatgagcttaccccaactcatcgcaacataaacaacaagtttagtgtcaagtactacctaaacctagtcattgttgatgaggaagaccggaggtatttcaagcaacatgagatcacaatgtatcgccttctagaaaccccgcaatcttcataggctcctttccttgctttctatgagttggaaccagagctagaggcattttggtttaaccttgcacgaggacgccaaagctggtggccttacttttggtcccgccttgtacataactctcccgatggagcaatccagttcttaggtaagagacataaaaatgcagttctaccatatggtgttgctttgttactgcctttgtttgaatctactcgggataaagtcatggaaatgtttgtatc

SEQ ID NO: 513 - DNA, 1971 bp, Zea mays
  Clone ID: 700076578_FLI
cgttcatccgcccctcaccgtcgcccaatctcacatggctcggcgtctccacggccaatccgacctcaccgacggcgcgcgcctccgtttctccacctccaactccagctccagctcttcctcccggttcctcctcgccgccccctccgacgacgcctccctctgtcggatccaccgctgaccgcgcgccgctacacctgcgcctgatcaccggctggttcttggcctcttcgcttcctggaccgcccagacgtcgccatgggcaagagtaagaggaacaagggcggtcgaggtggtggtggtgccgatgataagcttgacggcggtggcgatgccgatagcgtgacctccttgtccagtgggctgtctgaccttcagctcgcgcaggccacagagcatgttagctcgcaggaattcgttcttgacaagtacgtcgacgctctctatgagaagaggggatccacaagagaggaagcactgggcgctcttaccgatgcttttgaaagttttgtgcttcttggtttagtggaaaacaaatatgtcacactattgagccagttcatcaattcaattaaaaggggatctgtaaaagaggtgtgtctggcttgtcgctccattggtttactggcaattacactaggtgctggaagtagttcgcacgaaataatggatgagtcacatccacatcttttgagagttctccaaacttggcctgatgcacaaaagatgatctctgcacttgattgcttagcagttgtcacatttgttggtgcaactgatcttgctgaaactcagctatctctgaaagccatctgggatgtgatccatccaaaatcaggatcaaatgtcggcgtagtcagaaaaccgaagcctcctttgttagcagctgccgtatctgcatgggcatttcttttaacaactattggttcatctagaagaaatactgattcttggaaagagccaattacatttctctgtagccttctagaagcagaggaccgtgctgtgcggattgctgctggtgaagcattagctctgtgttttgagctaagactgtttgatgtttcttctagtgacgaagctgatgttgacagttacactagagaggctggtggttctaagcatcaacttttcttgaatatgcaagcattgaaggccaaactatctggtctagtctatagtctatctatggaggcggggggcaggggtgctgacaagaaaaatcttaatgatcagagagacctgttccaacgaatctcagattttattaagagtggtgagtgccctgaagaatcacttaggatttcaggcaagaatggcattttaagagttacatcatggcgtgaatcaatacagttgaactatatgaggcggtttcttgggcggggattcctgaagcattcacaggacaacgatttgctgcatgaggtctttgacatcaaaattgatcgtactgaaaacatgtcagccaccgaaaagaaaatgttcagatccggagaagagaaaggaagagctctgaagttgaataaagagcgtcgtctagctcaggagaggaagcagctgaatatcttgaacgagcaatatggatagaacctagccggaagactggagttttgtacagtcgaactgttaccagatggtgagtgctgtgtgtgtgtatgacggtattgatgcatttgtgaggtgtattgctccggtggcggtactacaacacagttttgcataccgaggagcagaggcatgtacagcgtcatgtgttgaaattgctccgaaatattattgagttttgtagaaagtgccgtgtgccctgtgcactccctagtgtttcctctgcatgcgcaaaggagatcttgagttcagttaatcacaattgtacagttccatagggtagagatatgaggtgattgtgaataacacagaggtcgtctagcctaagggcaataattggcgaactcttcctctagccgcaat

SEQ ID NO: 514 - DNA, 2626 bp, Zea mays
  Clone ID: 700076615_FLI
ccggcgccggtctccgttcgtcgtcccagtctccgcgccgtcccgtaacaatcacaacactgcaggtagtagctcagtttcagtggtcgccggcgagccactcgactcgagcgcacggccaaattgttggaccgaaatccggttcctccccaccgaacggctacgcatccgccatgctcgtcgccctcctctgcctcctcgcctgctgcgccggcgccggcgcagcaggcgccgccgcgccgaacgcgcgcccgtgcgcgtcgccctactcggccagcgcctacccgttctgcgacgcgtcgctctccatcccggcccgcgcgcgcgcgctcgtctcgctgctcaccctggacgagaagatcgcgcagctgtccaacacggcgggcggcgtcccgcgcctgggcatcccgccctaccagtggtggtccgagtcgctccacggcctcgccgacaacgggcccggggtcaacttctcctcgggccccgtccgcgccgccaccgacttcccgcaggtcatcctgtccaccgccgccttcaaccgctcgctgtggcgcgcggtcgccgaggccgtcgccacggaggccctcggcatgcacaacgccggccaggccggcctcacgtattgggcgcctaacatcaacatcttccgagacccaaggtggggccgcggccaggagacgtccggggaggaccccgctgtcgctgccgcgtactccctcgagtatgtcaagggtttccagggagaggaaggagaggaaggcagaatcaggctctctgcgtgctgcaagcactatacagcgtatgacatggagaaatgggaaggcttctcgcggtacaccttcaatgccaaggtaaatgcacaagatttggaagacacgtaccagccgcctttcaagacctgcatccaggaggctcgtgctagctgcttgatgtgtgcatataaccaggtcaatggtgtgcctatgtgtgctcacaaagatcttctgcagaagaccagggatgaatggggcttccaggggtacattacatctgattgtgatgctgtggcaattattcatgaaaaccagacatacactaaatcaggcgaagattcaatagcaattgttcttaaggcaggaatggatatcaactgtggttctttcctagttcggcatactaagtcagcaattgagaagggaaaaattcaagaagaagatatcgaccgtgccctttttaatctattctcggttcagttgcgtcttggaatatttgataagcccagcaacaaccaatggttctctcaactagggcccaacagtgtgtgcacgaaagagcatagagagcttgcagcagaagctgtaaggcagggtgctgtccttctgaagaatgaccataattttttgcctctgaagagaagcgaagttagacatgttgccatcattggaccatctgcaaatgacgcgtatgcgatgggcggagactatacaggtgttccctgcaatcctacgaccttccttaagggcattcaagcatatgctacacaaacaagctttgcccctggatgcaaggatgcttcctgtaactcaacagatttgtttggcgaagctgttgaagcagctaaaagagccgatattgttgtcgtaattgctggcttgaacctgacagaagagcgtgaggacttcgacagagtgagccttctccttccaggcaagcagatgggcctcatacatgccattgctagtgtagcgaagaagccccttgtgttggttctcctgggtggtggtcctgttgatgtttcgtttgcaaagcaagatccacgaatcgcaagcattctttggctcggatatcctggcgaggttggtggacaagtccttccagaaattcttttcggagagtacaacccaggaggaaagctgcctataacttggtatcctgaatcctttactgctattcccatgactgatatgaacatgagagctgatccttcacgaggctaccctgggagaacatatcgattttacactggagatgtagtgtatggctttggatatggtttaagttactccaaatattcatatagcatctcctcggctccgaagaagatcaccgtgtcgcgttcatccgatttgggcattatcagcagaaagcctgcatacacaaggagggatggactaggctctgtgaaaactgaagatatcgcttcatgtgaagctctggttttctctgttcacgtcgctgtttcgaatcatggtagcatggatgggagtcatgctgttcttctgttcgcgagatcgaaatcaagcgtcccgggctttcctataaaacagctggttggctttgagagtgtccacacggcggctggcagtgcatccaatgtggagattactgttgacccctgcaagcaaatgagcgcagccaatcctgaaggcaaaagggtacttctgttgggtgcccatgttctaacggtgggtgatgaagagttcgaattatccattgaactctgacagggatgtgccaagtcctaccattttatggagttcaaagttgggaataatctgatgaaacttgtaaagaaacacgttgtaaagattcattattgagctggatgcgtgtacggtaaacatgctgtgacctgtgaagattcatc

SEQ ID NO: 515 - DNA, 752 bp, Zea mays
  Clone ID: 700076636_FLI
tagcaatcagctcatctgtcagcgccacaggtgaccggaaaaccacggccggcgttcctgcttctctacccggtccgaattgctgaccggatcaacccgagaccttgcaggattatcgatctgattgcggcatgatccgcttcatcctgctgcagaaccggcaggggaagactcgactggccaagtattacgtcccgctcgaggactcggaaaagcacaaggttgaatacgaggtacaccggctcgtggtcaatcgggaccctaagttcaccaacttcgtcgagtttcgcacacacaaagttatctacaggagatatgctggactgtttttttcaatatgtgtggacataactgataatgaattggcatacttggaatgcattcacttgtttgtcgagatattggaccatttctttagcaatgtttgtgagctcgatttagtgtttaattttcacaaggtttacctgatactagatgaatttattcttgctggggagctgcaagaaacaagcaaaaaggcaataattgagcgaatgggtgaactggagaagctggaatgacgaagaccaggaagatgctgccgcgtgtgttgtattccaatttgtattattcgtttcaggtgttttacatttgctctcctggttcgttccggctgacagcgtgatgcccatgctgtcactcgaaagaatggtagtagtagctagcatgagtacattataaacgtaccttcgaaaacataataatttcccagc

SEQ ID NO: 516 - DNA, 697 bp, Zea mays
  Clone ID: 700076642_FLI
gggcaggtacgtgagaacaaaaaataactcggaaaagaaggagacgccgaaaattcgaaaggggaggggaaagcaaagctgatggcggaggaccaggggaaagcaaagcaaatggcggaggccccgagcaagatcgaatccatgaggaagtgggtcgtcgagcacaagctccgagccgtaggttgcctctggctaggtgggatcagcagttcgatcgcctacaactggtcgcggcccaatatgaagcctagcgtcaagatcatccacgcaaggttgcatgctcaagctctaaccctggctgcattagttggttctgcatgcgtggagtactatgatcagaagtatggttcttctgggccaaaggtggacaaatacacaagccaatacctggcccattcgcataaagattaaaggtcgccatgttggttcctgcatgccggattaattttgggctcatctcgggttgctcatgacccgcccatggatgctggatgtttattctttttttgtcttcataattacaaaatggtggtgtacttgccaggcaaatgttaatgagggtataatgcagatattgtcgtcgtaatttggcctcatgttgcattatctaacctcactttgttgactgtcagtgactcagcgtctctgatttttttatattttttgagaaaaggaaaagaaatcccggtttgtgcct

SEQ ID NO: 517 - DNA, 2044 bp, Zea mays
  Clone ID: 700076647_FLI
ctcgtcccattatttctctaaaaatccaacaaataaatccttgtgccagcagaaagtatagatcgtgttagctaaaagacatccgcgatgacgtcgacagcggtggggggcgagccggcggcgggccacgggtactggcggtggagcaaagccgactttttcccggagccctcgttccagagctggcgcgcgtacggcggcgcgctcttgtccactgggccacggctgcgcgaccgcgtcacgagtcgctcatccgaggccgttgaggcggggacgctgctcgcccagagcgagaaccccctccggcggtgcctgtcgtgggtggatctcgccttcctcggattcggctccgtcgtcggctcgggcgtcttcgtgctcaccggccaggaggcgcggttcgacgccggcccggccatcccgctggcctacgccgccgcgggcttctcggcgctgctctcgtccttctgctacgcggagctcgccggcgagatcccgtcggctggcggctcgttctcgtacctgcgcgtcgagctcggggacctggccgcgttcatcgccgccgggaacatcctgctcgaggccgtggtgggcgcggccggcctgggccggtcctggacgtcgtacctcgcggcgctcatcggccgcgacagcgacgcgctccgcatccacgtccccgcgctcgccgacggcttcaatctgctggacccgatcgccgtcgtcgtgctgtgcgccacttccgcgctcgccgtgtccggcgcgcgcctcacctccaccgtcaactcggtggcgtccgcggtcggcatcgccatcatcgcgttcgtgctggccgcggggttctcgcacttcgagccagccaacctcgcgccgtcattcttccccttcggcgccgcgggcgtcttccgcgcggcggccgtcgtgtactggtcctacacgggattcgacatggtggccaccatggccgaggagaccaagaaccccggccgcgacgtgccgctgggcctcatctcgtccatgtccgccatcaccctcgtctactgcgccatgtccctcgcgctcgtggggatgcagcgctacagcgacattgacgccaacgcggcctactcggtggcgttcgcggcggccgggatgaagtgggcgcgctacgtcgtggcgctcggcgcgctcaagggcatgacgagcggcctcctcgtcggcgcgctcggccaggcgcgctacaccacgcagatcgcgcgcacgcacatgatcccgccctacttcgcgctcgtgcaccccaggaccggcacgcccatctacgccaccatcgccgtcacgctcggcgccgcctgcgtcgcgctcttctccagcctcgacgtgctcgcgtccgtctcctccatcagcacgctcttcatcttcgcgctcgtcgccgttgcgctcctcgtccgacgatactacgtcgcgggaaccacgtcacccgcgcaggcccgcaccttcgtcggcttcctggcgctgatcgtgctgtcgtccatcgggctgtccgtgtactacaactcgggctacgctgctcggtggcccgggtacgtagcgttcggcgctttgtgggcggccggcacggcggggctggcgctattcgcggagcagcagcgcgcgcccagggtatacggcgcgccgctcatgccgtggctgccggccatgtccgtcgccacaaacctcttccttatgggctctctcggctccctcgcctacatgcgctttggcatctgcacggcggcgatgcttgtgtactacgtgctcttcagcgtgcacgccacctatgacatggtgcactctcaaggtcagacgacatcggcggccgacgctgccaccgacggagtggagcagaggaagataatgccggtgtgacacagaggatgtcatttcttggttagttgagcaaaaggtttgttcaactgtagtgtagggtagacttgagtttggtttgttcaattgctctagttaattggatccctcgttcagaatagctcatctgtatgaaaaaatggtttgtgcaaaagatggcattttctag

SEQ ID NO: 518 - DNA, 1676 bp, Zea mays
  Clone ID: 700076722_FLI
ctcgtctggatctctctcactcctttcgcgcacaaggttttcaatggcattgaccggtagaacacgtgcccggacgccaattatctcgccctttcagatttgagaacaacaaggaggaaaagtaaacgcaagttcaggaaaggggagcctcaaaaggagagggagagtgagagggaggggaagtgcgctgcagtgctgcgcagctgcgctggggagaagagaagaaggtgccaaccacttcccaaggagaccgccagctctgctgctgcacgaccgaccagcccgtccactcgcctcgccttcctccgagccccggcgaggaagaggaacccggcgccgccggacgcacttccgatggcgacgccacggaagccgatcaagctcacgctgccgtcccacgagaccaccatcggcaagttcctgacgcacagcgggacgttcacggacggggatctgcgcgtcaacaaggacggcctccgcatcgtctcgcggagggagggaggcgaggctcctcctatagagccgttggatagtcaactgagcttagatgatctagacgttataaaagtgatcgggaaaggtagcagcggaaatgtgcaattggtccgccacaaatttactggccagttttttgctctgaaggttattcaactaaatattgatgagagtatacgcaaacagattgccaaggagttgaagataaacttatcaacacagtgccaatatgttgttgtgttctatcagtgtttctatttcaatggtgccatttctattgttttggaatacatggatggtggctcccttgcagatttcctgaagactgttaaaaccattccagaggcctacctcgctgctatctgtacgcagatgctaaaaggactgatctatttgcataacgagaagcgcgttatacaccgagatctgaaaccatcaaatatattgataaatcataggggtgaagtaaaaatatcagattttggtgtgagtgccattatatctagttcctcttcgcaacgagatacatttattggcacacgcaactacatggcgccagaaagaatcgatggaaagaaacatggttctatgagtgatatctggagtttgggactagtgatactggaatgtgcaaccggcatctttccatttcctccttgtgaaagcttctacgaacttctcgtggctgttgttgatcaaccgccaccttctgcgccgccggatcagttttcaccagaattctgtgggttcatttctgcatgtctccagaaggatgctaatgacaggtcatcagcccaagccttattggaccatccgttcctgagcatgtatgatgacctgcatgtagatcttgcttcgtacttcacgacagcaggatctcctctcgccaccttcaattccaggcaactctaatttttttgtcctccttattacgcgaacggtgtggcgacaaatttctctttttggacaaggcttggattgtgtactgagctgtaatgatcttgtgtgtgtcaggtcggtgattggctccatcactttacatatatgacatacatgtacagccttttaggataaaaatgagcactgaagttttgcctatctgtatatcggcagcaaacgtttggtcatgtttgtttcaccttgtaatgtattgactcagatatgggattggtcattgtctc

SEQ ID NO: 519 - DNA, 2626 bp, Zea mays; identical to SEQ ID NO: 514
  Clone ID: 700076772_FLI

SEQ ID NO: 520 - DNA, 2136 bp, Zea mays
  Clone ID: 700076790_FLI
cactccaccacttgactcccgtctcgtctcgtctctgcactggattggaggctggggccgtgaagggtaggtaggtcgcttgatagggacaaggggggagacggcgagaggcgtttcgccgagcagttcgcgtgctcccctccacaggccgacgcggcgacgccgctgtttcagtgcgggtgcattaggctgatatgggcaagtcgccggggaagtggatcaaatcggtgcttttggggaagaaatctaccaagtcaggtcctaccaagtcgaatgaatctaaggctgacaacaacagatactcgaccggggaggaccgcacattgtctgagagttctcctgtgatttctgagccggtactagttaacatccacaagaacgtagctatcaatgggaaggctgcagatgccagtgatagggcacggcaacaagatccgcagagccaaagcgttgttgagtccagatcatcggctccagctgctcagctgggagaagatcaagctgcagcgaaggcacaggcagcctttcgtggttacctggcacgaaggtcattccgtgcattaaaaggtatcgtaagactccaggcgctgattcgagggtatcttgtaaggaggcaggctgtatcaacccttcgcgcaacatggttgattgtgaagtttcaggctctagttcgtggaagaaatgttagactctctggcagtcgcatgcagctcaatgtgaagtttggtcagagtaactttgggggtgttagatcgtctgatgcatggaaagagaagctatcttcaaatgcttatgttcggaagcttctgtcttcaccaattgttttagaacctcttcacttccagtatgacaagagggatcccaattcaacctataactggtttgagagatggaccataggttgcatctggaagcctgcttttcaacccaaaagagttgctgatgggaaaccactggtaaagaaggctagttatgcaatggaaactcaatcagccaagttaaaacgcaacattcggaagggttctgctgctatcgctgggagtttccatacatctggtgaatctgataaagtaaaaaggaatccaaagaatttctctagcttccctgctgattcagtaccagatagccagttatctgaacttgaaaaggttaaaaggaacctcaggaaggtaactgattcgatggctgaagcctcaaagatatctagttccagggttgattcctcgaaggtatgtaattctacagctgaggttccaaaggaatctaatcctgtggcagaaatctcaaagatacgtagtctcctgaatgggatctctgaccatcaggatattcaatgtgagaatacacgtgaatcttcatttcctcttggaactcaagaagactctgacaatgatcatctattgcgatattcaaatatggatagcttggacttggtacctggtttgaaaagtgatcaggaaattcagctggattcggtttctataggagaaaatgttgatgatcccactgttgttgctccagcagttgaagaaatgtcaccgcaaaacattgatacggaagacaatgttttatgcaagaaagaggaagcaaggtccaaggaagagcacttgtctaatggaagccttagaactagcaagaggaagtcttcattccccaacaaatcagaatatgtagaaaatgggactcacgctactcctgttcagccaaggcagccaagctatatggctgcaacggagtccgcaaaggcgaaattgcgagcccagaattcacccagtctggattctgattcagcggcagaaaagaatggtttcacccgacgccactctcttccttccagtacaaagagtagagcacttaaagctgaatggaagcgctgaagaggcaacccatcgtccacttgaattgaattgtgcactgctctgaaacttcgctggatgaactcgaccggtcttgtcccatgttcttgctgtattgaacaaccccttgtgaagttgcgattctggttcagtttgtcgtaggttcatgtgcaaccactagtgccttgtgtcgtatattgcatggttcttgtcgaaggaacaatgcctgcgaaagctgatgttaggactgcattaactgaataacatcacccagttgacc

SEQ ID NO: 521 - DNA, 889 bp, Zea mays
  Clone ID: 700076805_FLI
gccgcggctcgaatcgaattccaacacggcgccgagccgatgagaaagccgcatcttccccagcccacttgtgacctaccgatctagacccgcgcttgccgccgtcgagtcgccggccaggccagccttcaccttgtcaccggcgaaatccacggcggtgaggcaaccggcagttgagagtgcgcctacagttggggggcggagatggggaagaagcagcacagcaaggaccgcatgttcatcacacggacggagtgggcgactgaatggggcggcgccaagcagaaggacgtcggcacaccgttcaagcgcctccccttctactgttgctcgctcacgtttcttccattcgaggatccagtgtgcaccgtcgatgggagcgtctttgatttaatgagcataatcccataccttaaaaagtttgggaagcatccagtaaccggagcaccactcaagcacgaagatctgattcctctcacattccacaagaactcagatggagagtttcagtgtcctgttctgaacaaagtttttacagaattcacacacatagttgctgtaaaaactactggaaatgtcttctgctatgaggcaatccaagaacttaacatcaagccaaaaaattggaaagagttgctaactgacgagcccttcactcgcaatgacttgataacgattcagaacccaaacgtggttgatggcaaggtccttggggaattcgaccatgtcaaaaagggcctcaaacttgaggatgaagagttgcagcggatgaaagatgatccaacctataacataaatatttctggtgatcttaagcaaatgattaaggaacttgggacagaaaaaggaaatgaagcttttttgcagggaggtggagggctgaaagctc

SEQ ID NO: 522 - DNA, 1134 bp, Zea mays
  Clone ID: 700076862_FLI
cttgaaagagctggtagaacaaaaaagattaatcctaaagtagaaatgaattctgctgcaagcaatggcatcaacgatactgagggaggacggatgatctcacgggcggcatcaatcattgtagtcggtgatgaaattttgtttggtacaactgaggataacttaggagcagccttgtgcaagaagcttcatgcaattggctggcgggtttctcatgtagcagttgttcgcaatgagattgattctgtcgctgaagaagttgaacgttgtaaatctactgatgacatggtgtttatttttggtggactcgggccactacattcagacgtttctttggctggtgttgcgaaagcatttggagttcgtctggctcctgatgaagaatttgaagattaccttagtcaactcatgggaaacaattacactggtgaccgaaatgagatggcactgttgccagaaggtattacagaattactgcatcacaaaacgctaccattgcctttgatcaaatgtagaaatgtcattgctcttgctgcaaccaatatggatgaactagacaccgagtgggattgtcttctaggtacccaggagagtggtctaatgccatcaaaaccttttgtgtcaaagcatctcagcactacactttcagatgttcaaattgcttcagtccttgcaaaactgtgcttagagttttctgatgtttacatagggtgtcatcggatatcaagagctggtcctttggttctgaatcttactggaaaggataaccagagggtagatgcggctgccgagaagctgacaagcagctttgaaggacaattttcccaacttaacagttgcaaataagctgtcagagacacccctctatttttgccaaattctttccgcctgaagctctgagattgcgcaggactgatgatggtgctcaactgctctaaaccgacgaccaaaataaaccacggagctggtactactttgaagctacaaattttatctagggaacataggaattttgtactaggaattggtaactgggttctagcataatgtagctttgcagctaatattttgacataattatacgttccaaattatttcatttatactataatttatagcataactttactgctc

SEQ ID NO: 523 - DNA, 1424 bp, Zea mays
  Clone ID: 700076886_FLI
tctagcaggtcgatcaccttcgcacatagctgttggtgcaaataaaaaagcttcaaatgtgggacatattaaagatgggtctaatgtatcaaaagttgaagatggtcatgtcgatagaagtgttggtgtgaagaagcccagatattctgcagatgaaggcccttcgttgactgaactgagtggatacaatgcaaagagacacgagtttgacccagagtatgataatgatgccgaacaagcgcttgctgagatggaatttaaagaaactgattcagaaactgatcgtgaactgaaactccgtgtgctgcgtatttatctgtccaggcttgatgaaagaaaaaggagaaaagagttcatattggaaaggaatttattgtttcctaatcccttggagaaggatcttacaaatgaagacagggaagtttaccatcggtataaggtcttcatgcgttttctttccaaggaggaacatgaagcccttgttaggagtgtcattgaagagcgaaaaattcggaggagaattcaagaactccaggaatgtcgttctgctggatgccgcacacttgctgaagcaaagatacacatagagcaaaagaggaaaaaagaatacgagctgaatgcccaaaaagctaaggaaagtaaccaccttattgcaaatactaaattggtgcagaagatgaatcgacctatgaagattgagtctgatgggaatttggatccaaagaaaggtggtgttggcttagattctcctaaaactacaggacttacaagtgttaagcagtgggatgactgggatatagttggtcttcctggggcggagctattaagtgctagcgaaaagcttctatgttgccagaacagactgctacccagtcattacctgagaatgcaggaggtgctgatgcaggagatattcaagggtagtgtcctaaagaaggaagacgcacacgtcttgtttaaggttgatcctaccaaagtagatagtgtttatgatatggtaacaaaaaagctgggcaaccatgtggagttgcctacggtctagcttatgcctttgggcttgcctgctgtgacatgccgaagaaaacaagtcttggtttcgccccttgcagcgtgtctgaaccatagctgaaggtggaactgtactagatcaaatcggccatagttaactgaaattcgtatcagttgtcagaagcacaataaggcattccagccaagttgtaaaattattgcccttagcagaatgtgtagcgtgagttgtcatttcctttctgccattgttgtgcactgtttcagctgtggtagtgccttgtagtaggtataggtgcctgagtttatatgtatcatcgtgtatgtaccattgggagctcaattatatgccattgtaccaaccccagacattgattattacaattcatctagcagcc

SEQ ID NO: 524 - DNA, 1035 bp, Zea mays
  Clone ID: 700076923_FLI
gtgctggtggaggaagaagcagcgcagcaggtggcagggatgggtcgcggcggcgggatggggaacccagtcaacgtgggcatcgcggtgcaggcggactgggagaaccgcgagttcatctccaacatctccctcaacgtccgacgcctcttcgacttcctcctcagattcggtcagctcctcttccattccatttccccgcggcctgccctctctcgatctggatctccaacttttggatctggtccgccgccttcgtgcttcataccataccacgcggagcttaattgtccttgctacccgcatattaccttgccctgcccgagcttatgtttagtcattgtgggatggcagacaattgctcaaactacccatgagaccggatgctttaactagtcattgtgggataatcaatattccggcgacgtttgaattgatgtcagacaacacatcctaacagccatccatctacatagcctgcctacctactcgttcggcctgttgctacttaccagcctcatgctcgttgtcaattaggctcgggttttgcatggaatggctgtaacttgcggtcactaagtaccttttaaaaaatagttgatagttgaatcccacacagcaccaacatgggattcagacctcacaaccacttgttgatagttggatcttttgatggtatgtgaatccctttcgagttgctgtgggagaagcaattgttgtacatgaggatgcagcaagagctatgggaaggaaacgcttatgaacaatagatacctggtcgtcctaatttcatgaagctacgacgaagagcaagctggcaagtttgaacgagaagctggacatcctagagcggaagctggaggtgcttgaagtccaagtgggcagcgcgacgaccaacccttccgtcttcaactaggaatcgcgggtttatatgtttaaataaataaatgtaggtatgaatgttgcttgtaccaacgaattctggtcgctatcaatcatgtaatgtaatgtaatgtaatggattttgttattatt

SEQ ID NO: 525 - DNA, 872 bp, Zea mays
  Clone ID: 700077019_FLI
agaacaaaaaagcggcgttcgattctcccatctgggaggagcaaattacacggaaattaacaacagagactagtagttaatatacgaatataaagataaccatcatccacataggaagcatgtttttttcatgtccgaatataaaagctctaacaagcaaacaacactcagcaacctactcgcaggcaggagttccaaaacaacgggatcgcaaagagaagcaactcagtacttgtagtccttgacgtgaaggctctcggtgtcggcggcagcatcacccttgtaggtgccgagggtagcctcggagttggccttgcacctggcgaggaaggccgctctagccttctccacgttctccaccttgccagcccaggccttgagggtgctcgcctggagggcacggccgaaggagaaggacagggcccatggcttcttggtgctgagcttgttcatggcattgagattcagggtggcctcctcctcgctctgtccaccggagaggaagacaacagcaggcacagcagcagggacggtcctctggagggtacggacggtgtactgggcgatcacctcaggtgtcaccttcttagagtcggagccaggagtcaccatgttgggcttcaggagggtaccctccaggaggacatggtgctcgttgagagccttgtagcaggcagcaaggactgtctcagtgacgtaagcgcagcgatcgatgtcctcaaggagggaggcgtcctccctggcatcaaggtcgacaagggcaccattgaggttgttggcaccgacaaggagaccaccacccagggccacgatgacctcggcaagcgctgcgctaagtactacgaggccggtgcccgctttgccaagtggcg

SEQ ID NO: 526 - DNA, 1054 bp, Zea mays
  Clone ID: 700077036_FLI
cccgttgcgaccatcgtgtttctcggcaccgtcgtcggcgggacgccgtcttccccgagaatggcatccttttccagccgcggcccaaacctcctcgcaccggagatcctgaagccggacgtgaccgcccccggggtggacatcctggccgcgtggaccggcgagaactcgccctcggagctcgacagcgacacgaggcgagtgaagttcaacatcatatccggcacgtccatgtcgtgccctcacgtgagcggcatcgccgcgatgctccggcaggcgcgcccgggctggagccccgccgcgatcaagtccgcgctgatgaccaccgcgttcaacgtcgacagcgccggggacgtcatcagggacatgtccaccggcggggcgtccacgccgttcgtgcgcggggccggccacgtggaccccaaccgcgccctcaacccaggcctggtgtacgacgccggcactgacgactacgtctccttcctctgcgcgctcggctacacggccaggcagatcgccgtcctgacgcgtgacggctcggtgaccgactgttcgacgcgcccgggctctgtgggcgacctcaactacccggccttctcggtggtgttcggctccggcgacgacgaggtcacgcagcgccgcgtcgtacgaaacgtcgggagcaacgccagggccacgtacacggccagcgtcgccagcccggccggcgtgcgcgtcacggtggagcctccgacgctggagttcagcgcggcgcaacagacgcaggagtacgcggtcaccttcgcgccggagcagggaagcgtggccgagaagtacacgttcgggtccatcgtgtggagcgacggtgagcacaaggtcacgagccccattgccatcgcctggtcggcgagccaagcagcggcgatgtgatccgatccggtccacgtcgagctaccatgtgtgcgctctgtgtgcttcctgttgcagaataagttgcgttatttcgacaccgatccatcctaccaacaagttgtagcataatttactgtaaacaaaaactgtaccgtattttatt

SEQ ID NO: 527 - DNA, 797 bp, Zea mays
  Clone ID: 700077059_FLI
ggcattattctcaagttgggctcagcccatgtaggaggagcattccatccgggcccacttgtcatcggactgagtggcgtcttcctcctcccttcgtaactttccagacccgaccgcagcagcccggggcaacaagcgaaccgacggcggcgatggggatcggtgagcacttcgagggcgtcaagcagcactgggcgagcaacttcgccttcctcgactacttcaagaaggtctacggccgcgccgagcccctccccaagtggtccgacgccgacgtcgacgagttcatcgcatccgacccggtctacgggccccagctcaaggccctgcgggagtcgaggaagttcgcgctcgccggggccctcgtcggcgccgcccacctcggcggcgtcgcgctcaagtactccaaggcgccgcacggcgtcctgctggcgaccggcttcggcgcgatcaccggcgccgtgctgggatccgaggtggcggaccactggtaccagctctacgagatggacaagcagggggccaacctcaggttcatctactggtgggaggacaaggtctcaggccagaagagctgaaccacatcgagtgatgcctattctactgagcacaccagcgtgacaacaaaacattgacgtctctcatgccgagttcttagtttttctttcctagttttctctaataagtgtggaattggttgaggaagccaactggacaatgcatttttcatctccgtcatgggttatgttcatccatggtcaatctggtgtaaacagcaaatcctatccgttttcgag

SEQ ID NO: 528 - DNA, 1147 bp, Zea mays
  Clone ID: 700077152_FLI
aaccagcccgacaccgccgccgtttctccatcttcctcgcagcgccggcactacatcttccgctcccactccgactcgcgctcaacacgcaggcgacggcggcagcagtcccagactcgggctctcagggacggcggggcagtcccagactcggcgtcgtcgtcagcggctacccttcccgcctctcgccaatcgcctcgcgccctcgactccggtcctccgcacaccggcctgcgaccctgccaatagtgtataacttggagatatggatttgcaagagaagacgaccccaactcataaaggaaaaggaaagaaaaaagaaagcgcaaagaaaaaagaaagagcaaggaagagaacgtcatctgttttggattccactaatgacacagtcatcagcgaggaaatgccagagtataatcttgatgaacctactatggaggaaaaactggcaaccctgaatttaatcaatagagagaatgaaatacatggtagtgagaagcaatcgctctctgtggcaccaccaagtgcagattcagtccatatcttgctgaagcaagctcttcgtgctgatgatagtgtagcactgttaacttgcttgtataatagagatgagaaggttattacgaagtctatatcactcctaacaccagcagatgttgtgaagcttctcaagttctttgtcttgcaaatacaatctaggggtgcagtgttggtttgtttactcccgtggctgcaaactttattgaatcgacacatgagcagcatagtgtctcaggagtcttctctgtcattgctcaactcgctctaccagcttattgatgcaagaacgtcaacatttaagtcagcattgcaactctctaccactctagattaccttttcagcgagattgctgatgatgaagctgatgaggaggtaccaccaccgataatctatgaagataaggacactgatgatgacgagtccgaagttgatgctatggaaaccgacagagaagaggctgaagagctaggtgctgttactgatgcctctgaaaattcagatggaagtgagatcatgagcgactgattgccttttactctcccaactgctgaagtccaaatatcaacatcaattattcacgtaagatggaattgacgataattgctc

SEQ ID NO: 529 - DNA, 3672 bp, Zea mays
  Clone ID: 700077335_FLI
cgcgttactgcgttagccgccccccgccgtcgcctgcctcagcggatccacgctcggcaggttactgacgccgcccgcctaacttccaccggtctggtggagtggtggggagatctatctgccttggatcgattattctctactacttggtagaagagagtttatccacacaggcagctatgttggaaaagattgggttgccgccgaagccgtccatgcgaggcgccacctgggtggtggacgcatcccactgtcagggttgttctgttcagttctcgttgtttactaggaagcaccattgccaaagatgtgggggcttgttctgcagcagctgcacccagcagaggatggttttacgtggacagggtgattcacctgttagaatttgtgatccttgcaaaaagcttgaggaagaagcacgccatgagttgagatatgggcacaaaaatagagctacaagagctaccacaaaatctgcttcgaaaccagaggatgaaattctaagtgaaattcttggaggtggagagcgtatccaatctctggattctttgcttcctgggagaaccacaagcagtgccagtacctccagacgaacttcttctaacctcagtacggacgcaaaaggagatgaaagcctttctgctgaagcacacaattatgaacttaacaataccgcatctattttcaccccagaggagttgcgccaacatgctgtagaagagaagaaaaggtacaaaactttaaaatcagaaggtaaaccagaggaagcactgcgggctttcaagcatggtaaagaacttgagaagcaagctgcagccctggaattagaattgagaaggactaggagaatggctacaaaagcgactaacatctcttctgctgttggtacttcgatgactgctggttctgatgaggttgaaacaaaaaggtcttcaactgggaaaaagattaagaaagaaaagaatgatcttgcctctgagctcagagatctaggctggtcagatgcagaccttcgtgatgaaacaaaggctgcccctatgagtctggagggagagttgacacagattcttagagaggtggcccctaaaccattggagggcaagagaacaggtggtatcgataaatctcaggttaatgctctgaagaggcaagctttactgctaaagcgggaaggtaggcttgctgaagcaaaggaagagctcaagaaggctaaaattttggaaaaacaacttgaggaacaggagattctaggtgaagcagaaaactcagatgatgatttggctgctattattcggaacatggacgacgataagaatgatgacatatttatagatgattcaaagttcccagctttcaactttgaacaaattatggttgcctctaatgatcttgccactgatggtcactttgacgttacagatgatgacatgaatgacccagatatggctgctgctctaaaatcatttggctggagtgaggaggatgacaaacagttggaaaatctcgaacctgtttcttcaaatcaagaggggctaaaggagcaagtactttctctaaaaagagaggctgttgcaaacagaaggtctggtaatgttgtagaagccatgtcattgcttaaaaaggcaaagctactagagaaggatctcaaaactgaagagccagactcaaaggttccttctctagaaaggcagaaaactacacatgcagaagatgccacttatgcagggacgaatgtccgacctataccaacaccaaaaagtaagcttgcaattcagcgagaactgttggctctgaagaagaaggcactagctttgaggagggaagggaaggtggatgagtctgaggaagagctgagaaagggtagtgttcttgaaaagcagcttgaagagcttgaaaattcttccaaaccacctgtagcaaaggaaaccaggagctttccatctaatcccccgtacaaagttgaacccccaaatatcaatcttgctgatgaggtatatgaacctgaggttacagacaaggatatgcaggatccagcattgctgtcggtgctgaaaaatatgggatgggaagatgctggttcagattctgtggaaacaactgacaaagcatcattttctgcacatgtagttcatcataaatcatcaaaaactaagggccagcttcagaaggaattgcttggtataaaaaggaaggctcttgccctcagaaggggagggaaaaacactgaagctgaggaggaacttgagaaggctaaggtgttggagcagcaacttgcagagatggaagaatcaaataacttgagtgctagtcaaggtgttactactgctggcggggacgaaatattgctagtgcatgcatctgaatctggtacgccagtggttactctgtgtggttctccaagtaaaccgcagattgagacaaccaatcctaatcaaggtgatgtgggagaagaaagtagagctggaaggtctccagccttgtcgcagccagcttttactgatccgttgggatctgaaaaagggtcacattcaccttctgtagtacatgatcgtaatgagcatcagaaaacacaaggagatgatactcttaaagatgagatattacttcataagagaaaagcagttgcctttaagagagaagggaagatggcagaagctagagaagaattgaaactggcaaaacaattagaaaagcaccttgaaggtgctcaacaagacaccatggatggtgtgggtgactccattactcctgctgtggaacagaacagtttggtccaacaacctgctagctccagcaatcacactgacgacataacttctccccctcctgcacaagcgagcaagcggacgcaacctcagaaagcaatgtccagccgggatcgtctcaaaatccagcgtgaatccctggctcataagcgcaacgccctcaagttgcggagagaaggaaagactgcagaagcagatgcagaatttgaactggccaaggagctagagagccaactggaagagtcagacaaccaaagctcgagctccgggggaaagtcaagtgaaccaaacgacacgagcgtcgagaatctccttgatcctcagatcatgtctgccctaagatccattggttggagtgacatggatttatccatgcaatcctctagtgcacaacctctgaaacctgtgcagtcctcaagttctcaacctccgcaaaaagtggaagccaagtcatctgttgccgcgaccagcaaacctcagagcgagagaagtcaacttgaagaacagatcaaggcggagaaactgaaagcgcttaacttgaagcgggaagggaaacaagcagaggccctggaggcccttcgctcggcaaagcgactggagaagaagttgaactcagcttaagccaatcacaccctcccagattgctcttgttcttttgtcaattgttcgttttggttacctgacatcccaagcgttccagctagaacagagaatcatatcgagtcctatggccctgattggcacagcttgtgagctttgagcaccataaacttatgtcctgtttgtgttcgagctatgagcagtccctttcatgtatgtataaataaaatctgatggacggagattattttcacgaattcgtgtatacacaatgttaggggaatgtcaattaagttggaatctgaac

SEQ ID NO: 530 - DNA, 1666 bp, Zea mays
  Clone ID: 700077370_FLI
gagatacctcaccgtcggcaaacccttatgtacaccgctacatggcccaaggaagtccgaaggattgcagatgatcttcttgttcatcctgtacaggtgacaattggaagtgttgattcacttgttgctaatagttctattactcagcatgtagagatcataacaccctcagaaaaacaacggcgcctggagcagatattacgatcccaggattcaggttcaaagatattaatattttgtaccaccaagaggatgtgtgaccaacttgcaaggacactcaccaggcagtttggagcttcggctattcatggtgacaagtcccaaagtgaaagggagaaggttctgaatcagtttcgatctgggcggtctcccattttagtggcaactgatgttgctgcgcgaggtttggacatcaaagatatcagggtagtgatcaactatgacttccccactggtgttgaagactacgttcacaggattggcaggacaggaagggctggtgccactggtgttgcatatacatttttttgtgatcaggattcaaaatatgctgctgacctaatcaaaattctggaaggggcaaaccaacgagtgccccgtgatttagaggatatggcttctcgtggcggtggacgaggtaggaagaggaaccattgggcatcccgccctgacaggggtggttcacgttctgaactggattcaaggtacagcagcagagatggactagcatcttctgggaaatcagagagtggtcgcggcagtcgtggaagggatgataatggtagccgtggcaggtacgaccctggtgaaaccgatgggcgatctcgtaggtctactagaggccgcagtagaagccgtagcaaaagtgacagtagaagccgtagcccaagtcccaagaagtcacgtcgtcatgaaggtagacgtagcaggactaagagcaggagcaggagcaggagccgtagaaatcatggtgctagccacagcaagagtcgcagccctgtcgctagccgtaggtatgaaaagactgcttcaggatctgctcggcctaactcggggcatgcagagcacaaaagccctccaagatctcactctagggatgaccatgtgaaccactctgaccacaaggatgaccacaaggatgaccacatggaagatgggaagatggaaagggttgatcttgatcgctcgcccagcccacacgatgacaagtctgctccatatagtcctgtgtacaatggcaaagccagtggctcaatgagccccaacggtcagccagaggcaggtgccaaatttgttgaaccttctgggaaacctgagcctgcatctccagtgcgctgcagcaaaggcagagatgatgatgaggaaggtatcatagacgaggatggagagattggtgaggatgatccgcgtgcaaatgcagctgtgcagaatggtaataactgacggagagtggcctgcatcttctgtgacaaccaagacttatctgttatgcaaaatgcagtcattcccatctgcaagtcctgaatacggaaatgcatttgtgtgccattaaatatctcgtagaacatgtgatactgatgcctctgccatcgatgaaccaaaactgttgatgcatgtcatgtcatgttgttaaacttaatgacattgttgtgttctggtgttttcc

SEQ ID NO: 531 - DNA, 2803 bp, Zea mays
  Clone ID: 700077379_FLI
gtctgcaactgcaactccacctcggccgtcggccttctcatcctcgtcaccaccggccacggccggcctccaccaccgcctgcccaccgctcgctactcttgtctgtctcccctccccccaagtggaagaagaatcgggctgttgctcactcagagctctctcagtgaggcgtgcctcactagtcactagccttgctgttatgccttccccgccgctcgccagagtccaccgccaccggacaggaagcaccacctagttcctgaccctgatgcccatggcaccggaccaccccttcgatggcttcgtcgccgcagcccgtggcgccgtagcccaccttcacctccccgtcatccacatccctgtatccaattccagtccccatcccaactccaagcagcacaagggactcgaggtcgactgcctgctccacctccacgtcctcgtcaccaacttcctccacaagcccctcaagtcattcgccaggtgcttcaggcccaagcgacggacagacacacactccccgccgctccaccaggagcccagcaatggcgccaccccacaaaagcaactggagttcctgctctgcattgcgttcgacgccttcgcccacaacctccacgcgctggatgacgcctgcaagcacaaaggcgaggaatttgctgccgctacccgacagttggagcaatttgtggttctcaggaaggtaatcgatgggaagagggccgatttcgatgggttcctttccaatctgggctttgcaaaggttggggcaccgccaccgccagcaagcatcgtgggtggtgcgtcccctgtcccagcaccagcaccagtcagcaatcaggaggatggtgccgtgattggaaacggcgagggggtggacagtgctagtggtacacaacagcaggcacagaaattgcctgcccggttgcttaacattcctttgtcgaatgtggagcgtctgcggtctacactctctgcagtttcactgacggagctcattgaattagtcccgctgctggtgagcagatcatcgacatcggcagatgcacatcctgacaagaagaagcttttctcagtgcaagatttctttagatatgcagaaattgaaggaaagcgattctttgaagagttggacagagatggtgatggccaagtcactctagaagatctcgaaattgcaacgaggaagaggcggttaccaaggaggtatgctcgagaattgttccgccgtacaagaagcaacttcttttcgaaatcaattgggtggaagcaatttttatccttgatggaacagaaggaagcaaccattctccgagcgtataccacgttgtgtttgagcaagtctggaacacttcacaaaagtcaaattttgacttctttgaaaggtgctggacttccagccaatgaagataatgccgctgccatgctacgttatctaaatgctgattcagaaggatcaatctcatatggccatttccgcaacttcatgcttctacttccttcggaacgtcttgaggatgatcctcggaacatttggtttgaagcagccaccgttgttgctgtccccccacctatagaaatatctgcaggaagtgttttgaagtctgctttagctggaggtcttgcaagtgcgctttctacctctctgctgcatcctattgattcaatgaagacacgtgtccaagcatctacactctcatttcctgagctcatttcaaagcttccacaaattgggcttcgaggattgtatcgaggttctatcccagcaattctcggccagttttcaagccatggtttgaggacaggaatctttgaagcaagcaagcttgtattaattaatgtagctccaacacttccagagattcaggtgcaatcaattgcatccttctgcagcacagtcctagggactgcagtccggatcccttgtgaggttcttaagcaacgtttgcaggctggaatattcaacaatgtaggggaggcgattgttggcaccatgcgacaagatggcccaaagggtttttttcgcggcactggggccacactgtgtcgcgaggttcctttctatgttgctggaatgtgcctctatgcagaagctaagaaggcagcacagcatgttttgaggagagacttggaagcatgggaaatagtggcagttggagcattgtctggaggacttgcggcaatagtaaccactccctttgacgtgatgaagactaggatgatgactgcccctccaggcacaccagtgtctatgcagatgataatcttctccatccttcgaaatgagggtccacttggactctttaagggcgcgatcccccgcttcttctggatcgctcctcttggagcaatgaattttgcaggctatgagcttgccaagaaggcgatgatcaaagatgagaacagttccagtgagtcaacaaaagagaacttgccaagaaagcagtgatcaaggatgagtgtgattctagggcgtcaatacaggacaagaaaaccatgatggataccacaggataatctaacgtttacctggttaacatctatggtgcaaagaaattgaaaccatggaacagttttttttgtgtgtgtgttcatgtagcagagaagcaacagaacatctgcctttttttgatacttgaatctaattttgggttgccgcgtctttttgcccctctaggaattccattcccataggccttgagatggttgtatagtatacagtacatgagagagacagatgcacatgctggagctgttgctcttttgtttgttatttgacgatgatccatagccttcctggtt

SEQ ID NO: 532 - DNA, 1376 bp, Zea mays
  Clone ID: 700077395_FLI
ctctcgcagctagcttcgagctcgctgaacaagtgaagccatagcgggagcagctacaacgaagtgatcctccatgggcaacaccttcggcttccgtggtggcctccgcgccgacgtcgccgatctgatgcaggatgctggcgaacacctgaggagcagtggggtgttcgtcaagagagcggtggcttctcagtaccaaagcaaccgcaccgggaacgacgaaatcgacgagtcgtccgccgaggagctgcgcgacgcggcgagctacgtgcagcacaacgcgatgctgatccaggtgccggtggtagggacagcgaggacgttctggcggctatcggacgaagccacgaggatgatcaggaagctcgcgttgatcctgaggaaccaccactccgtctgcaagtgcctcgccgctcctctgcaggcgtccaacgtctgggtcgggagcgctgggaacgccaagctaaggggggcgaggttcaccgacaaaggcttcagcgtcgagcgcgtgagggaggactacaggaacctgtccagggtgctccagcagctgatcagtatctctggtggggataccagcaaactgcctccggattacatagattttctctcgctcttgacggaggacaaccttacaaacaaggatgagttcttggttgtaaaccatgctgctctgctgcctctgaaaaaccgcaccgaggccttcctgatgctatacgacaggatcgtcaagtacctcggcaaaagaaaccgagcgaagatgaacaggatactctcctgcctcccctaccaggacgactggctggacaccgcgacggcgaatgccaagatcaaccagtggattgtgaatgtccagaatacaaaggagtacaggaagactacactcgatctcctgcggctcaacagaaacgtgagaagccacttgcacgagtacggccacgacgacgacgtcgaggagatcctgtactgtgagtggcccatgctgctcgtcgtcatggagaagatgttgcaccgggaaggcgagctccaagacacggacatcgagaacaagttcggctagccgctagccggtctacactgcaaaacagatgagatggaaggtgtgttctgcgtttcctggggttggaaatggtgagctactgttcttcgatcttctgtgagaatgttcatggtgatggagtgacacgctaccggtacctggtttgctttatgtaataggctacctgctttctcttgtcccttcaacttggaaaaggcaacgccagtcagcttcataaactgtggtctaaaacatcgccttaaaactttaaaatctttatgctgtaaagtcgtcttgtcattgagtttgcattcatcctttaatctaaaattcttgt

SEQ ID NO: 533 - DNA, 824 bp, Zea mays
  Clone ID: 700077413_FLI
actacgactacctcttcaaggtggtgctcatcggcgactccggcgtcggcaagtccaacctcctctcccgcttcaccaagaacgagttcagcctcgagtccaagtccaccatcggcgtcgagttcgccacccgcagtctccaggtcgacggcaaggtcatcaaggcccagatttgggacaccgccggccaggagaggtaccgtgcaatcacaagtgcctattaccgaggagccgtaggggcactgctcgtctacgatgtcacccgtcgcgccacgttcgacaacgtgggccgttggctgagggagctcagagaccacaccgaccagagcatcgtcgtgatgctggtcggcaacaagtccgatctccggcacctggtggccgtctcgaccgacgacgccaaggagttcgccgaggccgagtccatgtacttcatggagacgtccgccctcgacgccaccaacgtggacagctccttctcggaggtgctgacccagatataccagatcgtgagcaagaagacggtggaggcctccgaggagggggcggtcgcccctggcaagggggagaagataaacgtcaaggatgacgtttctgcgatgaagagggttgggtgctgctcaaactaaggcgaatagccggatacgaactgtttgttcgattgtctttctgtggatgctgagggttagaggaccgttgagagagactatcagcttaaattatttattatcagctctgaattcgtggttctgtcaaattcaatcatttttttgtgttcttgcctcctactgctatattttttttatgaactgaagaatttgccaacc

SEQ ID NO: 534 - DNA, 2112 bp, Zea mays
  Clone ID: 700077449_FLI
tgtcctccgccccccacaggctctgctggatccagaaccttctagaacccctgcactgcgcggtgcgcgccatcctcctccttccttccatccagatctcgacacccctcgccggcccagacctccggtcctgtcgtggccccggggttcgggcggctgccaaagaatcagtggccatgggatctgctatcctcaacagcattgcccccgaggagcctaaagtggtcgtgccagagtacggtgagacggctgatatccaggacaaggaagttagtatggaacagctctgctccataagcacctatgatcagtggacgccactctctgtttctggccagcttcccaaaccacgctataagcatggagctgtggtgattcagcagaagatgtatgtctttggtggaaaccacaatggccgttaccttggcgacattcaggttttggacttcaaaactttgtcatggtcaaagctggaagctaaatcacaagcagaaccatcagaatcagctggagcagttccgttttctgcatgtgctggccattcagtgattcaatggggaaataagatcctatgtcttgcaggacataccagagaacctgcagaaagtctcagtgttaaggagtttgatccacaaacctgcacttggtctaccttgcgtacttatggaaggtcacctagttcacgtggtggtcagtcagtgacccttgttggagacactctagtggtctttggcggtgaaggtcatgggagatctcttctgaatgatctgcacattcttgatcttgagaccatgacttgggatgaatttgagaccacaggcactcccccttccccaaggtcagagcatgctgctgcttgctttgcagagcggtatcttctgatatttggcgggggttctcattctacatgtttcagtgacctacacctccttgacactcagacaatggaatggtcaagaccaaagcaacaaggtgttactccagaatcaagagcaggacatgcaggtgtaactattggagaatattggtttattactggtggtggaaatagtaggaaaggtgtctcagatactcttgtactcaacctgtctacgtatgaatggtcagttctcactaatcttgaggcccgtgcaccccctgtaagtgagggctcaagtttagtaatgcacacaattaatggagaaaattttctggtgtcatttggaggatatagtggccgttatagtaatcaggcttatgctctcaaggcaagtctcaaaccaagtgtcccatctcaacaaataaatgaatcagatacaaatggcttttctcccttatctgtggcagaaaattctagcaggaaagtcatatttgaaattgaggaacttaaagatgaaaagcctggcaatagggcagataacagcaaaaccttgggacaagtagttatggttgaacaaaacgaaatagaagacagacttaatcaagagcacttgcagagtctccgcctgaagcaggaactaactggtcttgagaacagaaatgcagaacttactgaggaactccacttagttcaagatcaactttctatcgaacaaaccagggcttccaaatttgagaatgaaatttcagatattcaacaacgactacagaagatggataccctagaaaaggagattgaatcacttcgctatgaactggacagcactgtatccgaagaagaatcttcaagtggcaacgagttgcaccgcagtcggggcttttggaggtggaatgggtgaactcctcgagactcaaggagtgagtattgaagagaatactcttccaaatagttgtcattattttaatttttatgtctttcacaaaaatatatgaattcgtggatggtactagttcggaagcatatagaggatctaagcaaactgcagcaacatcaactgtgaaaagcatcttacagaaagtaaaacgagtatcatgtggcccagaatttcctatgttagaatagtttcttatctgataatgacaccgacaatgatcaccataacgaattattttttttcatacatatgtggtgggatattaactttttgtcatgtcatcatacttatgtgccggaaatttatatcatctcatgtg

SEQ ID NO: 535 - DNA, 799 bp, Zea mays
  Clone ID: 700081971_FLI
actaaacatattttctgctattagttatcagattaaattataaattgcaccagaatgtttgcaagtaccctgtttttcatgcaaattacggaaacctatgatgcgcaggttatctgaatgatccagaggcgacaaagaacaccattgataaggacggatggctgcacaccggggacattggttatgtggacgatgacgacgagatcttcatcgttgacaggctgaaggagataatcaaatacaagggcttccaagtacctcctgcggagcttgaagcccttctcatcacacatcctgaaatcaaggatgccgctgttgtctcgatgaaagatgaagtcgccggcgaagtcccggtggcattcattatacgcagtgaaggctctgagatcagtgagaacgagatcaagcagtttgttgcaaaggaggtcgtgttctacaagaggatcaacagagttttcttcacggattctatcccgaagaatccctccggcaagattcttaggaaggacctgagagcgcggcttgccgcgggcatcccaagcagtgacaacacacagtccaaaagttgatacgtactttcgtactattcttttctagctgtgccaaaaatcatgctgtgctctattcatgagatggcaatggtatacacaaaacgccaagcggtcgttatcgattcttctagatgggcaagggtaaggtatacttcgtttgtgtccgacatattatgtatttgtatcatgtatagatacgttttgttgacaacaagtgctaattataatgtataccatgtttgggaacc

SEQ ID NO: 536 - DNA, 630 bp, Zea mays
  Clone ID: 700082035_FLI
ggcattctcgaattccgattcccaatccagcaaaccttaccagccttttgcaaactcagagagggacccgatggcacccaaggcggagaagaagccggcggcgaagaagcccgcagaggaggagcccgcggccccggcggagaaggcccccgctgggaagaagccgaaggcggagaagcggctcccggcgggaaaatccgccggcaaggaaggcggtgttgacaagaaggggcggaagaaggccaagaagagcgtggagacgtacaagatctacatcttcaaggtgctgaagcaggtgcacccggacatcggcatctcctccaaggccatgtccatcatgaactcattcatcaacgacatcttcgagaagctcgccggcgaggcggccaagctcgcccgctacaacaagaagcccaccatcacctcccgggagatccagacctccgtccgcctcgttctacccggcgagctcgccaagcacgccgtctcggagggcaccaaggccgtcaccaagttcacctcgtcctaagctcctttctagtaggtccttaagcgccgtggcgccttttgactgtatggaatgtttgtcatctgaaagttgatctgagcagtgcaatatataattctggc

SEQ ID NO: 537 - DNA, 1830 bp, Zea mays
  Clone ID: 700082038_FLI
gatcacctggaacgggatccagcaccggaagaactgctggcaggacggggtgctcggcaccaactgccccatcccgcccggctggaactggacgtacgagttccaggtcaaggaccagatcggcagcttcttctacttcccctccaccggcctgcagcgcgccgccggcggcttcggcggcatcgtcgtcaacaaccgcgacgtcatcgccgtgcccttcgcccgccccgacggcgacatcaccatcttcatcggcgactggtacaacaagaaccacacggatctgaggaagatgctggacaaggggaaggacctcgggattcccgacggcgtgctgataaacggcaagggcccgtaccggtacaacgacagcctcgtgccgcccggcatcgagtacgagaccttcaatgtgcatccgggcaggacgtaccgcatccgggtgcacaacgtggggacgtcgacgagcctcaacttccggatccaggggcacagcatggtgctggtggagacggagggctcctacacgtcgcagcagaactacacgaacctggacgtccacgtgggccagtcctactccttcctcgtcgccacggaccagaacgccagctccgactactacgtggtcgccagcgcgcggcaggtgaacgagtcccagcccctctggcgccgcgtcacgggcgtcgccgtgctccgctactccacctccgggggccccgcgtcgggcgccctacccgacccgccgcaggaccagaacgacagggccttctccatgaaccaggcgcggtcggtccgctggaacctgagcgccggcgcggcgcggccgaacccgcagggctcgttccgctactcggccatcagcgtgacgcaggcgtacctgctgcggggcgcggggcccgtgtggatcggcggcaggcggcgcgcggcgctgaacgggctgtcgtacgcgccgccggagacgccgctgcggctggcggacgcgtacggggtggagggcgtgtacacgctcgacttccccgagcgcccgccgctccgggcatccgcccccaggatcgcgcggtccgtcatcaacggcacctaccgcgggttcatggagctcatcttccagaacaacgacaccaggatgcagagctaccatatggacggctacgccttcttcgtcgtcgggatggactacggcgagtggacggaggacagcaggggcacgtacaacaagggggacggcgtggcgcgcagcacgatacaggtgtacccgggcgcgtgggcggcggtgctggtgtcccttgacaacgtcggcgtctggaacgtgcggtcccagaacctggactcgtggtacctggggcaggaggtctacgtcagggtcgtcaaccctgaggacaccggcaacaagaccgagatggccatccccgccaacgctctctactgcggccagctccacaagtaccagaaggagcagactccgcaccacaagatgggggcgtctgctgcagcgccacgctcgttggtgtccctagcgcgccggctgctcgcgacggcgctgctcctcgccggatccttcgtgttggcgccgtagagtgagtggcaaccgtacttctgcaccgaggcggcacccgtttatgtaggtttgattaggattagaggcgtaggccgcgtcattacctatgaaaattgttcatatgccagcagtgctggcctccgcctggtttcctatggtacagttctccctcgctttcgttgtgtgtgtgtgcgcgcgcgcgcgcgcgttagttagcctctgttaggaagggtcgatggtttctctctgattagttcattccttttgatggtgattcc

SEQ ID NO: 538 - DNA, 737 bp, Zea mays
  Clone ID: 700082067_FLI
tattactgcacttgggggttcttccccgttgggttccctgggtgtcctggctttgaaagaatggtcaatgcacagccatcgggagtagatcagctgaatgcgccatggcttggaagcgcaggtggtgtacatggtaatgctcagaatggggtgccaccagttagtgccccagtggtagaagtgccagtcaaggatcccatagaggtgcctgcagtgacaccgccagcgaagccgatgcgagtgaaggtgggtgcgaagaagcgtggtcgccccaagggtagcaagaacaagaagaaattatgaatgccaatgatgaacatgatggttatcatcatagatcacatgaattaactgagatatgcattcaatcacactgccattgtagtcaaccgaagcactcgtctgctggttgaattctcacttgctgttgccaggatctctaatgtggagcaagcaattttattgctgaaagacttctttttcaatggtagaattcttccttttcgagattatgatgttaatctctggttcgtccccactgccgtacttgacattatgctttagctgtaactattgtatttgcatattcgtctaatttctgcttccctgaagacagttgtattgatctaaatcgataggtgtctagttactgtttattgtacgttttgagtttggtgctactctgctctagtgctctgtgtcgtaatgctgcaataaatggaatggtttaaagctct

SEQ ID NO: 539 - DNA, 3163 bp, Zea mays
  Clone ID: 700082072_FLI
tttcttcattgttcgactgtgatgcactctcctgttttacttgctacacgtgctgattttgatgatctccatgaagctcatatgccctgttatgcacttgtatgctcgcgaatgcttgttccgcttgatgatgcaccgtctttggatataccccctgctgttgttaaccttttgcaggagtatgctgatgtttatcctacggacttaccaccgggtcttcctcccctccgtggcattgagcatcagatcgatctcatccccggcgcttcccttccgaaccgcgccccgtaccgtacaaatccagatgagacgaaggagatccagcgccaggtacagacgctgcttgataagggttacattcgtgagtctcttagcccttgctcggttcccgttttactcgttccaaagaaagatgggtcatggcgtatgtgcgtagattgtcgtgctattaataacatcacagttcgttatcgatatcctattccacgccttgatgatatgctagatgagcttagtggtgccgttattttctctaaggttgatttgcgtagcggttaccatcagattagaatgaaactcggtgatgaatggaaaacggcttttaaaacgaaatttggtttatatgaatggttggttatgccatttggattgactaatgctcccagcacctttatgcgtttaatgaacgaagttctacgggccttcataggtttgtttgttgttgtttatttcgatgatatccttatttacagcaagtctatagaggagcatttagaacatttgcgtgctgtttttgacgctttgcgtgctgctcgcttgtttggtaacatggaaaagtgcacattttgcacgcaacgtgtctcgtttcttggttatgtggttactccgcagggcattgaggtggatagcatcaagattgctgccattcgggagtggcctacaccgacgacggtcacacaaattcggagctttcttggacttgccggtttctaccgcagatttgttcgtgattttagctccattgcagcacctctacatgagcttacaaagaaagatgtgccgtttgcctggagtgattcgcaggaggtagcgttcagcactttgaaagataagttaacccaagctcccctcttgcaattgcctgattttaataaagttttcgagcttgaatgcgatgctagcggtattgggctaggtgctgttttgttacaagaaggaaaaccagttgcttattttagtgaaaaattaagcggtgctagtctgaaatattctacttatgataaggagctttacgctttagtgcgcactttgcatacatggcagcactatctttggcatcgtgagttcataatccattctgatcatgaggctttaaaacatattcgtacccaaacaaatctgaaccgtcgtcatgctaaatgggtagaattcattgagtcctttccttacattattaaacacaagaacgggaaggacaatgttattgctgatgctttgtctcgtcgctataccatgctgtcacagttagattttaaaatctttggtttggacactgtgaaggatcaatatgttgacgatgctgattttaaagatgctttcggccattgtattaatgggaaaccatggggcaaatttcacatacaggatgagttcctatttcgcgctaacaagctgtgtgttccagctagctcggttcgtcttttgttgttacaggaagcgcatggaggcggtctcatggggcattttggcgtctacaagacacatgaggtgttggctgcccacttcttttggcctcggatgcgcgctgatgtggagcgccttgttgcacgctgcactacttgtcagaaagctaagtcacggttgaacaaccatggtttgtatatgcctttgcctgtcccttcttctccttggcttgatatctctatggactttgttttgggcttgcctagaactaagaaggggagggatagtatttttgtggttgttgatagattctctaaaatggctcactttataccttgtcataaaactgatgatgctagcattgttgctgaattgttctttagagaaattattcgtttacatggtattccaaaaacaatagtctctgatcgcgatgctaagtttctaagccatttttggagatctctttggaataaattgggaattaaattgttgtttagcactacttgtcaccctcaaactgatggacaaactgaggtagtaaatagaactttatctaccatgcttagggctgttttagacaagaatttgagacgttgggaggattgcttgcctcatgttgaatttgcttacaatcatgccacacattcttctacaaagatgtgccctttccagattgtttatggttacattcctagggcacctattgatttgatttcacttaatgctgcgaacgccccacatgtagatgcttctgcacatgttgaacaaatgattagcatacatgaacaaacgaaacagaacattgctgctactaatacaaaaaatcaggttgctggtagtaaaggaagaaaacatgttacttttgaacctggtgatatggtttggttgcatttgagaaaggatcgttttcctactttgcgccgttctaaattgatgcctcgtgctgctggtccttttaagatactaaccaagattaatgataatgcttataccctcgacctacctgcggagtttggtgtttccactagttttaatgttgcagatttgaaaccgtatgcgggagaagatgaggagttgccgtcgaggacgacttcagttcaagaaggggaggatgatgcggacatcaacaccaacacgagcacatctacaccagcagcaccttctccagcccaggcgccaccccttccacctgggccagtgactcgggcccgtgcaagagaattgaactacatcatgttgttaaagaacgaaggcccggaagaatagacgaccagcccaattgcggcccataatggacgacctagggttggccgcccctaggggctgcgccccctctctatttattcaggagctgcgcctcctttatttcctgagttttgttttacgttagccttagctactctcgaacacgcgcaaatctgcgctgtcttcgtgtattcagaactccaccctcgagtaatagattagattgctcgcc

SEQ ID NO: 540 - DNA, 888 bp, Zea mays
  Clone ID: 700082103_FLI
tggcggtttctttcgcaaacctcaactccgaggcagggcttaaaaagcttgatgagtaccttctcactcgcagctacatcactggctaccaagcttccaaggatgacttggctgtctacacttcgttttcggctgctccctcgtccaagtatatcaacgtagcaaggtggtttaaccacattgatgcgctcgtgaggctgagcggaattactgcagagggccaaggtgtgaaggttgaatcctcagcagttccttcagccccaactccagatgttgctgaagcacaggccccagttgctgaggaggacgacgacgatgatgttgacctttttggtgaggagaccgaagatgagaagaaggctgctgaagagcgtgctgcagctgccaaggcttctggcaagaagaaagaatctgggaagtcatcagttttacttgatgtgaagccatgggacgatgagactgacatggccaagctcgaggaagctgttaggagtgtccagatggaagggctgctctggggcgcatccaagcttgtcccagttggatatggtatcaagaagctgcaaatcatgatgaccatcgtcgacgaccttgtctctgtcgacactctcattgaggactatctgtgcgctgagccagtgaacgagtacgtgcagagctgcgacatagttgccttcaacaagatctaggcgtgacttccgatcagtccttctcctggggtgctggcgatggtggtggctgggcaatgcaccagcctaatttatccatagctatatgtctgctttgtgtggccagtgatattgccgtgagtatttttggatcctattcgagtcgaatgtaccagtaccagagttaatttgctttaattcgaaacaccgttccagttgg

SEQ ID NO: 541 - DNA, 1265 bp, Zea mays
  Clone ID: 700082112_FLI
atagatctgggcaaacctgttgcgcttgacgtcgttgttgatggcacagttcctcaaggctctggactgtcaagctcagcagcgtttgtctgttcagcaacaattgctatcatgggaatccttgacaaaaactttccaaagaaagaagttgctcaattcacttgtctgtccgagcgccacattggaacacaatctggcggcatggatcaggctatatctatcatggcgaaacctggattcgctgagttgatagattttaatccaatccatgcaactgacgtccaactaccttcaggtggtacatttgtgatcgcccattgtttggccgagtccaagaaagcagagacagctgcaacaaattataataaccgcgttttggagtgtcgcttagcagcgattgttcttgccatcaaacttgggatggataggaaaaaagctatctcctccgttacaaccctctccgatgttgaggggctatgtgtttcttttgctgggagagaaggttcatctgatcctgcagtagctgtgaagaaacttctgcatgaggacccatatacagctggagaaatagagaaaattacaggagaaggcctgacatctgtcttccagggctctcagacgtcattggatgttataaaagcggcaaagcactacaagctatttcagcgtgcgacccatgtctactctgaagcaaggagggtttatgctttcagggatactgtctcttcaaaactcagtgaggaaggcaagcttaagaaacttggtgatcttatgaacgagagccattacagctgcagcgtgctatacgaatgcagttgccctgagctggaggagcttgtgaaggtctgcagagacaacggagcactgggagcacgtctgacaggagctgggtggggtggctgcgcggttgctctggtcaaggagcccatcgtccctcagttcattctgaaactaaaggaaatgtactacaaatcaaggattgacaggggagtaatcaagcagggcgatgtgggcctgtacgtgttcgcatccaagccgtcgagcggcgcggccatactgaggttgtaggcaggcaggaaggcagaggcagccgctattcttttcacgagtgtggtggccctgtaaaacatggaataaagttgccatgaacaccgaacccttgtagtagcgttgaattatctcagacaacacgcgcattaaattgatatctatctacaggagtaacacacgagcgaaccatgctgttttaaatcctctttcttgct

SEQ ID NO: 542 - DNA, 704 bp, Zea mays
  Clone ID: 700082115_FLI
agagagagaattgcagaaaggatgagggcattgcaggaattagtccccaacacaaacaagacagatagggcagccatgctagatgagatccttgattatgtgaagtttcttaggcttcaagtaaaggttctgagtatgagcagactgggcggtgctggcgcggttgcgcagctggttgctgatattccactctcagttaagggcgaggcaggcgacggcgggggggcgccgcagcagcagcagcagcagcacgtgtgggagaagtggtcgacggacggcacggagaagcaggtggcgaagctgatggaggaggacatcggggcggcaatgcagttcctccagtccaaggcgctgtgcatgatgccggtctcgctcgcgatggcgatctacgacacccagcaccccctggacggccacggccactcgctgaagcccgagcccaacgcgtcatcctagtacagtaacgtcgtccttagcgtgccttccaattccaacacccaccccccttctccctaaaaagtactgttaggcgccgatattatccggaagaaaaaaagaagtgtatgatataccgagcgtgcgtttccagtgtgctgacccgtgggataggaaaggaccgaaaattgttggtatatgatgattatgtagcctcctgtttgcctgttctgtttcaaatcaaagcaatgctcatgcatccaggttcc

SEQ ID NO: 543 - DNA, 2092 bp, Zea mays
  Clone ID: 700082137_FLI
cgccccggccaaaaattccccaatcgctcgttttccaccgccgcggcggggctaaatcgcccggtattccccaagccaccgtcgctccacgccaccccggcgtcgccgcctccacacgttcgtccccggtaacacccgtttttatccgtcctaccaccccgcacgcccgctcgcctcctcctatcgtcgcatctctccacggccgcgagcagcaatcgatggtgggggacctgtccctcctcgccgtcgcctccgcctcccccgtcgtcctcccgccttccaaggtacgcgcgcgggcctccccccccctccctcgcgcccgggctgccgtcggtcaactgcctgtgccggtggggcgggcgatggccgcctgattcctgactggttcggctatggctttccagttgcgatttcggttcgctgtggctgacggattccgggattcgtggtgtcacgatgaaacaggagttccatggcgtgcttcctctccagggtaagagaccgcaggacgccggcgtgcagctctgcgcgccgttgcagcagcacccgccccaccatctagaggcggtgccttaccaccagggccagcccgggcagatggtcgtgcccggcacccatcagggacaggccctcccggcggcctatcaggccatcacgatgcccgacacggccatgctcatcgacgtgcaagattctcaccctgactcggttcaacttagccttgggattgcggagcaatgtgcaaggcaagagaaactcctcaagtttctggtgtcaggatctgatgtaaaggaacttgatgaatccttgctagctgaattcacggggcaacagactctagcaataaacatgggaactcatccatatttgccggatgataagctatcaattcctgaattcgtgttgaatgagccccaacactatctgccagagaaagaacttgtcatcccagatcctcttctgcacttcatccagtcccatggtgctgctcttactattgatcaaagtggtcgggtcctcttagctggcaatggtgatgagatgagagacttgctctcaattttcctggcgttcaacatgtcgagacgagaaacaggtggctgcaaggctgcatttcttgttccatactttgagaggaaaagacgttctcgggctaacagccaagtatccaatttaaaattagcaggcacaactgctgatgtttcaaaaaggcgcggaaacatttggacatttaacttttatgttcttgctacattttagattgttgtttccacctttttagacagtcaagatattgatacgttctgttgttgtttttaatgtgcagtactgattttaattcaaaatctttgtcaaagaagaaacataaagtgaaaaacatcaaagaacgtgactcgtatcagagaaactacatacatgctagcgaggttattttatccatcctgctggacaaggacaggagcagctcgacaatcctctcgctgaaaaaggctggtcctgagatcactgaacttttaacgcaatgctctatcggcattgctggaactggactggctattctcctgtcagttatgtgcaagatgtctaatggcatgaggactccttttgcttctgcccgactgcttagcaccagcgtcggattcggactcttctggctatcctgggcagtcaatggattgcgtgacaccatcgccagcattttcagaagccgaagtggcatgaatatcgaggatgacgaggtcgcagtgaaaatagaaaaaagtgtgaacgagatcctcttcagggcattaactctcctggcaatcactgcactgaagtttgcatgagcagtcatcacgattttataggtttgtcgatgcagttgtgatatactcacctatgtctatgtggttcagaagtgtagtactgctttctgtaggaccaagttccacctgcccaaaccatggttatagcttctcagttctcattgatctcgtagaaaatgagccaagttgtaaattgtacaggatttttgcaggaaactcggtgtatattgtggatgatggattttaactctgtgaacattggataatctgatgcccagagcttattt

SEQ ID NO: 544 - DNA, 799 bp, Zea mays
  Clone ID: 700082144_FLI
ggaggcgctgtttaacgatggccgggttcagaccgcaagcagggtcatgaagagtatgattgagaagggagttactgagaacatggatgtggcacacaagatactggaagctctattcacgaggggccatgtcgaggaggcaatcggccgtgtcaatctgatggtggaaaatggctgcatgcctgatctggataagttgctggtcggcctatgtgacaatggtagagtgatggaggcgcagaagctggctgattttgcgttggacagggactttgatgttagcttctcgacctatgacagagttctggaggccctgtacgccgaagaaaagacgttgcctgcgtactccatgctgtgcaagatcaagaacaaaggaggtgttgtcagccagaaaggctgcgatgacttgatggagagcttaaaatccgaaggatactcaaagcaagcagatattctgtctaggattttggcagagaatgcacagtcgacgcccaagaggggcagaagggttgccatgggtgcttagtgagctttgccagcttgtttagagcatctgtgtctttttttttacttcaagaaagatgcgatttctttcttttcatcgatgcttcttgagctatttatcaagtaggggattttggtcctatgggacgataagcaagggcgtttactttctgtttggaggatccctgatctgttcgtcttggcgagaagaaacatatgcaataatagacaaagatgtacctcccattatgagtggtgttgtcaaatttagaattaattacttttaacatactgc

SEQ ID NO: 545 - DNA, 971 bp, Zea mays
  Clone ID: 700082161_FLI
ctttcgctccatcccttactcgcgctcggcacaccggttctcagggcggcggcgctcaggctcgggctctcagcgacggcgtcaacggcttcccctcccgcctccgctcctccgcacaccggccggtgaccctgctgaactatagtcttatggcgggcgagagccagggggtggaaagactcctctcctatgctgaagatctcgtggccgtcctttgcgtcagcaccgactgcgacgacaatgcacaggtcggtgccggagtgcagaggctgctgtctgcctgtcgatccgagtctgacgatctcgagatgcagctcaaagagtatcaggaaaaaatacactcctgcaaagaaaagattgacaaagcaaaagctgaaaccattactgacgatgaactcaatgcactacaaagcaagatggaagaaaaactgcaggaagagaagcagcttcgccaagagttaagagtgttacatgatgagcttgatgacctagaaagccaaagactttctataaaagaaagaaaggatgctgtcaagaagaaaaagaaagacacacagaaagcagaacgtacgctttccatgtgtctgtcggttacaaatatcatcccaaatttggaagaccaggataaggtttcaggatatattgtcgaccagaacaggaagaagatagagaagtttgaattcgagaacacgacgccaccagttgagatatgcgacgagctctggaagaagatttagcgtgtttcagatcattcttgttgtaaggcggcggaaacctgtgcctgtagattgtcgcggtgtggttgatgcagtttgccatgttgtttgtatcattagttcatgacgctgtactgttttgtaaggcggcggaaacctgtgtttgtatcgttagtttgccatgtcagattagctactacttattgtgttttaaattattccaaattataagttattctattttttctgagagcc

SEQ ID NO: 546 - DNA, 1193 bp, Zea mays
  Clone ID: 700082248_FLI
ccaaggcgtcctcgagcgggagcacggtgtcctgcgatcagggattctgcgcggccacctatggggggaagctgccagggtgcactgccaatgtgccctgcgagtacagcgtcatgtacggtgatggtagctcaacgactgggttcttcatcaccgatgcgctgcagtttgatcaggtgactggggatggacagacacagcctggcaatgctaccatcacattcgggtgtggtgctcagcaaggtggggatttgggcaactcaaaccaagctcttgatggaattcttggttttggtcaggcaaatacgtcaatgttatcacagctagctgctgctggtaaagcgaagaagatatttgctcattgcttggataccataaagggtggtggaatttttgctattggaaatgttgttcagccaaaagtaaaaacaacaccgttagtagctgacatgccgcactacaatgtgaaccttaagtcaattgatgttggtggcactacattacagctcccggctcatgtttttgaaacaggagagaaaaaaggcaccataatcgacagtggtactaccttgacataccttccagaattggttttcaaacaagtaatggatgtggtatttagcaagcatcgagatatagccttccataatttgcaagattttttgtgtttccaatattctggaagtgtagatgatggattcccgaccatcaccttccattttgaggatgatcttgcactgcatgtgtatccacatgagtactttttcccaaatgggaatgacatatactgtgtgggattccaaaatggtgcattacaatcaaaagatgggaaggacattgtgcttatgggagatcttgtgctttcaaacaagttggttgtctatgacttggaaaatcaagtcatcgggtggactgactataactgttcgtcgagcattaaaattaaggacgacaagacaggcacaacctatactgtcgaatcacatgacatatcctccggatggaaattccactggcacaagtccctggttctgttgttggtaacaatggtgtggagctatttatagtacactaactctattgtacaacacgaacacgcacttaccgaaattcatttgattcgtattcttttcacaaaaaagaatatctagggttttaacttgcgttctctgaccacggaaaacgatgaaaac

SEQ ID NO: 547 - DNA, 988 bp, Zea mays
  Clone ID: 700082281_FLI
ccgccgtgcaggagcggagctcctcgccgcttctctctccgccgtccgagaggctcgacccctgataccacgctgagggcggtggtattaggagattagcgatggcgaggtggcggccggcggcgctgctggtagtggctctggcggcggttctatcggcggcgtggcgggcggatgcgctatcggttacggtgaccgacaccgagtgcatccacgagttcgtgccctatgagggcgacaccgtgtccgggaacttcgtcgtcgtcgaccacgacatcttctggagctccgaccacccaggaatcgacctcacggtaacgtcaccaggtggcaacactgtgtacacattgaagggaaaatctggtgagaaatttgagtttaaagctccaagaggtggcatgtataagttctgcttccataacccatatggagcacctgaaactgtttctttctacatccatgttgggcacatacccaatgagcacaatctggcgaaagatgagcacttggaccctatcaacgttaaaatcgcggagctgaaggaagcattagaatccatcaccgccgagcagaagtacctaaaagcacgcgaagctcgtcaccgacacactaatgagagcaccagaaagcgtgtcatgttctatacgatggcggagtacctggctttcatggctgctagcgcgttgcaggtcctctacatccgccgcttgttcagtaaaaatgtgggatacaacagagtgtaggatagaaatctacttcaaaggcgacggtggaagcaccttatatggtcggaacgggaaacattctctgccagtttgacaaattgtagttctgcaccctctttttttttgttagtttataagaaacactttaatttatcatcatgtacttttagcaacacttgtggtatgttaagtgcatttggtgctgaacattgttccataactgatcttcagaggattgttatgaaagttagtattgttctgct

SEQ ID NO: 548 - DNA, 1482 bp, Zea mays
  Clone ID: 700082285_FLI
cagcagagaaaggccggcctacccactctctctctctctctctccagtctccaccggcagcgctaatcgtaatagccatgggctccaccgccggcgacgtggccgcggtggtggacgaggaggcgtgcatgtacgcgatgcagctggcgtcgtcgtccatcctgcccatgacgctgaagaacgccatcgagctgggcctgctggaggtgctgcagaaggaggccggcggcggcaaggcggcgctggcgcccgaggaggtggtggcgcggatgcccgcggcgcccggcgaccccgccgccgcggcggccatggtggaccgcatgctccgcctgctcgcctcctacgacgtcgtccggtgccagatggaggaccgggacggccggtacgagcgccgctactccgccgcgcccgtctgcaagtggctcacccccaacgaggacggcgtgtccatggccgccctcgcgctcatgaaccaggacaaggtcctcatggagagctggtactatctcaaggacgcggtgctggacggcggcatcccgttcaacaaggcgtacgggatgacggcgttcgagtaccacggcacggactcgcgcttcaaccgcgtgttcaacgagggcatgaagaaccactcggtgatcatcaccaagaagctgctggacttctacacgggcttcgagggcgtgtcgacgctggtggacgtgggcggcggcgtgggcgccacgctgcacgccatcacgtcccgccacccgcacatctccggggtcaacttcgacctgccgcacgtcatctccgaggcgccgccgttccccggcgtgcgccacgtgggcggggacatgttcgcgtccgtgcccgccggcgacgccatcctcatgaagtggatcctccacgactggagcgacgcgcactgcgccacgctgctcaagaactgctacgacgcgctgccggaaaatggcaaggtcatcgtcgtcgagtgcgtgctgccggtcaacacggaggccacccccaaggcgcagggcgtcttccacgtcgacatgatcatgctcgcgcacaaccccggcggcaaggagcggtacgagcgcgagttccgcgagctcgcaaagggcgccggcttctccgggttcaaggccacctacatctacgccaacgcctgggccatcgagttcatcaagtgaaccaccgtcgccgcgatgagatggcatggctgccacatgctttgcttgcttggtcctcgtatcgtacgtcgccgtcgtcgtcttcttctggttattgcgctgctacctcgctgctctcgcgtatgcatgtacttttgcttaattttctttcttcatatcatgcactctggctggcctagactgcccccgatccatggtggccggtacgtcttgtcgagctcttgcatgtcgtggattctaaattcttcttctgcgtcgaattgtctctgccatgtgcgagtaataacaatcaaggttatacttacgatac

SEQ ID NO: 549 - DNA, 693 bp, Zea mays
  Clone ID: 700082311_FLI
agcgaatccctcgcatcgcattcgcagcctttgctgcatcacaccaccgcgaaaccccagcagccgcatcgatggcgcccaaggcggagaagaagccggctgcgaagaagccagcggaggaggagcccgctgccgcgaaggccccggcggggaagaagcccaaggccgagaagcgcctcccggcggccaagtcgtccggcaaagaaggcggcgacaagaagggtaagaagaaggcgaagaagtcggtggagacctacaagatctacatcttcaaggtgctgaagcaggtccaccccgacatcggcatctcttccaaggccatgtccatcatgaactccttcatcaacgacatcttcgagaagctcgccggcgaggctgccaagcttgcgcgctacaacaagaagcccaccatcacctctcgggagattcaaacctctgtccgccttgtccttcccggcgagctcgccaagcacgcggtctccgagggcaccaaggccgtcactaagttcacatcatcttagatttgaggtagtagctattgggtggcgttggtagttgtgtctcaatttgtctgctactaatagtggtaggagtatccatgtgtagttgggttgtggtaagaattgtgttaaactggtaatacgtttgaaattgctttttatggatgtggaatagttgtgtgttgcttgttct

SEQ ID NO: 550 - DNA, 1221 bp, Zea mays
  Clone ID: 700082354_FLI
ccctttgcaagtatagtctctctgctaagcgaagcgaagcttcaagctagtctcggcggctctagaagacgatgggcaaggacgacgtgatcgagagcggcgctggcggcggcgagttcgctgccaaggactacacggaccctcccccggcgccgctgatcgacgcggcggagctggggtcctggtcgctgtaccgcgccgtgatcgccgagttcatcgccacgctgctgttcctgtacatcacggtggccaccgtgatcgggtacaagcaccagacggacgcgtcggcgtcgggcgccgacgcggcgtgcggcggcgtgggcgtgctgggcatcgcctgggccttcggcggcatgatcttcgtcctcgtctactgcaccgccggcatctcggggggccacatcaaccccgccgtcaccttcggcctcttcctggcgcgcaaggtctccctggtgcgcgcgctgctctacatcgtggcgcagtgcctcggcgccatctgcggcgtcggcctcgtcaaggcgttccagagcgcctacttcgacaggtacggcggcggcgccaactcgctcgcctccggctactcccgcggcaccggcctcggcgccgagatcatcggcaccttcgtgctcgtctacaccgtcttctccgccaccgaccccaagcgcaacgcccgcgactcccacgtcccggttctggctcccctccccatcggcttcgccgtgttcatggtgcacctggccaccatccccgtcaccggcaccggcatcaaccctgccaggagcctgggcgccgccgtcatctacaacaaggacaagccctgggacgaccactggatcttctgggtgggccctctcgtgggcgctgccatcgcggccttctaccaccagtacatcctccgggctggcgccatcaaggccctcggctccttcaggagcaacgcgtgatgagcggggcttggctgtggagcaatggcgggcgacctacgggcggggggccgtgagcgaggagaatgccatcattcatcgatcgacttgggtgccggtggttggttcgggtcgccttttttttgtttcagcagctgctgcgttgcgcgcgtgcgtgagatttggtttggtttcgttcccctgcaatgtaatcatgtcgtgactctcaagggattattccgctctgctcttatggtctctgttttctatttaatgattgttattaccatgtagcagt

SEQ ID NO: 551 - DNA, 1462 bp, Zea mays
  Clone ID: 700082365_FLI
taaattcaggatgagcttgcggcagaggcaaaagcggctgaggtcggcaactccatcagcgggcgcgagatattggtgcggctcaatcagcagcttcccccaatctggaagcctttcctccgctccgcttcctacctcaaggaggccctcctcctcgcgctcaccgacggccaccgaggctccactcacctatcctcccctctcgacgtcgccctcaagctcggtgcatacaagtccttctccgacctctcgcctgtgctccagttcgccaatttcacgaccacccaggcgctcctcgatgagatcacctcaacaacttcatcttgtatccacattattgatttcgaccttggtgttggcggccagtggacttccttcttgcaggatcttgcacactgccgtggaactgggaacgccccctgccaatgttgaagctcacagtcttcgtctcaagtgcttcccacaatccccttgagctgcatcttactcgggagaacctcacgcaatttgttgtggaccttggcattccatttgagttcactaacatcaatcttgatgtgtttgatcccacagaactcattgctcctagcccaatgaggttgtggttgtttgcctccctgttggttgctctgcacgcacgccaccgctccctatgttgcttcagttggtgaaacagcttgcgcctaagattgttgtggctattgaccatggcagttaccggggtgacctcccattttcacaacacttcatgaattgcttccagtcttgtatgttccttctcgactcacttgatgctgctggcaccaacgtggatgctgccagtaggattgagaggtttctgatccaaccgagagtagaggatgcagtacttggccgatggaaagctgaaaaagcaatggcttggtgggcagtgtttacatcggccgggtttgctccggtaccgctcaacaacctcgcagaagcacaagctgactgcctgttgaagcgcgtgcaggtctgaggattccatgtggagaagtgtggaatgggtctagcactctactggcagagtagcgagctcgtgtctgtctcggtatggtggtcctgatcatacggactccatccatcaaccatcatgacacctacaccaatttgcaggcatgtttagccctggtaatgtgcattttgtcttgcaatttcaaacatcgcgaagaaaactattgtattggttgttccacgcctctgattgctttgctgatgttggagtactgcataggcctaatgaatttagccagtatggtgtgggaatctctacaatgtaacatgttggtctcttaactctgttcttgctctcttcttggttagccagaggacaatttggcaaatctgtggcaatgatgttgttattttactaggtaattcagatgaaaactgaaatggactgaaatggttgggtatattaactttcttggcttcatattcc

SEQ ID NO: 552 - DNA, 1374 bp, Zea mays
  Clone ID: 700082426_FLI
ggccgtcgccattctcgccgctgcttcggcggcggcgctcctcctcggggccgaggcccagcagcagtgccaccagacagagaggatctcaggaagcgccggcgacgtgctggaagacaaccccgtcgggaggctgaaggtgtacgtgtacgacctccccagcaagtacaacaagaagctgctgaagaaggaccccaggtgcctgaaccacatgttcgccgcggagatcttcatgcaccggttcctgctgtcgagcgccgtccggaccttcaaccccgaggaggcggactggttctacacgcccgtgtacaccacctgcgacctgaccccgtccggcctcccgctccccttcaagtccccccggatgatgcgcagcgccatcgagctcgtcgccaccaactggccgtactggaacaggtcggagggcgccgaccacttcttcgtcacgccacatgactttggcgcttgcttccattatcaggaagagaaagcgatcggacgcgggatccttcccttgctccagcgtgccacgctggtccagaccttcggacagaagaaccatgtctgcctcaaggacgggtccatcacaatcccgccgttcgcgcctccccagaagatgcaggctcaccttatccctgcggacacccctcgctccatcttcgtctacttccgcggtctgttctacgacaccagcaacgatcccgagggcggttactactcgagaggcgcacgcgcgtcggtctgggagaacttcaagaacaacccgctcttcgacatctcgacggaccacccggcgacgtactacgaggacatgcagcgctcggtgttctgcctgtgcccgctgggctgggcgccgtggagcccgaggctggtggaggcggtggtgttcggctgcatccccgtgatcgtcgccgacgacatcgtgctgcccttcgcggacgccatcccgtgggaggacatcggcgtgttcgtcgcggaggaggacgtccccaggctcgacaccatcctcacgtccatccccaccgacgtcgtcctgcggaagcagcgcctcctcgccaacccgtccatgaagcaggccatgctgttcccgcagcccgcccaggcgggagacgcgttccaccagatcctcaacggcctcgcgcgcaagctcccgcacggggacacagtcttcctcaagcccggggacgagagggtcctcaactggaccgctggaccgcccggcgacctcaagccttggtagcatcgtacgttcgtgcgccctataagttaccatggctgcatgcatatacagtgctgacaacaagccaagtgtacattttttttggtatcttctttattctttccttccttccttatatatagctgctataccat

SEQ ID NO: 553 - DNA, 1705 bp, Zea mays
  Clone ID: 700082519_FLI
gacggctcccttcctctccttgccacacttgcgctcctctccgagttgtcgtctccgtcgctgctggctgctgcgccactcccccagccccgagatctgctcaacaatggcgacgcggcgccacatcctcctcctcgccgctgccttcgtgtcccttctcgcgctcgaggctgtggagggcctcgaagaggggccccgcgggcgccggctgctggtcctgctggacgacctggccgtgcggtcgtcgcactcggccttcttcggctcgctccaggcgcgcgggttcgatctcgaattccgcctcgccgacgaccccaagctctcgctgcaccgctacggccagtacctctacgatggcctcgtgctgttcgccccctccaccccacgttttggtggatcagtggaccagaacgcagtccttgaatttattgatgctgggcttgatatgatcctggcggcagattcctctgcctctgatcttattcgtggcattgcgacagagtgtggggttgattttgatgaggatccagaggcaatggttattgaccacattaactatgccgctatggatgttgaaggcgatcacaccttgattgttggtgatgatcttattcagtcagatgtcatactggggtctaaaaagattgaggctcctgtattatttcgtggaattggacacacggctaatccatcaaacagtttggttctgaaagtcctatctgcctctccatcagcatactcagctaacccaaagactaagttatcgttgcctccatcgcttactgggtcagctatatcactggtttcggttatgcaggcaagaaataatgctcgggtgctgctatctggatcacttgatctttttagcaaccggttcctgaagtctggtgttcaaaaggctggtagcaaaacgagatacgagagagctggaaatgagcaatttgtgacagagacaagcaaatgggtcttccatgagagggggcaccttaaggctgttaatgttaagcaccacaaggttggggagaccaatgaaccaggcatgtaccgcattaacgatgacctggaatactctgttgagatctatgaatggtctggaacaagctggaagccatatgttgctgatgatgtgcaactccagtttttcatgatgagtccttatgttctgaaaactatgtcgaatgacaacaagggtttatactcaacatccttcaaagttcctgatgtctacggagttttccagttcaaagttgagtaccagaggctgggatatactggtttgtcttttacaaagcagattccagtgcgcccttacaggcataacgagtatgagaggttcataacatcagcgtacccatactacactgcctcattttcaacgatgtgtgctttcttcatattctcgcttgtgtacctgtaccacaaataaaggactcacgggagcgcacaagtttctggaggctgctgatgcgacctagatctgtggccaagtgttacccggtgcaattttatggaatcatatatttgtagtaggccaacttagctagaattagacgaccgtgaccgcaatcatgggaaatttactcgtgctagtaggatgttcgatctgccccacaaattttttttgttcggatccttctgatcagcacttgtgaaaacgtttacagtctgtagcattgaaaggatgacgaagcatgtagtgattttg

SEQ ID NO: 554 - DNA, 1050 bp, Zea mays
  Clone ID: 700082558_FLI
cccaaagctcgccccgctcccagctagggtttcctcttcccatccacagccgccggggcgccgccgacgaggacagcgccgccacgatgttggagttgcgtctggtgcaggggagcctcctcaagaaggtcttggaggcgatccgcgagctggtcacggacgccaacttcgactgctccgggaccgggttctcgctgcaggccatggactcgagccacgtcgcgctcgtcgcgctgctccttcgcgccgagggcttcgagcactaccgctgcgaccgcaacctctccatgggcatgaacctcaacaacatggccaagatgctccgctgcgctggcaacgaggacatcatcaccatcaaggccgacgacggctccgacaccgtcactttcatgttcgagtcgcccaagcaagataagatcgcggatttcgagatgaaactgatggacattgatagcgagcacctcggaatcccggattccgagtaccaggccatcgtccgcatgccttctgctgagtttatgaggatctgcaaagatcttagcagcatcggagacacagtcgtcatctcggtgactaaggagggcgtgaagttctccacatctggagaaattgggagtgcaaacattgtctgcaggcagaaccaaactattgacaagccagaagaggctaccattatagagatgcaggagccggtttccctgacctttgccctgcggtacatgaactccttcaccaaggcgtcttcactgtctgagcaagtcactatcagcctgtcgtccgagcttccagtggtggtcgagtacaagatcgctgagatgggttacattagattttacctggcccccaagatcgacgatgacgaggagatgaagccctgatggcctgtgacgacataatgctcgtgttgcctgctcttccttccagccgttgtttgcttagctactctttgcaagcgaagaagggatgtgatgtgtatctcttaggctagactgcttcagctagttttctgtgactgctacatgaatccatggattactgatttactgggct

SEQ ID NO: 555 - DNA, 870 bp, Zea mays
  Clone ID: 700082619_FLI
cacagaagcggcggcggcggagcaaacgcaggcgaaggcgagggtgtgagggaaggagcaccagccatggtgcacgtcaacttctaccgcaactatggtaagacgttcaagaaaccaaggcgtccttatgagaaggagcgtcttgatgctgaactgaagctggttggtgagtatgggctgaggtgcaagcgtgagctttggagggtccagtatgcactgagcaggatccgtaatgctgcaaggcacttgctcacccttgacgagaagaacccccgtcgtatctttgagggtgaggcacttcttcgccgcatgaaccgctatgggctgcttgctgagggtcagaacaagcttgattatgttcttgccctcaccgctgagaacttcctcgcaaggcggcttcaaacacttgtcttcaaggctggcatggccaagtccattcaccatgctcgtgtcttgatcaagcagcgtcacatcagggttggcaggcaaattgtcaacgtcccatcattcatggtgagggtggagtctgagaagcacattgacttttcactgtcaagcccattcggtggaggccccgcaggaagggtgaagagaaagaatcagaagaaggcaagcggtggcggggatgctggtgatgaggatgaggagtgaggatggacaagtagtgttacaccaatataataatattatctagttttcttgaacttgttcgaatgatgagtgcttagctgtgtgatctgacgcagagtcccctgtgctgactctgtgtcatggatggtccattttatcttgtggtattatcagcctttacataactgctatgtttggatatgttcaattctgttgcaattttatgtggttgtttttttg

SEQ ID NO: 556 - DNA, 719 bp, Zea mays
  Clone ID: 700082815_FLI
tttctaagctgtggagtcgtgatgagcaactaaagttcgacgcacttgagcaattggttcccgttatggatcaaaagacatattgggctgttgtgtcgaaaaattttgcttcaaagcccaggatagatttgataaagtactatctgaatgtgttcctgatgagaagagtgttgtaccagtgcagactcggtcttctggaaattgatagtgacgaagatgacgtggaggaagaagaggacgaagatcaacctgaaggatccagctctcttcagaggactcaagatgcccaagacttgaagaaggtgccatgattctgctgacaacaatctgacatgcttttttgcatgtgccttttgttcaagtttatgctgagacattgcatcaagtgatgcaccattgctccgagtgattgcaagtctaattttttgcagattttttggttgagggctgcattcactttggttcagccatcttttgtggacagaaaactaaaccgagtgttaaatcatccccgtgcgtctatctagggaagcaaatcaatacttcaacctcaccagatccaaatcattttctgttgtaaggggggagggggttaagcaggtcatcatctcatccgcatttgattggcttgtgctcttggcatgacaaaaccttcgagtctgactagtttggttacctatgttcagcggatacatcagaatcttccagatgttatttcc

SEQ ID NO: 557 - DNA, 2180 bp, Zea mays
  Clone ID: 700082825_FLI
gacactttgaagcggcaccgcgcgccgtgcggtactccgcgtcatccgcgcttcattttctaccctcccctccactaccgccgactccgtggcgacatcctgagtcggagcgccgtgctcgtccggattcgagacaccgagcacaacgcgagctctttctgtagtgttcggagctgaaaatgagtgaggtgaataatactcagctggaccttgagaaaggattttctcaagtgtctcatgataatgattcgagtagccctgtaacggtgcacaagatgaaagttgagacagaaggtggaagtgaaatcgaatcacccactccagaaaaacgtgaatctagaagcaaaggggtcgttgtgagttcactggcaaggaatttgcttgcagagaggtacaaagacagacttgcaaatcagctggtggaagatgagagtgagacagatgatgaagactataatgaaagtgtttcgcctagtggtagccgatctctttttttagaaagcattgaacttcttgagaaacacaaggatttgctgaatcttttcaatagaatggagagttctataagattgcttcacctacggaagaagatggctacatttaataatattgccacccaggtggagatactcacaaaaaggaagttattatacagccatttggcccagatgaagcatttgttcccagaagcaatccagataaagaggatactagtacatgacgagaagagcatatgcatgtatgctgatatggaaatcacacttgtaatggatgttgtggaatgcacaagccctgatcactctctatccatgacaatttgtgaggctttttactcaaagcttttgagatttttggatgctcatcataagggtgcagacattcctgaggcaatcctaccggaaccctttaactcaaggccaagggagaagttatatcttgaggcagtacataacggacatgctgctgagccacctctgcatggtgccgttgaggagggattctcaaatgcttcccacttcccacaatcttttcaaaaattcatgtcgaaaaaaatcattgctgatggaactgaaaagactcaattgctatccgacccagcagaactgagctctgtgagtgcttatggtacaaaagggtcaaacagaaaccctaaaaagcaagatgaacatgctccagttccagtgaactctgaaatttctgctactccaagccgccatttgatctcttgttgtcaagagagtacgccaaaacaacagacctcagagtcaccattgttgtctggaacacctgcaatgcagacaccaaaaaggccattgctggctccgcttgagaaacccaaggccacatgtggacacattagtgaaccacgttcagccagttctgcccgcagatcactaaatacatccttaacatatgaaggaggaagcccttcttattatgatggaatggaacatacggctacagctaaaaagtgcatgatctcagaagacttgtcaagttttaacaagtcatttgaggaagatagccatgtcttctttactgataaagacaaaatcaatgaagtggagtcagtggatagccaggaaaggatagcttctctacgtaccacatttgacattgtctatgatatttctcattctaccaagaatccacttatcacgaaacaggaacttttccacaatattcttgccaacaacttggagatagaagagattggggagatagaagagcagctgcatattttagaggatctggctcccgatttgatatcaaagaaggtgataaatggaggagaaatactttatagcatcgaacctataacagataagaattcagttcgggctaggcttgtagtagaacctgtatgagatagctgcaattggttcaaagctgaagaaatttgaagagattctctatatgcatgtaccactaatggaacccagattagctgatttattcaaccatggaagcatctgcatcgctcatgtagtcatgtctgattcgagttcaaatctgtgtttttattgacctgctcagtgccgaaatttctatggaacttaaattcgcaccagctgctctgtgagcttactgtggtaatcccatgaacttgtgtggagttcagatgcccatcggcatctgctctgtgacgtttaactcatgaaaagtgcacaagaatattt

SEQ ID NO: 558 - DNA, 1625 bp, Zea mays
  Clone ID: 700082852_FLI
ccgtcactgaatcctcagatcacggctagccgtaatcacgacactctgctgactcccggcgagtgtaacattttccttcagccatgggcaaggagaagactcacatcaacattgtggtcattggacatgtcgactctggcaagtcgaccaccactggccacctgatctacaagctcggcggtattgacaagcgtgtgattgagaggttcgagaaagaggccgcggagatgaacaagcggtcattcaagtatgcctgggtgcttgacaagctcaaggccgagcgtgagagaggtatcacaattgatattgctctgtggaagttcgagaccaccaagtactactgcactgtcattgatgcccctggacaccgtgacttcatcaagaatatgattactggcacttcccaagctgactgcgctgttcttatcattgactccaccactggtggttttgaggctggtatctccaaggatggacagacccgtgagcatgctctccttgctttcacgcttggagtgaagcagatgatttgctgttgcaacaagatggatgccaccacacccaagtactccaaggcccgttatgatgagattgtgaaggaagtctcttcctacctgaagaaggttggatacaaccctgacaagatccacttcgttcccatctctggtttcgaaggtgacaacatgattgagaggtccaccaaccttgactggtacaagggcccaaccctacttgaggctttggacttgatcaatgagccgaagaggccttcagacaagcccctgcgtctccccctacaggatgtgtacaagattggtggtattggaactgttcctgttgggcgtgttgagactggtatcatcaagcctggtatggttgttacctttggtcctagtggccttactactgaggtgaagtctgttgaaatgcaccatgaggctctccaggaggcccttcctggtgacaatgttggcttcaatgttaagaatgttgctgtgaaggatctgaagcgtgggtatgtggcctccaactctaaggatgaccctgccaaggaggctgctagcttcacatcccaggtcatcatcatgaaccaccctgggcagattggcaacggctatgccccagtgctggactgccacacctcgcacattgctgtcaagtttgcggagctcattaccaagattgataggcggtctggcaaggagcttgagaaggagcccaaatttctcaagaatggtgatgctggtatggtgaagatggttcccactaagcccatggtagtggagaccttttctgaatatcctcctcttggtcgctttgctgtccgtgacatgaggcaaacggtggctgtcggagtcatcaagagtgtggagaagaaggacccaactggagccaaggtgaccaaggctgccgcaaagaagaaatgatgtgtctggctggttctgtgtttgcttgagggatacctagtggaaacataaaatatctcgtcttgttcacgtcattgtctgaactatgctcgcaacgtttgcctggtcgatttagaactgttattttcgttaaaaccagagtgttatttaagacttaaccgaacatctggtgagccatatatggttactagttttgtt

SEQ ID NO: 559 - DNA, 1074 bp, Zea mays
  Clone ID: 700082933_FLI
ctcacccagccgccctacggcgagaccttctttggccgcgccacctgccgctgctccgacggccgcctcgtcgtcgacttcctggccgagaagttcgggctgccgctgctgaagccgtcgaagcagggcggctcagacttcaagcagggcgccaacatggcgatcattggcgcgaccaccatggactcgggcttcttccagtctctgggcatcgccgacaagatctggaacaacgggcccctcaacacccagatccagtggttccaggagctgatgccgtccatctgcggctcgacgcaggcctgcaagtcgtacctgtccaagtccctgttcgtgctgggcgagttcggcggcaacgactacaacgcgcagatcttcggcggctacaccccggagcaggcgagcgggcagagcgccaccatcgtggacgccatcggcaagggcgtggagcagctcatcagcctgggcgccatgtacgtggtggtcccgggcgtgctgcccgtggggtgcttcccgatctacctgacgctgtaccagacctccagcgccggcgactacgaccagtacggctgcctgaagcgcttcaacgcgctgtcggcgcagcacaactcgctgctgcaggccaaggtgtcgagcctgcagagcaagtaccccggcgcgcgggtcatgtacgccgacttctacagccacgtgtacgacatggtgaagagccccgccagctacgggttcagcaccaacctcagggcctgctgcggcgccggcggcggcaagtacaactaccagaacggcgcgcggtgcggcatgcccggcgcgtacgcgtgctccgacccggcgtcgtcgctcagctgggacggcatccacctgacggaggcggcgtataggaagatcgccgacggctgggtcagcggggcctactgccatccggccatctcggcctagaggctgctccgggaccgggggtcgggggctggttggtggttcgctggcccctcaagttaggggaggggaatcgaattaattgtaatttttttagctggaatcgaagcaggcaagaagacgatggaggtggtctgc

SEQ ID NO: 560 - DNA, 2190 bp, Zea mays
  Clone ID: 700082985_FLI
tcctcggtgtcgttacccccaccatggccatcgtgctgctggcccttctcctcttcccgtccgcctatgcccaaccatggtcagtttgcggcaacacgggcaactacacggcggccagcacctaccaggacaacctcagccagctcgcggcaagccttcccaagaaagcctcttcgaacacgagtcccctcttcgccacgggtaccgcgggtgcagtgccggacctggtgtacgctcttgcactctgccgtggggacatcaacgcctccgcctgcaaggactgcgtcaccataggcttcgaggacgcgcagcagctctgcgcgttcaacaaggaagccaccgtgtactacgatagctgcctcgtcagcttctccaacgaagacttcctgtcgactaccgtcaacggcaacgagaacgaggtcaccgtcctcatggacgcccagaacttcacggagagcgcggactacatcaggctcctcttgttcactctgctgaacgacacgtccgagtccgcgatcaacagcatcaggaggttcacgaccgcgcggatggacattagctccctgccgacgatttactgcgctgtgcagtgcacgcctgacctcaccgccgacgagtgcgccgcctgtttgcaagacttcccgcaggtgacgctccagtacctcgacgggcagcgaggaggtcgacttctcggggtgcggtgtaacatgaggtacgagatctacaaattttaccaaggggaccccatgcttcgtattatctctttggcttcggcagtgccaacgatcggtaaaacccctcccggaacaccagtcacggtgtatccgcagcctccacctgcagcgccaccagcgccgcagatgataaccacgcctatcgcagcacaagaagagacaggacgcaaaggtaaactgtggattattggtatagctattccactggtagcaattctgctatgttcaacctttacctttctgtggctgaggaggccaaagaaaggagtgctgagttcgcaggacagagctggtgctaataggattgaagaaaacgccttggtttggacaattgaacagaagagttcagagtttactctttttgacctttctgagttactggaggccacaaaatcctttgcagaagaaaatagacttggacagggaggtttcggccctgtgtacaaggggcaattatcagatggtcaggaaattgcagttaaaaggcttgcttcgcattcaggacagggtttcacggagttcaggaatgaagttgaacttatagctaagctacaacacacaaatttggttaggctcttgggatgctgcattcaagccgaggaaaaattttggtgtatgaatatttgccgaataaaagcctggacttctttatctttgatgaaagacaaagcagtttgcttaattggtataaacggcgtgccataattgaaggcgtagcgcaaggtcttctgtacctgcacaagcactctcggctgcgcgtggtacatagagaccttaaagctagtaacattctcttggaccaggatatggaccctaaaatttcagattttgggttggcaagaatctgtagctccaatgatgctgaaggaaacacaaagagggtagtcggaacatatggctacatgtctccggagtatgcctctgaaggcatctactcggtcaaatctgatgtgttcagctttggtgttctacttcttgagatccttagcgcgaaaaggaattcaggttttcaccaatatggagactttcttaaccttctcggatatacatggcacctgtgggagataggaagatggcttgatcttgtagaagcatccatttcgaaagagatgcatgaagcagaggctaggcggtacattaacatcgcactaatgtgcgtccaagaaaatgcggacgatcggcccaccatgtccgacgtagttgctgcgctaaatagtgagagtgtggttctacctgagccaaagcatccggcttacttcaacctcagagtatctaaatctgtggaatcagcagttgttgttgaggcgtgcagtctgaatgagatgaccatcacccaagatccccaaggcagataggtcttccacctgatttcgtttcgctggtcattattgtacatgataatgtggacgtgaatggctatccttgttccagctttgaaactaatcattatggtctt

SEQ ID NO: 561 - DNA, 1105 bp, Zea mays
  Clone ID: 700083024_FLI
gggtcgtctttggcggtcgagattcaccgactccagcagcagcatggtaggaggagcagcaggaggagaagtcatagggggcggcggctgcagcggcgaggtcgtggtggtggtcgtcggccgggccgagatcgacaccagggcaccgttccgatcggtcaaggaggccgtggccctcttcggcgagagggtcctcgccggggagctctccgctggacgacgaggaccactctcctccgtcaccgagcctacccgatcatcgattgcacagaatcgagtggcggcaacaagacccaagcaccacgccatgagtcctgccaccggcgcggtcaccacggctgcgctgcgcgccgtgccaccggtagtcgtcacagcgggtcagctggaggaggctaagcagaaactggagaaggagcgggaggagaagcagaagatggccgggtgcatccagaccctgcaagaggagctcagccacgccatggaggaacttaagaggctcaaagcgcgggacgacgaggaggccgccggaaccaaggtcatcgacctggagatcgacgagggcctctacttcaccgaggccgccgagaagcaaatggcgccgccgccacagggcgctgccggcggagcaggcgagctccagaagaagaggtacgtgacgttcgctgacccgccgacggtcgccaccaccgccgccgccgcgtgccgggcgccaccgttgccggacgtggtgatggaggtgcaccgcgcgccgccccaccagctccaccagccgcacccgcattactaccgggagccgcggttccagaggcagatgtcggccgggcacgaggccgccaaggcgatggcggatgagggaaggaagaagaagaagccgctcatcccgctcgtgggcgcgctcttcatgcggaggaagaaaagcagcaaaagtttccacgacgacgtggcgttttgatccatcaatacatgcatacgtatatgcatgcatccatggagtgatggaggtgcttttattttaaattttttaatatatatgtctggataatggaatgcgcacttctaatgcatggatctttgcaaaataaataaatatatccaatacacaaat

SEQ ID NO: 562 - DNA, 1348 bp, Zea mays
  Clone ID: 700083031_FLI
gccaaagaaggtgctgatcctcatgagcgacacgggcggcggtcaccgcgcgtctgccgaggccatcaaggctgccttcacccaggagttcggcgacgactaccaggtatttgtcactgatctgtggactgaccacactccatggccattcaatcaactgcctaggagctatagttttttggtgaaacatggacccttgtggaagatgacatactatggtactgcaccgcgtgtagtccatcagcctcattttgctgcaacatccacattcatagcaagagaagtggcaaaaggtctaatgaagtaccaaccagatgtaattatcagtgtacaccctttaatgcaacatgtccccctccgaattctaagatcgaaaggtctcttggataagatcccattcgcaactgttatcacggatctcagcacttgtcacccaacatggttccataagcttgtcactagatgttactgtccatcaactgaggtggaaaagagagcactgaaagctggactgaagcccgcacagattaaagtctatggcctccctgtccggccctcttttgtcaaacctgttcgaccgaaggatgagctgcgaagagagttaggcatggatgaagatctgcctgctgttctattaatgggtgggggtgaagggatgggtcctattgaggccactgctaaagcacttggtgattctctgtatgatgaaaacctaggggaacccactggtcaaatacttgtaatttgtgggcgtaataagaagctggtcaatcgattgcaatccataaattggaaagttccagttcaggtgaaaggctttgttacaaagatggaagaatgtatgggtgcttgtgattgtatcattacaaaggcaggacctggtacaattgcagaggcaatgatccgtggcttaccaattattctaaatgattatattgctggacaggaagctggcaatgtcccctacgttgttgaaaacggatgtgggaagttctcgaaatctccaaaacaaattgcgaagatagttgccgactggtttggcccaaggtcagacgaattcagggtaatgtcccagaatgccctcaagctagcacgacctgatgctgtgttcaaaatcgtccacgatctgcacgagctcgtcagggaaaaatgttttgtgccccaatatgcatgtgcaacataaaaggccgtatcctctattttgtgtttgcttaatttttttaaccccatgcggcactagctatagctgattgtgaggattgcgaatattgattgatttgaaacgtttccgtaagagaaatgaaaaatgtattgaatgctctagtttaattttccgaaatactttttc

SEQ ID NO: 563 - DNA, 1260 bp, Zea mays
  Clone ID: 700083041_FLI
ggaaacagttgccggattaagtcctgatgatgattcagagccttggactatactcgtgcataagaaaccacaagccagctggattccatacaaccctaggactatgaggcctccacctctaagcaaggatacacgggctctgaagattatgtcatggaatgtcaatggattgaaagcattgctcaaatcaagaggcttctctgtgcagcagttagcacagagggaggactttgatgtgctttgcctccaagaaacaaaaatgcaggagaaggatattgaagttattaaggacactttgcttgatggctacacaaatagtttctggacttgcagtgtgtcaaagcttggctattctggcactgcaataatttcaagagtcaaaccactgtcgatcaagtatgggcttggtatatcagaccatgatactgaagggagggttgtgactgtagagtttgatgacttctacctgttaactgcttatgtaccaaactctggtgatggtctaaaaagattgacttacagggtcacagagtgggatccatcccttggtaactacatgaaagaattagagaaatcgaagcctgtcatactaactggtgatcttaattgtgcgcatcaggagattgatatacatgaccctgctggaaatcgtagaagtgcaggcttcacaaacgaggaaagagaatcatttgggaccaattttttgtccaaagggtttgttgatacgtttcggaaacagcatcctaatgttgttgcctatagttactgggggtacaggcataatgcccggaagacaaacaaaggttggcgcctggattactttcttgtgtccgaatcaatcacagaaaaagtgcatgattcatatattcttccggacatctctgccagtgatcacagtccccttggtctcgtgctgaagctgtaggctgtatcacacaggctatgccaaacattcagtctgaagcctgtgccatatttctcagacagcgatgtttattcctgatggtttctggttcgtgcagatccctggcaggaacaacgacttttgtcagactattagtgaaacaaggctttgtaacgcactgagcagatttgactattagtggacaacttactgttagcaaagctgcacctttgtagtgtaaatatgcggccatatcttgtgctgcacttgtgcagctcaatatgagcagcgggggaagctcattacctggttatggaattatgatactgaccttaacctattgaggtctttaaact

SEQ ID NO: 564 - DNA, 2077 bp, Zea mays
  Clone ID: 700083042_FLI
ggcggagggagcgagggacgtgcccgtggggaactcggtgctggccatgtacgtcaagtgcggagagttgggccgtgcgcgcgccgcgttcgacatgatggggcagcgggacctgtgcacgtggaactcgatgatcttcgggtgctgccgctccaacgaatgggaagaggcacggaggctgctcgacgatatgaggcgccaaggtacagagcctgggcttgtcacatggaacacgctggtttcgagctacgcgaggtctggggaacttgatgtggccatggagatgctggagcagatggaggagtccggtgttgctccggacgtcgtcacctggactagccttgtgtctggttttgtccacggtgataggggtggcgaagcactttggtgtttcgcgcgcatgcgccttgctggagtcgaaccaaacggcatgacaattgcgagtgccatctcagcttgtgctagtttgcggttgctgagtcagggcatggagctccattgccacgcaattaaggttgggagtgtgaacaatgtgctctcggggaactccttggttgacatgtatgcaaaatgtggagaaatcattgcagctaagagagtatttgatgaaatacccgagaaggatatcttctcctggaactcgatggttgcagggtatgcacaggcgggctattgcggcaaagcatatgagcttttctgtgagatggagagccttggtgttcggcgcaatgtgatcacgtggaatataatgatctcgggatacataagaaatggggatgatgagagagcttttgaactatttcagatgatggaaagctgtggagtaaaaagggacacagcttcatggaatgcactcattgctggttcggtgcataatggtcattctgatagagccctgagaatattctggcagatgcaatcactcttggtgagaccagacttcattacaatattaagtatcattccagcttttgcgaacctagctggattttggaaagtacgggagatccacgcctgcatttatcacaacaatttagaaatggatggcaaaatagcaaatgcactcatcaatgcctattcaaaatctggtgaccttgctggtgcttgtgctgtttttgataggcactcatcaaggaacattatttcttggaattgtataattcttgcacacttgctgcatggttctccaagtgaagcactggatcgcttttgtgagatgaaacaagaaggcgtgcggccagatcatacaactttgactgccgtaatcaaggcctatggcctccagggaaaggtatctgaggcgaaacgaatatttcacaatatgacccacgattacaacattattccagatttagatcattacacagctatagttgatctccttggccgctcagggagtctacaagaagcgtacgagtttattggtaatatgccactcatacccaatttagcagtctgggaggcattgcttactgctgcaactattcatggaaatgcaaggctcgcaaacctgacagcaagagagttgtcatcgcttgatccgagtgaccctagaatccaaagactggtttttaattactggggtctaactggaaagtctgttgatgtgccactcatgacggtatacaacggaggaagagagttggaagatgttgatagttgttcggttgaaatcaagaacaatgtctatttgttctcaaccggtgataatttagcattagagagtacagttgctgaattgaagctgattatgattcagatccgaatgtcattgctgaacatctctaatgagactaacgctgaagaagagaaagaagaattatcaggaatacattgtgagaagctagcaattgcttttgcaatttcaaattcccctcctttcagaagcatacggataataaagaccttaaggatgtgtagccattgtcacatctttgccaagctagtttcagaaaaatacgagcggcagatactaatcaaggattcaaattgtttgcacaagtttgaggatggaaagtgctcttgtgaaggttattggtgaatacaactaatataagtgcaccaatggtttctgttc

SEQ ID NO: 565 - DNA, 1649 bp, Zea mays
  Clone ID: 700083111_FLI
ccaactcgccgtcgtcttctgcggttctgccgtctacgcctccaatttggcctctctcccttgcaagtttaagcttcatcttcagccatgggtaaggagaagtcccacatcaacattgtggtcattggccacgtcgactctggcaagtcgaccaccaccggccacctgatctacaagcttggaggcattgacaagcgtgtaatagagaggtttgagaaggaggctgctgagatgaacaagcggtccttcaagtatgcttgggtgctcgacaagctcaaggctgagcgtgagaggggtatcaccattgatattgctctgtggaagtttgagaccaccaagtattactgcaccgtcattgatgcccctggacaccgtgacttcatcaagaacatgatcactggtacctcccaggctgactgtgctgtccttatcattgactccaccactggtggttttgaggctggtatctccaaggatggccagacccgtgagcatgctctccttgcgttcactcttggagtgaaacagatgatttgctgctgcaacaagatggatgcaacgactcccaaatactccaaggcgcgttatgatgagattgtgaaggaagtctcatcctacctcaagaaagttgggtacaaccctgataagattgcctttgtccccatctctggttttgagggcgacaacatgattgagaggtccaccaaccttgactggtacaaaggcccgaccctgcttgaggctcttgaccagatcaccgagcccaagagaccttcggacaagcccctgcgtctccccctgcaggatgtgtacaagattggtggtattggaactgtaccggttggtcgtgtggagactggtgtcatcaagcctggtatggttgtcaccttcggtccaactggcctgactactgaggtgaagtctgttgagatgcaccacgaggctcttcaggaggcccttcctggtgacaatgttggcttcaacgtgaagaacgttgctgtgaaggatctcaagcgtggttttgtggcctcaaactccaaggatgaccctgccaaggaggctgccagcttcacgtcccaggtcatcatcatgaaccaccctgggcagataggcaatggctatgccccagtgctggactgccacacctcccacattgctgtcaagtttgctgaactcattaccaagatcgacaggcggtctggcaaggagcttgagaaggagcccaagttcctgaagaacggtgatgctggtatggtgaagatgattcccaccaagcccatggtggtggagacattctcgcagtatcctccccttggtaggtttgctgtccgcgacatgaggcagacagttgctgttggagtcatcaagagtgtggagaagaaggacccgaccggcgccaaggttaccaaggcagctgccaaaaagaaatgatgcaacctgtcgttaatcctgtatctgcttttgcaatacctgacttgtcactccatcccgaagttttgtatgcggttgttactgttattgtgtactgttaagctctgctgcggcgtgccctgttgtttgggtagcgtcaacgtcgagcgccacttgcgggtgtgcctttgtctgctatcagtagcggcaaaaattgaaagctctcgagacttatgtcc

SEQ ID NO: 566 - DNA, 734 bp, Zea mays
  Clone ID: 700083120_FLI
ggcgaggcagctgatcgaccgggcggtccgagcgtggcggcgcaagtacccgacgtccatggtggacgactgcgccgtcgtgtgcctgtacctgaaccggcgggcctcacctgctcccgtcgagagcagcagcggcctgctcccagttcccgacgacgtgaggccggccgcgcctttcacaggcagcagcttccgcagggctctgacgagcaacggccaggcggtgtcggaggaggggacgacggcggtgtggagagcgctggagggggtggcgcgggccaactccgtgatcaggctgccgcgcgtgggccgcgtgctgagctggcggaggcggtcgacctcgctggacgaagacgacggcggcgagcgggattgatggactcgggcggggagggcatcggaggtcgtcgttttcatggccggtacacgtagacgtagctagattcgttcgtgcatgggccgatggacgcgaggtgtaggatttgattggcctgtcgcattctggtgtggctgttgcaatggatgatgcgacatggacaggagtagcatttctttatccctggctgatgaatcagtgagtgcttttcatcctgctcgtctatgtactgctactgcacttgctgtaactgaaatttgtgggtgagattagcatctgacaacataagaagtgaagaacgtgactgcagtacatgactgatccaatagtgctaatttcatctaggtggttcggtttt

SEQ ID NO: 567 - DNA, 946 bp, Zea mays
  Clone ID: 700083123_FLI
cccaaccataccagcggcgccgcaggctgacgaggaggcggagtagagtggccggactacctcgacacctccactgcaaccatgggtatctcacgtgattcgatgcacaagcgccgggccaccggtggaaagcagaagacgtggcgcaagaagcgaaagtatgagcttggccgccagcctgctaacaccaaactgtctagcaataagacagtgaggagggtccgtgtccgtggaggcaacgtgaagtggagggctctccgattggatacaggtaactactcgtggggaagtgaggctcttacccgcaagacccgcatcctggatgtggtctataatgcatcaaacaatgagcttgtgaggactcagactcttgtgaagagcgccattgtacaagttgatgctgctccattcaagcagtggtacctcactcactatggagtggacatcggtaggaagaagaaggtgcctgttgctaagaaggatgcgactgagggacaagagggtgaggctatagctgaggaaacaaagaagagtaaccatgtgcagaggaagattgagaagcgacagcaggaccgtgcactcgacactcatattgaagagcaatttggcagtgggagattgttggcctgcatttctgcccgtcctgggcagtgtggccgagctgatggctacatccttgagggtaaagagctcgagttctacatgaagaagctccagaggaagaagggcaagggtgttgcatcttagagcattcttttagctagaactgcaaaatatcttctacttgggggattttgttgttagtctttatgcatatcatttgcggacctgatgaacacttcataagtgaatcaactctcgattctaagaattgataattttcacatgcggtggttgtaattgtgatatttaggtttgctatttattgaaacttcttgtctaaagc

SEQ ID NO: 568 - DNA, 667 bp, Zea mays
  Clone ID: 700083139_FLI
cagagagaggcaggaacaacaatggatgttgttgctgcacaaacaaaggctattgctgaaaaaatatcagattggacaaatattgtgttggcatatgaaccagtttgggctattggtaccggcaaagttgcaactcctgctcaggctcaggaggttcatgatggtctgagaaagtggctccactccaatgttagccctgcagttgctgaattgacaaggataatttatggagggtctgtaaatggagctaactgcaaagaacttgcagctcaaccagatgttgatggattccttgttggtggagcctcattgaagcctgaattcgtggacatcatcaagtctgccactgtcaagtcttcatctgcctagtgttttgactttcaatgcacctggatgcttgtcgtactgaatgctgttgatcttttaaagctattgccattttaccatctcgttttggtattctagctccagtgcatcgtttgtatatcatcatctcctgcgtatgtgcacagagtagtcatttacctgaatcatccttgtgtaccctttggaactgcataattgaactgcgctattctagatctgtcctctcatggttacttcaatttatgaggtgttgcatcatgagtcaactcttcaaatttgatggaataattccatttatcat

SEQ ID NO: 569 - DNA, 897 bp, Zea mays
  Clone ID: 700083150_FLI
ctcgtttcgccgcctccgccgacaccgactgcctacctcagctgccgtcgccatgggcagaaggcctgctagatgctatcgccagatcaagaacaagccgtaccctaagtccaggtactgccgtggtgtccctgaccccaagatcaggatctacgatgtcgggatgaagaggaagggtgttgatgagttcccctactgtgtgcaccttgtctcttgggagaaggagaatgtctccagtgaggcgctcgaggctgcccgcattgcctgcaacaagtacatgaccaagtctgcaggaaaggatgccttccaccttagggtccgggttcacccgttccatgtcctccgtatcaacaagatgctttcctgtgccggggctgataggctccagactggaatgaggggtgcctttggcaagcctcagggcacctgtgctagggtggacattggtcaggtcctcctttccgtgcgatgcaaggacaacaatgctgcccatgccagcgaagctctgcgtcgcgctaagttcaagttccctggccgccaaaagatcattgagagcagaaagtggggcttcaccaagttcagccgcgctgactacctgaagtacaagagcgagggcagaattgttcctgatggtgtcaacgcaaagctgctcggcaaccacggcagacttgagaagcgtgctcctgggaaggctttcctcgatgccgttgcttaagtgcggatgcgaatcctgacgttttgctttagcgtatcttactttgcttcgtggaacatgaatttcaagtgttttgagggtattacagtgccttatgtgaacttgcctatcttgtgctgaacatcggaatgtatcctccgagtatgtttaatcgcattaattttattggaaatgatggatgg

SEQ ID NO: 570 - DNA, 997 bp, Zea mays
  Clone ID: 700083166_FLI
acaagctggaatgaaatctaatgctgaaatagttgatttgacaaaggcttcaatcttgcctgagaagcttgaagaatcttttattgagtgcagtgaagaggataaggatgcctatctgtattatatattgagtgttcatggtcaaggtcgcacaataatattttgtacatcaatcgccgcattacgtcacatttcttccatactgcgcattcttggaattaatgtattgacaaaccatgctcaaatgcaacaaagagctcgcatgaaggctgtggatcgcttccgtgaaagtgaaaattccattttggtcgcaactgatggttttgcaaggggtatggattttgatgatgtgcgaacagttatccattatcagttgccacattcaactgatgtctatatccacagaagtggaaggacagcacgcaagtcattggctggctgcagcattgcgttaatctctcctactgacaagtccaggttttattctctttgcaaatctttgtcaaaggagaatctccagcagtttcctgtagatcatacttacatgtctggagtgatgaacagactctcacttgctcggcagattgacaagattgcccgtaaaacttcacaggaaaatgctaacaaatcctggcttcaaaggaatgctgaatctatgggattgattttggatactagtgacagtgaagaagaccatgtgcagggacacaagaaacgaaaggctacttctgcacatctccaaaagcttcaacaggagttgagtgatctcttgcaatgcccattgcagcctaagactttctctcgccgctatttggctggggctggtgtctcacccttacttcagaagcaactagaagagttggccaagagaaatgcaagcaacaatagcagcaagagtaagaataaaggatctgggtttgttgttattggtcaggatcgtgtcgagcccttgcaagcacttcaaaattctgggcaagaggtctgtgtgaacgtagac

SEQ ID NO: 571 - DNA, 1611 bp, Zea mays
  Clone ID: 700083171_FLI
ctcttggaaataagatcccagaattcaatgaattagttcaccagaacagatggcgcgaagcattggatcgactacttgagacaaacaacttccctgaattcactggacgagtttgccctgctccttgtgaggggtcatgtgttcttgggattattgagaatccggtgtctatcaaaagtatagaatgtgcaatcatagacaaaggttttgaagagggatggatgattccacgacctccacttcaaagaacaggaaggaaggtggccattgttggcagtggaccatctggtttggctgctgcagatcaactaaataaaatgggccacttcgtaactgtgttcgaacgtgcagatcgaattggaggtttaatgatgtatggtgtgccaaacatgaagacagacaagattggcgttgtccagcgccgtgttaatttaatggctgaagagggtgtcacatttgtggtgaatgccaatgttggtagtgatcctttgtactcgattgaacgtctacgttctgaaaatgatgcggttattttggcttgtggagcaacaaaaccgagagatctcaccatccctggacgcgagctatctggagttcattttgcaatggaatttctccatgcaaatacgaaaagtttactcgacagcaacctggaggatggtaaatatatctccgcccgtgggaaaaaggtggtggttattggtggaggtgatacaggcacagattgcattggcacatctattaggcatggttgcaccagccttgtaaatcttgaactcctgtcaaaaccaccaagcactagagctgctgacaacccatggccccagtggccaagaattttccgtgttgactatgggcatcaagaagctgctaccaagtttgggaaggatccaagaacttacgaagtcttgacaaagcgttttattggcgatggaaatggcaaggtgaaggcccttgaggtagtgcgtgtgaagtgggagaaagtagatggaagatttcaactcaaggagatggaaggatcagaagagattattgaggctgatctcgtcctcctagctatgggattcttgggtcctgaagcgacaatagctgagaaattgggtttggagaaggacaacagatcaaacttcaaagcgcagtttggagacttcgctaccagtgtcgatggtgtgtttgccgccggggactgcagacgtggacaatcactggtggtttgggccatcacggagggacggcaggctgctgcagcggtagacaagtacttgtcaaggtatgatcagaatgctgctgctacaggcgacagcactccctccgggacagggctcgttcagccggttgcggcatagtagcataaactggagcaagttttacgtttgtcagtgtatcctgtgggttccacacagcaaacaccgttcttgtagttgtctaaaagaaacagagaaatccgggctcattaaggaatgaaagcccttctatattttttttgacgatagataaacagttgaaagttttggtggctattgtctctttttttcttctccatttagtatgttttgcatgtctgctgcatgtggttttgtagtccaaataatgtacagtttccccttaaat

SEQ ID NO: 572 - DNA, 1857 bp, Zea mays
  Clone ID: 700083193_FLI
gtttccaagcaccacgccacccgtacacggtttccagcagagcattccggaaggagggggcgcgatgtggcacgaggcgcggcggtcggagcggaaggtccacgacctcatggacgcggcccgccgccgggcgcagcgccgagccgtctacctcgcccgccgccgcggcgacccgcagcaggcgctccaggtctccggcacgcggtgccgcgttcaccgcgacgacgccctgtaccaggccaccgaggaccagcagggattgatacaatggaatggaaagcaagatgttttgattgacagatttgatggccgtgcattgcttgattttatccgagactcgagctctcgcccttttcgagtccaagggaaatctgaagaagaggaagagttagaggaatttgttaattttgaacgttaccgggatttgattaagcatcgtcgcagaggattttctgatgaggccggtttgcagcatgttgtgcaagagttggaggcaaaagctcttcttccttttagctttgacaaaccacaatcctcacagcctcctgctagcaaaggcgcatattcacaggttggatactcatacaagggagacggaaatgaggaatctgaagacctagacagtgatgacgacgacgaagaggaagaagttgatgatgatgacaaggacttcagtagtgatgatagcagtgatgaacgaatggaaagtatagcgaaagaatttgggataaaaagatataactggcttgtttacatggataaaaaaaacaaagaacaggagaagaggcagaaagaaattgttaaaggcgacccatctataaaaaaaatgagccgtagagaaagaaggaaggcttctcagattgagcgggaaaaggagcgggaggcagcacgttctgttggaagggtatcttatcgtgatccttatagggaacaaaggagaagcccatcatatgaagcatattcaaggggcagaagatcaagatcgagatcaagatctcgttcaccatcccattctaggcgtcatggccgtgggatacatgctgaaagcaattattggagcaagcaaaaggctcctagggttgaatatattactgaatttggaggttccgatgataccagtgaaccaaaagtttcagggatctctccgccttcgtctccaatacgaattgacatacctaaccggttgtctggtggtcaaattcttgaggcacttcacagtgatcctgcctcttctttgtctgtggaacaggaaagaactgcaaaacttttgaaaccttcccccagtacatcatcagcattagctaaactaagcaaggttgcttctgggggaactggtaaaactccccagactgaaaagaaagaaacaccacaagaaagacttaagaggataatgagcaaacagcttaacaagcaaattaaaaaggacacggctgctgagattgccaagaaacgagaacaggaacgacaaaggcaggaaaaacttgctgaagttggtcgatacaagcgtcgtagccgcagtagaagtcttagccgttccccaccaagaaggcggcgatatagcagaagccgtagtaggagcagaagcccaagaaggtaccgatcccgctcgctctccagttcccggtcgccctctcgctctccaaggtaccgaagcaggtcaagacactgaaaatatccaggcagccactaacaaagtgccttgccatgttgtagttaatttattttatagactttttcattcctgcagcgatgtgtactcatgagaagcctccgtttttgttttcttagtcctattatcgacagtgtgtgttccttgtgtttcagaaggtttattctctgttcctcatggcttgcccc

SEQ ID NO: 573 - DNA, 1058 bp, Zea mays
  Clone ID: 700083219_FLI
ggatgttgaggcgtttattgctgcatgcagtactgctaatggagacgtcacggtagtagagcaagcagagagcataatacaggcaatcaagtcagtcagagcccaagatgctgagttcaggtacgagccaccggccgcatcagaagacatattttccatttttgaagagctgcgtccaagtgaggagcctgtcatcaaggagatcgagccatgttacaagaatagctctgccaaatgtgaaccagaaattcaagaggttagcccaatgaccgatatattcctcgaaaagaaagccaaggcaaactcgaacaaaagccctaaagatgaaagcgacactgaagatggcagcagctgggagacaataagccacgaagatgtccagggttcaagcggttcacctgatggaagcgagccttcggtcagcaacaaggtctgcgacggaagcattccttggaagagcagaaatggattcgagcgtatggagagtgagaagctgaaggatgagtcagctgatgcctgcctgacaaacatgaaccagcccaagaagaaagaatcggccatttcaaagctctggaagtcgtcccgcccaaagaacagcgagatatgcaagaaagacgcagttgaaacggtaaatgcaagatcgtcaaacgtgcggctctcagtcgggacctattccactgttgaaagtggcatccaagaaatagggctcagtccaccgtgtgttgagcagtggagctcaccagactcgatgaacgtccaattcaaccggggattcaagggctgtatagagtacccgcggatgtcccagaagcacagcttgaaggcgaagctcatggaggcacggttggagagccataaggtccagctccgccaggtgctcaagcagaagatctagtgcaggccagaaccagaaggcgaaacattgtaaacctagcattcaatccaaggaataatgtaaaggagtacctagatgcttcgtttttcatgttttagagtaacctgtattgcatgtacaacaaggactagaaaaaaaaaggacagggctggtctttgaggtc

SEQ ID NO: 574 - DNA, 1444 bp, Zea mays
  Clone ID: 700083225_FLI
gaaacacacagaagcgaggagcactacttgttggttggattctcttcagtctagcagctagtccagttaagtttcagacacacatggggagcattggcagaggcacggccaactgcgccaccgtgccgcagccgccgccgtcgacagggaagctcatcacgatcctgagcatcgatggcggcggcatccgcggccttatcccggcgaccatcattgcgtacctcgaggccaagctccaggagctggacggcccggacgctcggatcgccgactacttcgacgtgattgccgggacgagcaccggcgccctgctcgcgtcgatgctggcggcgccggacgagaacaaccggccgctgttcgccgccaaggacctcaccacgttctacctcgagaacggcccaaagatcttcccacagaaaaaggctgggttgctgacgccgctgaggaacctgctgggcctggtgcggggccccaagtacgacggcgtgttcctgcacgacaagatcaagagcctgacgcacgacgtcagggtggcggacacggtgaccaacgtcatcgtgccggcgttcgacgtcaagtccctgcagcccatcatcttctcgacgtacgaggccaagaccgacaccctcaagaacgcgcacctctccgacatctgcatcagcacgtcggcggcgcccacctacttcccggcgcacttcttcaagaccgaggccaccgacggccggcccccccgcgagtaccacctcgtggacggcggcgtcgcggccaacaaccccactatggtcgccatgtccatgctcaccaaggaggtgcaccgccgcaaccccaacttcaacgccggcagccccaccgagtacaccaactacctcatcatctccgtcggcaccgggtcggccaagcaggcggagaagtacaccgcggagcagtgcgcgaagtggggcctcatccagtggctctacaacggcggcttcacgccgatcatcgacatcttctcgcatgccagttccgacatggttgacatccatgcgtcgatcctctttcaggccctgcactgcgagaagaagtaccttcgcatccaggatgatactttgactgggaacgcatcgtccgtggacatcgccaccaaggagaacatggagtctctgatatcgatcggccaggagctgctcaacaagccagtggcgagagtgaacatcgacacagggctgtacgagtcctgcgagggtgagggcacaaatgcacagtcgctagctgacttcgccaagcagctctctgacgagcgcaagctacgcaagagcaatctcaactccaactaataaatacctctcggtcacagcatgtgctctttctgcagattcaccgtttcttatttttaatttcaatttcaattcagtgtatgtgtgtgtgtgactgtgtgtgtaccaataaacatttaagttcactc

SEQ ID NO: 575 - DNA, 1851 bp, Zea mays
  Clone ID: 700083227_FLI
acgatttagaggctgttgtttgtgtttgtgagcttgcagcggagtggcgccagacttttcactccgatgtggtggttgatctgatttgctaccgccgtttcgggcataacgaaattgatgaaccttccttcacacagccaaaaatgtatcaggtcattaagaaccatcccagctcattgaagctttatgagcagaaactgctaggaacgggtgaagtcatgaaagaagatgtccagaggatccatgacaaggtgaaccgaatcttgaacgaagagtttgctaagagcaaagactacgttcccaacaagagggattggctctcagcttactggactggctttaagtcaccagagcaaatatcacgtgttcgcaacactggggtgaagcctgaaatactgaaacgtgtaggtcaggcaattactacactgcctgaaaacttcaaaccacacagagcagtgaagaagatttttgagctgcgtgcagctatgatagagagtggtcaaggaattgattgggctgttgccgaagccctggcctttgcaacacttatagtggaaggcaatcatgttaggctaagtggacaggatgtggaaagaggaactttcagccatcggcatgcagttctgcatgatcaggaaactggagcaaagtactgcccacttgaccatgttgcaatgaatcaaaatgaggagctatttactgttagcaacagttcactttcagagtttgctgttcttgggtttgaattgggttactccatggagaaccctaattcattggtactttgggaagcacaatttggcgattttgccaatggtgcacaagtgatgtttgaccaatttttgagcagcggcgaggcaaaatggttgcggcaaaccggccttgttgttctgttgcctcatggttatgatggccaaggtcctgagcattctagtgcccgcttggagcgcttccttcagatgagtgatgataatccttttgtcatacctgagatggaaccaacacttcgcaagcagatacaagagtgtaactggcaagttgtgaatgtgacaactcctgcaaattattttcatctgttgcgtcgacagatacatagggagttccggaagccgctgattgtaacagctcctaagaacctgcttaggcacaaggattgcaagtcaaatctttcagagtttgatgatgttgaaggccatctaggattcgataagcagggaacacgtttcaagcgactgataaaggaccgtaatgatcacaagcaagtcgaggagggtgtcaaccgtcttatcttatgttctgggaaagtttactatgaacttgacgaagagcgtaagaagtcggagcgtggtgatgttgcaatttgcagagttgagcaactttgcccgttcccctatgaccttatccaaagagagctgaagagatacccaaatgcggagattgtgtggtgccaggaggagcccatgaacatgggtgcatacagctatatctctcctcgtctgtttactgcgatgaaggctcttgggcggggttcgtttgaagacatcaagtatgttggcagagcaccttcagctgctacagcaacaggcttcctgtcggttcatgcgcaggagcagtcagagctagtgaagaaggcactgcaggcagagccgatcaaattcctctgatgtatgcaccgtatctacagcaacaacctgcctgcatggttgcaggaacatgccagggattttcttttccccggccagttttgaggcttttcagcgttggaactaatgacgacttctttccttgaagacatcatattttttttttctcgaacgcgcaggaggactgcacgtcattatattaagaaag

SEQ ID NO: 576 - DNA, 1925 bp, Zea mays
  Clone ID: 700083238_FLI
catattgaagttccgcaaaaagaattggcagtttgacatcattggcggttttatatacttcattttggtgttttcaatgttcccacaggttagttacagattctcaaaatggacattttattttaaagtttatcctttgtcgcacgtttaaaatagtagtaactgtggaggttagttactaataataatcttgagcctcagttttcctcttttcttattttttttctgaaatcaatacccggaagcattggaagactctgactctctgccacctttagcaaatttattcccagatttgtaaactaagtattatttgcacctttcttgcttctgttggctgacctctgttatggatttatttttatttgcttattgctgtcttttctttttgaagagtgttactaattactgttaatcttgaagtatgttcgttgaccaaaagttagccgcctggtactggacatgtcatattctttataccagcctcagagaatactttgcatcacataaattatccgttaccctttatggtctcttgatttgtattcatgttgctactatcacttggaagatcaagttgaccaacatgtcgatttgtattcatattcttgatttatttctatttgttccagtgtaatcttgttcgtatcttaaatgaagaaacttggtctgggcgtctgaaaagcttctcaggcacaatatggagtgctttgctttatatttttgagcactcttatgtctcttcagtaggaagtcttactttattgacggcgtcatattcattcgtaccatccaaactatcaaggaggagaagagctattataggcggcctccatgttttggcccatttaactgcagcactacttttaatgttgctgctggagttgggcattgaaatttgtattcgtaaccatttattggcaacttcaggttatcacactctgtatgaatggtatcgatccatggaaagtgagcattttccagatcctactggtcttcgtgctcgtttggagcaatggactctgggactgtatccagcatgtataaaatatcttatggcagcctttgacgtccctgaggtcatggctgtgacaagaataaatatatgcaagaacggaatgatgtctctttcgcggagtgttctgatcatgtactacacttctgtgtttatctatttctggattttctcgactccagttgtttctctcatatttggtagttacctatacatctgcgtcaattggttccacatacactttgatgaagccttctcgtcgctgcgcatcgcaaactacaaatccttcacaaggttccatgttaagaaggatggtgatctagaaatatttactcttgcagttgacaaggtaacagaccagccttcattccgttgctcccatctgctcataactctgccgcctttgctctgctgtgaataaacaggtcccaaaggactggaagttggatccgaggtgggaatcagagggacgagggcctcatcagctcagccatgaccggaagcatccaagcaagtggaggtcagcctcatcaactgaccctgtgagatctgtacgggttgttgatcatttcaccatcgaaagaacaagaaccccagatatggagccctcttcttgattgtgcagcccttactattacaaggagttgctactgctgctagaaaaattaacaataactagcttcaacacacagtattgtttttgtttccacatccagccaacttaggtggaccgaggtgatctgcccttgtcggcgtccccgctttactgacctcacctgcagcattgtaatctgtatagaaagaaaattcacctgctgcctattgcttgtattcaatcaaaggaactctaaaaaaagagtgttacagaagaatgttttgagaaagcaaagggatgcatcgattcatcatc

SEQ ID NO: 577 - DNA, 1645 bp, Zea mays
  Clone ID: 700083239_FLI
gctaacaaaagttaagatgccactctcggatttggtgagtgcagctctggcgcttgatcaatctaccttggatgttgatcaagtggagaatctcataaagttctgtcctacaaaagaagaaatggaacttctcaagaattacaccggagacaaacaaaatcttgggaaatgtgaacagttcttcttagaattgatgaaagtgcctagaatggagtcaaaactgcgagtattctccttcaagatccagtttggttcacaagttgctgatcttagaagaagcttgaatatcatcgactcttcatgtaatgagatccgaacttctctcaagttgaaagaaataatgaagaaaatccttctccttgggaataccctgaaccagggaactgctagaggtgctgcagttggcttccggttggacagtcttctaaaacttacagatacccgggcaacaaataataagatgacactaatgcactacctctgcaaggtacttgctgcaagatctccacagcttttaaacttctatgtggatcttgttagcttagatgctgcatcaaagatacaactaaaaatgttggctgaggaaatgcaagcagttagtaaagggctggaaaaagttcaccttgagtatgatgcttcagaaagggatggtccagtatctgaaatttttcgtgagaaactgaaagagttcaccgacaatgctggagctgatgtgcagtcgttatcttcattgttttctgaagtgggtaaaaaggctgatgcgttgattaagtattttggtgaggatcctgttcgctgcccctttgaacaagtaatctctaccctcttaacatttgtaacaacatttcgaaaagcacatgaggagaacctgaagcaagctgagcttgagaagaaaaaagctgaaaaagaggcagaagcagagaaggccaagaacgcacaattaactggcaaaaatgactctaaaccatcaaatccaagacggcaagctaaacaaaccttagagaggacaaggtctgcaagcagacgaggaagagatgttgggtgataacccgaatggtcagtaattttctgtgcttctgatctgctcgcgaggctaatggacgaccgctgggcaagagaagtttcatggacggacgctggcatccgtcgggtgcagcgcgatcgcatcaaagaaaactctacaggccaccccttaacggtctcactggagaatgccgacgtctgtttttatccatgtcggccatcagggtccagtgctaacttctgactgctgtaaagaattgctaacactgacgctaactccattctttcttttcttttttcatgttacttttccattctttctaacaacggtggccaagtacagccatggcttcgaaaaactaccgcctggtgcttaggtggaaaattgtaaaaaataggcatctgggtgaaaaaaaggtatggagataatctaggtggcaaagagtatcaggagtaaatatgtgatgcaaactcagccagtagtttagctgtaaagttttgtagtgagtgtgtattgccgccactttgtattctatgatcatgaagcagtgaaggcggcgttttctttacgatacgtagtcagatagccttgtcggctacgtgtcgcctgtgtacgtgtgat

SEQ ID NO: 578 - DNA, 678 bp, Zea mays
  Clone ID: 700083252_FLI
ggataaaatagaaccaaaggttcgatcatctgatacaacaatgcagtataaggctgtagagtctagaggcaatgctgggatggagcctgttggcagtgggacaccttcaggttctgttaatgatatggaaaatgaggaatcaggttcaaaaggtaaaaggccattaggacgggactccacgaaagcatcaaggaagaaggcaatgtctagttcctcccagtctactaactacctttcaagaattcatgacattcaaatagcaagactgaagcaaagtgaagaaaaatcagagctgaaacaacagaatattgagttcatgaaggaagttgaactcaaaaagttggagtttcaatccaagaaaatagaaatgcagcaaactaaattgatgatggaagacaggatccgaaaggacgaagagctgaataaaatgtatgctatggatatggatgctttaccagaagagttgagagctgtatacatcgcgaggagaaaaggtttaatcgactatttcatcaagaatccagtgtgatgagtattattgtatttcataatatgttgcgaaccaattttcggcgtatcgtggtcgggtgtgttcggccatctgtgatttcagtttgttgaacatttgcttcattgtttgacaagacttgcttcgtattgtgaacattgtttattttc

SEQ ID NO: 579 - DNA, 604 bp, Zea mays
  Clone ID: 700083466_FLI
acaatgaaaacttcatacggccaggccaggatttatgctataatctctaagcatgtgaaggcatgaggagctcaggtgcgaaacaaggcgagaacagcattgggacatccgggacatggatcggtgatgattgattgtgatgttgactttacatgccatatggcgtcatcgcaactcatcaactcatcgcgtcgatgtacgacgatatcagaaaatggatggatgaacactgcttgaaatgagatcatgtctacttgggggcattctgacaggagttaagaatccagcatttggggaaatgctttggtggcatgcatgtaggtagcacactagcatgcccatgatctgaaaacttggggcgcgcctctctgaccacgatacagctttcttcggtggaaattttggcaccagaatttagaatttagaatttagaatataagccgttcattcggtagtgtaggtcctgtggtcacccctatgtaatgtaatgcccataccaaaatgaatgttggctgtaaattgttctgtgttgaatagattgttagggtagggcagtggccagtggccttcacacctcttctgaatgaaattgcttcttttgttc

SEQ ID NO: 580 - DNA, 1199 bp, Zea mays
  Clone ID: 700083474_FLI
ggtgatctgaaacccgagaacttcttgcttgcgaccaaggaggagaatgcaatgctcaaggccactgattttgggctttctgtcttcattgaagaaggaaagatgtacagggacattgttggaagtgcttactatgttgctcctgaagtccttagacggagctatggaaaagagatagatgtttggagtgcgggtgttattttgtacattcttctcagtggcgtgcctccattttgggctgaaactgaaaaggggatatttgatgctattctgcatgaggagattgactttgaaagtcaaccttggccatcaatttctgagagtgctaaagacttggtgagaaagatgttgacacgagatccaaagaaaagactgacttcagcccaagttcttcaacatcagtggctcagagaaggtggggaggcatctgataagcctatcgacagtgctgttctttctagaatgaagcaattcagagcaatgaataagctgaaaaagatggccctaaaggttattgcttcaaaccttaacgaggaagagatcaaggggctaaagcaaatgttcatgaacatggacacagacaatagtggcacaatcacatacgaagaactcaaagcaggattagccaaacttggatcaaagctgtcagaagctgaagtaaagcagttgatggaggctgctgatgttgatgggaatggatctattgactatgttgagttcatcactgccacaatgcatagacacaagctcgaaagggacgagcatttgttcaaggcattccagtactttgacaaagataacagcggcttcatcacaagggatgaactggaatctgctttgattgagcatgagatgggcgacacgagtacaataaaggagatcatatcagaagttgacacagataatgatgggaggattaactatgaggagttttgtgcaatgatgagaggagggatgcagcagccaatgaggctcaagtagcctgttcccttaatagaaacggtgtaccactagttactgttcacttttttttcttcatgtttggtacttggtagttggataaagcttacaatgggtgttgcttttgtattgttgagagatgattgtctatacctttttttcccttttgctcgtgtttgttgcattgtagtatcttgaacgtcccttcctttttttaagtttgtttatgcaagtacatc

SEQ ID NO: 581 - DNA, 987 bp, Zea mays
  Clone ID: 700083487_FLI
aaacccaatccacagcacgagcgtgtcaaacgttatccggttcaaagccgagcggcgtctcctctctccagcggctccagccaatccggcaatcccgctcccccagctcgctgctcgcccgctctcctccgccctccgccatggcggccttcccctccgcctccccgtcgccggcgatctccgcctcgacctggagcatggcttccctccgtacgtccctccccgcactccgcccctcccccgcgggaaggctccgttcgtcgttctcgcccgcggcggcggccacggctgcatcggtcggctgcctcgggtccttctccggcctcgcgcccgtctcgaatctcctctccctcggcgctgagaactcaagctttgagcatcggttgtttggttgatgcccgtggaaggatagttgcgatgcgacatgggagacgcgttcctaaacttaacaggcctccggatcaaaggaaagcgctgttgcgtgggcttaccacacagctgctgaagcatgggaggataaagactacaaagccaagggcaaaggcaatgaggaagtatgtcgagaagatgatcacgttggcaaaggatggatctcttcacaagaggagacaggctctggcatttatttatgagaagcatatcgtccatgccttgtttgctgaggttgcagacaggtatggagaccgagaaggtggctacacaaggatcatcccgacgttcccgaggcggggagataatgcacctatggcgtacattgagcttgtttaggattttccatcggttgctgtggtttcattggttggtgccatgcaggctgagtggtcatgtttgcgcattgccgttcggagatctgtttttttttccctttccttatcaagttgttctgtaccaaagtgtagatcacgcgtgaaatttggaactcgtcaaacttcgttctgtaattgacaaggcgccattatataatctggaaaataagttcgtggcctc

SEQ ID NO: 582 - DNA, 832 bp, Zea mays
  Clone ID: 700083510_FLI
cgcaagtgtcgggaaggctaagaagccaaggaagagcaattctcaagcttctccatcgaagaggccatcaggtgtactccgaaaaaccaagaaagcaaccagcgactggaagaatgcggggactactggtggagcaggagattcagcccgcgcttctgtgatgaagaacgagtggaaggaccaggatctcggcctgaaccaggtggtgttcgacgagtcaaccatgcccgcgcctgcctgctcatgcacaggggagctccaccaatgctacaaatggggcagtggtgggtggcagtcgtcttgctgcaccatgaacatgtccatgcacccgctcccggtgatgcccaacaggcgccacgctcgcatggggggaaggaagatgagcgggggcgcgttcgcgaagctgctcagccggctggcagcagaaggtcatgacctctcgactccggtggacctcaaggaccactgggccaagcatggcacgaaccggtacatcaccatccggtagccagccggcggccacgttgaagcctgagcctggaaggggggagagatcacacaaacgtcgccttgtcctgcatcccctaaaccctctcttttgctatgctctgtaatgccattggtttgtagtggatggagcacttctgcgttcatgaaaccacagcgttgtaggttctcccctccattgtgctggactagtaaactgtgctcgcgagctggagtgctgaagtccgcgagaatccatgtgtaattgtagctcagaagtattcgtcgcgtgatagctgtacagtttgacatctggattcgagtcgagtggtggtagttggaggtc

SEQ ID NO: 583 - DNA, 2221 bp, Zea mays
  Clone ID: 700083601_FLI
cggagccttaaatatgcttcttcccctacctcaatctgcctacaaatccatagtgacactattattatctcaccttcctacttgagttacctggcagctcgggcagcgcaggggaaccaattgcagagagcaagcatatccaacgcaattaaatgagtgtgctaaactcgctggggatcctactcctcctcacggcgccggcgtttgcggcggcactgtcggcggatgggctttcgttactggccttcaagtcggcggtgaccgacgatccgtccatggctctctcgtcgtggtccgacgctgatgcggacccgtgccgctggctgggcgtcacctgcgtcaacagctcgtccagcgacggactgcgcgtcgtaggggtggccgtcgccggcaagaacctgtccggctacatccccgccgagcttgggtcgctcgcgtttctacgccggctcaacctccacgggaaccgcctgtcaggaaccgtccccgcggcgctcgccaacgccaccgccctgcactccctctttctctacgataaccgactcacggggccgttcccggccgcgctgtgtgggataccgaagctgcagaacctggacctgtcgcagaacgccttgacgggcgcgctgccgctggagcttggacgctgcaagcagctggagagattgcttctcgccgagaatgcgttatccggcaacataccggcggctgtctggcaggacatggtgggcctgcagatgctggacctatcgtccaacaacctcaccggagccataccagcagaactcggcaagctcgccgcgctcgccggcacgcttaacctctcccacaaccacctctccggcggggtgcccctcgagctcggtcggctcccggccaccgtcacgctcgacctccgcttcaacaacctctccggcgagattccgcagtccggctccctcgccagccagggccccaccgcgttcctcaacaacccggggatctgcggcttcccgctgcaggtcccctgccgcgtcgctccaccgtcgtcgtcgtcgttgcccccaccgcctccgtcgtcctctgccactaccaacggcggcgcgggcggtgcacggctgccgatcaagaccagcctcatcgtgctaatctcggtggccgacgcggtggccgtcgcgttggtcggtgtcatcgtggtctgcgtgtactggaaggtctgcgaccggcgccgcgccgcgaaagacaaaggcgacgacagcgagtacgaggaagggtgcggcctgttcccttgcccgtgctgcatgcgcgccgacgcgtgcggcgactcgtcctcggaatgctccgaggtcgacggcaagtgcaacggtggcggagggaccggggagggcggctatctggtggcgatcgacaaggggttcaggatggaactggacgagctgctgaggtcgtcggcgtacgtgctgggcaagggcggtaaggggatcgtgtacaaggtggtggtgggcaacggcacgacgcccgtggctgtgcgccggctcggcggtggcaccgcggcgcccgagcgataccgggagttcgccgcggaggcgggcgccatcgggcgcgtgcgccaccccaacatcgtgaggctgcgcgcctactactggtccgccgacgagaagctcgttatcacggatttcgtcaacaacggcaacctcgcgacggcgttgcgcggccggtccggttagccaagcctatcatggaccctacggctgcggatcgccaagggtgcggcacgcgggctagcgcaccttcacgagtgcagcccacgccggtttgtccatggcgaggtcaagccctccaacatcctgctggatgccgactacaacgcgctcgtcgccgacttcggcctcgcccgcctcctcaccatcgtcggttgcaccgacgtctactctgtggcaggctccggcggcatcatgggcagcgggctcccgtatgccagacctgccgctctaacggacagatcctgcagtgcgtatcgcgcccctgaggcacgcgcgccggggggtgcacagccgccgagccagaagtccgacgtgtactcgttcggcgtcctgttgctcgagctactcacggggaagccgccggagcatgcctcgccgtccgcgtcgtcctcgtccatgccgggtcacaatgggcaacgggagctagagcaacaggctccggagctcgtgaggtgggtgcggcaggggttcgaaggctc

SEQ ID NO: 584 - DNA, 1498 bp, Zea mays
  Clone ID: 700083617_FLI
gcggggacctcgtccgaggatttgatcgaggcgaccgccggctctgaggttgaccaggcctccgctgcgggcaggggtgcaggcgctacggatgcggaggcaaacggtggcggggccggcacgtcggggaacgggggcggggaccgcgcgtaccagcgctacgacgtgcaccacgttgcgcggtgttcgaacagatattgccgttctcgctgcttctactcgtcgtcttcatacggcagcatcttcaaggtttctttgtcacaatttggattgctgcggtaatgttcaagtcgaacgatatattgaggaagcaaactgccttgaagggcgagagaaaaatatctgtactcattggtattacagtaatcttcatgattcatgtgtttggcgtatattggtggtacaggaatgatgatcttctcagacctttgttcatgcttcctccaaaagatataccaccattctggcatgcgatttttgtcatcatggtcaacgatacaatggttcgccaagctgcaatggctgtcaagtgcatgctgcttctgtactacaagaactgcagaggtcgtaactaccgtagacagggccaaatgttaacccttgtggagtaccttctgcttctttatcgtgctttgttgccaacttctgtttggtatcgtttctttctgaacaaggaatatgggagtctcttctcatctttaaccactggactgtatctgactttcaagttgacttcggtagttgaaaaggttcagtcattcttggccgcggtgaaagcactgtcacgtaaagatgtgcattatgggtcttatgcgactgcagaacaggtacttgctgctggtgatatgtgtgccatttgccaggagaagatgcatgtgcctgttctccttcgctgtaaacatattttctgtgaagactgtgtttccgaatggttcgagcgagagcggacttgccccttgtgcagagcattggtaaaacctgctgatatccggtcatttggtgatggttctacaagtctattcttccagttgttctagactgcaagcggtaaaatcctaacataacaatggacgagctattgcatgaaaactcgagtggaggtccttttaacgccatcatgtgaaaccatcttccgcaatgttgagatcaatgtgagaaggttcatgacagtcacgacagtgcagtcgttatttgtttatatattcaaccaaatagtttacagagctttttagttgcaacagaggcaaaatgtttccagcagactgctttcagagcctttagaactctgctggacaaacaatttgatcgttgaggtctgctgagccgacaaccgtatgcctcctgtaaaattctggtatttttttttaattttttttttttttgcatatgtgggcttacgtgggtgtaactgaaatttgaaagtaccgcttgcacagcaagaattgccggtgggggttgaaagtggtaaatgaatgtaactgtaaagcgttgttacatg

SEQ ID NO: 585 - DNA, 1178 bp, Zea mays
  Clone ID: 700083637_FLI
aaacgtaaaagcagatattttattaataaagaatatatatatttggcatgccgcgacgacaaggcagtgcagtgcagcgcagcgcaggccgtggtgccagatgatgacagcttacaagatcacagacacacaccccaacagttgatttatacatgcaaataagcaagagaacatgggaaagcagaatggttggtattcatgcacgcttcactggcgacaaaacacatcaacaaaaaacggaacttccacatcgtcgacgactgtccatggacgcttctctctggcaaggaatctgagccatagggatccaatgtaaccaaatagagaagcaaatttgtcggcaagaataaacatcatgcagtaagggggccctctgcattgctacgcccattgagctgctctgggtggatcttcttccccaacatcttcctcatgacccgacttaattttcttgtcgctttcagtggttttggtgttggcttccttggtttcttttgatgcatcttttccatgcatgatgcatgctttgaagtggatgccacagcaacgtcaatgatatcctggcaactatactcccttggagaacttgatgagaatacttctgctgcaaataaatcagcaagtgtagttcttactttctccaccttttctaacatcagaagtggtcgttcctggatattagcacctcccccatcttccacctcacgtatcaggatttcttctgctacaaagcatgtaaagttgtcttctttcattgacaatgaatgcatcttagcaggctcaacaataggccatactggttcacatggctctgtttccaatgcaacatcttctttcacctgatcattcctgggttcctcatcatctctctcttccacaattgctttctcatcatccatgataaagagatcatcttcttcaatgcaagccacagggcaaagtgagtccacgtgatggccaagtgtgccaattgcaagtataccattaagaagcacatcatggagcagaagggcttcagtatctttctcaaccacactatgaggcacagagtccttgtcctccatggctttgctaccatggatgctgcagtactcagtattaggatgcatcctccgattcaaccaatgaaacacctttaggcccatgtctctagaaccaatctgaaatcacaggagagc

SEQ ID NO: 586 - DNA, 1245 bp, Zea mays
  Clone ID: 700083705_FLI
gtgaagttggaaggctaaatgtcgtcggtggtgctgagattggtccccttagatgttggccaggtggtttatgcctctcaagatcgattggtgatcaggatgtaggtgaatttattattccggttccttatgtgaagcaaattaagctgtctaatgctggaggccgtcttattatttcaagcgacggtgtttgggatgctttgactgcagaaatggcttttaaatgtgcacgagggcttcctcctgaggctgcagctgagcaaattgttaaagaagcagttgaagcaaaaggattgagagatgatacaacttgcattgtcattgacataatatcaccagagaaaccaaaacgcactatacaatctcaaagatcgccaagaaaaggccttgtgcttctaaaaaatttctttttaaggaaaacagcatctgactcgttgtctctccctgataaggataattatcctgagccagatttagaggaggtctttgaggacggatgcccatccctttcaaggaggcttaattctgagtatcctgtccgagacatgttcaaactttttgcatgtgcaatttgtcaaattgacttggaatctggccaaggcatatccatacacgagggtttgtcaaggccaggaaagctgcgtccctgggatggccctttcctttgtcacagctgccaggaaaagaaagaggcgatggaggggaagcgccattcacgagattcctcgtcgagaaatagcgggtcaagtgaatcgtgactgaagccgagaatcatcttgaggcaaacgcctagcggtgtgacgagctaattattgttgctgctgtcgttcttgcagcactttctcatggattaccattgaattgagacatgttggaagtcgccatgcctatatatatgttggagctgtacggtactggaccgtagagcaaatccaatcgcctctagataccacaccagcgtcttcggcagggcttgtggcagcagctcacgcagggaatgatgacaagaggttgttattattagtgaagaatgtcgacagtggccaatagtcatgtaaattattcgtcgtgtagaggtgcaagtgacaaatagccacggttttgtaattctcaactaggattaggtattgagacctgtaattcgtctgggcagacctcaaactgaaggtcaacaacgtagcgtggccctattgtagaatgtatgttgccccacaatctaaatgattcaacgctgcaattaaatct

SEQ ID NO: 587 - DNA, 538 bp, Zea mays
  Clone ID: 700083750_FLI
ggaaatgattacagatgaggaaaagtctgttttccgtaggattggtttacggcttaaggcatatttgccacttggagttcgtggtgtttttgatggtgtaattgaaaatatgcacttgcattggaagcacagggaagttgttaaactaatttcaaagcagaagaccttgtcattcgttgaagagacggcacggcttcttgcatatgagagtggtggtatactagttgcaattgaaagagttccaaagggttatgcactcattttttaccgtgggaagaactataggagacctattaacataaggccaagaaacctcttaacaaaagctaaggcattgaagcgtgcggttgctatgcaacgccatgaggcccttagtcagcatatagatcaactggaaagcaatataaagcagatgaagttggatttggtatgtaacttctcattaggttatttttgagggtgtgttgcactgtattatttcaacaacatctgagctaatttctggatgtgtggcaatatatatcagcaaaattatggc

SEQ ID NO: 588 - DNA, 825 bp, Zea mays
  Clone ID: 700083767_FLI
cgacgatgacatcctgaccggtgcattgcctcagaggatctcgtctatctccaagctgtcgtcatccatgaagggtctcggcttcattgggaaacccaagccctaccgtacgtgccttcggaagggtaaagcgacaggcagaactaactacaccggcaaagccagcgagcatcagtccgggagcaggagcgccaacgagctgctcccgcccagcgccagtttcgtgaagctgtcggacatgagccctaaacagtggagcgcattcctcgacaagttccaggagctgctcccaggtgccctgagcgcccggaagcacgctgccggtgtcgtcggccagcgctcgatgccgaggctgggcacgtcttgccagttttgagagtagcagaagagaagccaccgaacccaaggtatgacgaacgcgcttctgttcgagctctggtgtgcagcagccaagcaggtacggagtattatatatgcttgtagtaggtgtctggagccggtggtggtagagagggtccgagaataagatcatccatggcatgtgagatgaggttgcgggagaaggaagggggttgtgtgtgtttgtgcatagtgtttcgcaaaagagatccgttgttctttttcttcttctctgtatatagttaagtactcctactgcttactgcatcgcagcaccgggcacgggctgggatctcggccgttgttacctgaacgatggtggtgagtgtgctggcgtcgcctgctctctgctctgtctttgccgctgtaccattttggaggcgcttaccatattatgaactttgaactatgatatgatgttcgcat

SEQ ID NO: 589 - DNA, 878 bp, Zea mays
  Clone ID: 700083816_FLI
acagtggggtgcggccactagatttttcctgacgcggtgtctgctcccacttcccctcctctcccccaggtggcggcagcggcggcggggtagcatttgtgctacgagggcttttgcaatggcggcttcggggttcggcggcggcgaggcgttccggctctcggccgcaccaggggccggcttactgaagctgcacaagggcgacatcaccctctggtccgtcgactgcgccaccgacgccatcgttaatgctgctaatgagcgaatgttaggtggcggaggtgttgatggagctatacatcaagctgctggaccagagctagtgcaagcatgccggaaagttccagaggtcaaaccaggagttcgttgtcctactggagaagctaggattactcctgcttttgagcttcctgcctctcgggtgattcacactgttggccctatatatgatttggacaagcatcctgaggtgtcattaaagaaggcctatgaaaatagcttgaagcttgctaaagataatggcattcagtacatcgcattccctgctatatcttgtggtgtttatcgttatcctcccaaggaagcatcaaaaatagctgtttctaccgcacagaaattttcagaggatatcaaagaggtgcattttgttctgttctcggatgacctttacaatatatggcgcgagactgcccagcagttgctatcacagtttgagaaatgaatggtccataggcagtttgctagcactagcagttgcccagcagtcgttgtctagtgttgagatgtgagcgccataggcagtttgcctggtgtaataaaaatgggtgtatcagacaacgtttaaatcttgatgaaaccgtgtattgcacctgtggtat

SEQ ID NO: 590 - DNA, 1291 bp, Zea mays
  Clone ID: 700083831_FLI
gacctgtctacagtgtagatccttcaaagcgtcacgcttacgcccaatctggcaataatgtctttgtaccagtcgagagagaactaatttttgacattgatatatctgattatgatgatgttcgctactgctgctctggagctgatgtctgtagagactgctggcccttgatgacaattgctatcaaaattttggatacttctcttagagatgattttggtttcagtcacatactatgggtatacagtggacgtcgtggtgtccattgctgggtctgtgatagcagagcaagaaagctcagcaatgaacaaagggctgcaattgctgactactttcgagtctacaagggtggtgaaaatgcactgaagaaagtatccttggctggacctgttctccatcccttccttgcccggtcatacatggatgttcttaaaaccttctttgaagataggttgctccttaaccaacaactctttgcatcagaggagagatgtcggaagatactcgatctcatccctgatgaaagtgttgctagtgaggtccatgacaagtggcagggaaatagacgatcttctatttcaaaagaagatgtcaatgcgaccagatgggagcaattgaagatgactttacagtctggaaaaaaggctcaggggcttcgtagatgtgtggaagagattgtcttctcatacacataccctagacttgacatggaggtatcaaagcacatgaatcatttactaaaagctcccttttgtatacatccaaagacaggccgtgtttgtgttccgattgaccccagtaattgtgatgattttgatcctgcggctgttccgactctatcacagcttttaggagagctgaatgctactggttttcagacagatcctgaaaataattgggaaagaacgtcccttgggaaatccatcagttttttcagaacttccttcctgcacccattgctgaaagcatgcaaggaggaactggaaagtgcatatagcgcgaagcttcagcagtccaagaattccttggactggtaaaatctacgcatgtttctgcctcttttttatcatcagcccccgtccggccgtccctgagcattccaacgggtagcatggacctggtgccaggtagaatatctgtgacacgctgccaacccgtgttgcatgcctgggatgcatgcaaccttgtcagtttgaagttgcgtcttaggattcatgttaacatggaacaagtccgagtacatgctttgtggtatttttacctttggattattttattaggttgaagggtt

SEQ ID NO: 591 - DNA, 1790 bp, Zea mays
  Clone ID: 700083867_FLI
ccacgcagacgataacaccgcgtagacaacgaaccgagacccatcaacaaacagtaaataaccccaataaactaacttattacgtttacgaacgtaaacatactcgacaccacaaaaaacagaacacgaccaagaattacgatcatatagagaacacaaaataacgaatatgtggttatacacatatcacaaaaatcatatagagatctaacacagcagagcacaagtctaagaatacaaatataagaccataaactaagacttagatgcgaaaaactaagaaaacaaacggataatcaaaaaaaataagagcaaagcagaagccataaaaaacaaaccaataaacaaaagaaattaaaacacaatcatacatcacaaaaatacacaaaatactaaaacgaagcaaaacgacgatataaaaaaataacaatgtattacagatgacacacaaacaagcagcaccagcgaagaaaccacaaacaccataaaacaaaaactacttaaaaaaaaaaaaaaaagacaaaagacacaaacaaacacaagaaaagattaagataaaaaacgtagtataacacaaaaaaagaaaatacacaaaaaaattgaaaaagaaagactaaacgcaaagtaaaagaaataaatggaaaaaaaaataaaaaataaagaaaaaaaaaaataatacactctaatcaataacgaagaaaaactttaaacacacaaatcataacacaaaacataaaacaaaaatagaaaccggaccaaaattaaacgggtcacaacacgagtacgcccacgcgacaacgaccaaagaaacaaaagggtggacgtacgcgtaggcgagctgctcaggaagctcgtgctccccgacggcaccgtgctacgcgtgcagcttcccggccggcccacacgggactgcctcttctccgacccggcgcgcgacggcgcgagtttgctcaagatttggaacctgaacaagtgcggtggcgtggtgggtgtgttcaactgccagggagccgggtggtgccgcgtgaccaagcggacgcgcgtgcacgacgcgtcgccgggcacgctgaccggcaccgtgcgtgccgacgacgtcgacgccatagcgcgcgtcgctggtgacggcggcgggtgggacggcgagaccgtggtgtatgcgcaccgcacgcgggagctagtgcgactgccccggggcgtcgcgctgcctgtgacgctaggcccgctccagtatgaggtgttccatgtgtgcccgctccgcgccgtcgtgccggggttctcgttcgcgcccgtcgggctgctcgatatgttcaacgctgggggcgccgttgaggagtgcgacgtgatcagcaatgtcggcggcaaggccatggctctcagggttcgcgggtgcggtcggttcggcgcttactgctcgcgggagccggcgaggtgtctattggactcggcggaagtggagttcagctacgatgccgacaccggcctcgtgtccgtcgacctgcccgtgccggagcaggagctatatcggtggacgctggagattatggtctaggccgtgacgctgtgcgctgacgccattctgagccggacgacattgtcatttgctatgtgcacgagagatagatgtattgtggtgttgttgtataattggtatggagagagtatgcttttgttatgtctgtatctgcataccctgcgtgctttgaatgttatataatacttgatagataataaaggatggtgttcctgaatgttatataatacttgataataaaggatggtgctcttttaat

SEQ ID NO: 592 - DNA, 1234 bp, Zea mays
  Clone ID: 700083890_FLI
ctcggtcctcagccctcacacgccgcccgcccgcgacgaagcccgcatagccgccgccgagcgccggagttgccacctaccgcgcgcccatctgccgccgatgctgcgcactcatctgctacccgaggcttggcggcggccactgccccaggaggcaggagcgcgacaccaaagtccgcgcatttccttccaccgagccgcaccaagatccgggatccaaggtggccaagttcgttgcggcggccctgaacttcgatggctgtcctcgtcacggaattcgtcctcagattcacagccatggactacaatgtgcgtgaatgcagactataccactcctgctgattctgtcgccacctcggagcaagcaggtggtgaagctgaggccaccttagaaacaggtggtgaagctgcagccaccttggagcaaacaggtggcgaaaccgaagagccaacaattgtagcacctgctaatgaatatacagagcaggaggctgctcctcagcagaagtgtgcaaagatacacgacttttgcctagggataccttttggtggacttttactctccatgggccttattggatttctcttctggaggagccctgcgagtcttacctttggcgttgcacctggccttgccatattggccctggctgtacttagcctcaatgtctggaggagcgggaagtccagcttaccgttcatactggcgcaagcaggcattgccgctgccgtagcatggaagcacggccaggcgtacaccactacgaggaagctgcttccgtggggattctacgtcgcgctgagtgccgcaatgatctgcttctactcctacgttcttcttgccggagggaatccgcctcctaagaaggcgaaggcgaaggcgaaggctgctgcttgatttgatgttgaaggcattcaccggagcgtctcataattgcactaccttcctctggtaaatagggttgtggtatggcctctgtttacttagtaaaagactgaggagataagactgtcccccctatgctgcataactgttgttgtttcctttaaatatacatcaataagggctgggttggttccattccatcccactacccatctcatttatggtggtaaatagggttgcccttttttttggctttggtttgaagtgtttgacgagattttgtaaatttcctttttagagagaagcacattctgccacaagaggctcaacatgctattgcaattcgat

SEQ ID NO: 593 - DNA, 966 bp, Zea mays
  Clone ID: 700083928_FLI
gtcgaccagcgtccgtgaagatgctgatatgcgattcttgtgaagcaggatttcatttgtcttgctgcattccttgtattaaggagctacctactgatgaatggtattgtgctccatgcttgtgtaagaaacccaagagtctttatggcaaactctcagagggcaggataaatccttccaggaatactaacacaaggcctcatgggatgagtcacatagagtacatgctgaaggatgctgaaccatatgtaactggggttcgacttggtagagattttcaggcagaggtgccagaatggtctggtccatcatccagcagcgatgtttactttgacgagccctgtgcaattgattctgcagaactaactacatttaatttgtgcaaaatgagtaatcaaagtcattcttccattggtaattggatccaatgccgtgagaccttgaatccaggagattctgacaagcaagttgtctgtggaaaatggagaagggcacccttatatgttgtacagtcagataattgggattgtttttgttgtcttctttgggatccagtccatgctgattgtgctgttccacaggagttgaagactagtgaagttctaaagcagctgaagtttgtaaacatgctaaagaatcagctggtggaccaaaaccagaagcctgcttaaataaatgccagtaccagagtgggcgattcctcaagagaaggatacccattatgatggtatgaatgagttgccgtatgtggcgttctcttgtagtaactagccgtctgtgaacatgtgagaactatgttgttctagcctgttaaacgaaatgatctgtactgtcttctatagggtcttggtacacaagagttatacaacatagatctgtctgtgcagtccagggagcagcgtgtcgctactgctgtgatcgccgccaaacgatcctgtgatcctgcgccaagttttgtttcttggt

SEQ ID NO: 594 - DNA, 490 bp, Zea mays
  Clone ID: 700083979_FLI
gtctcgaggacagtgccgtggtctatgaatgcgtgcaaagcttggtcgggcatcgtgttgaccacggcactgtctcgaggacagttgatgcgaatgtgtccgaggcggaaggtgtatacagcgccttggagaagcttggcattgactggggcgaggtcggaaagcagcttgagctggaaggtgtggactccttcaagaagagctttgacagcctactcgtgagcctacaggagaagggcaacagcctcaagacggcaactgtgtaaaactgagaagattgggtaccggcgggtgaacgattttactaaataaaatgctagcttgctggctctcttagtttttacgatgtacctttgctctccattttctgaatcgggattgtattctaggcttgcctggccgtcattgtgtgaccaacgttcatggcttgtaacaagggatcggacgtaaacggttggaaaacatctctgttactttctatacgattttt

SEQ ID NO: 595 - DNA, 1956 bp, Zea mays
  Clone ID: 700083984_FLI
cacccgctgccccgcgcccagccgtcgccgtgatcgccagagcgttcctctgccgagccgttcggccggtccactcccgcgaagcttccagtagaggcgaccttcggatcgagtctcggccgccgaggagtcgaaggccatggaagtggtggcgtcggcgccggggaaggtgctcatcgcgggaggatacctcgtgctggagcgccccaacgccggcctagtcctcagcaccaccgcccgcttctacgccgtcgtccgccccctccgcgacagcctccccgccgacgcctgggcctgggcgtggacggatgtcaaagtgacttcccctcagctctcacgggaggccacatacaagctgtccctaacgaagtcgacgctgcaattgacatctgcgagggaatctacaaacccttttgtggagcaggccatacaattctcggtagcagctgctaaagcgaccattattgataaggagaggaaggatgtagtagataagttgctgctgcaaggtctgaacattacaattcttggatgcaatgatttctattcttatagaaagcagattgaagcacgcggtctccctcttactccagaggcactgctttcattgcctccattctcttcaatcacatttaactcagaggttgctaatggaacaatgactggagagaaatgtaaacctgaagtagccaaaactggacttgggtcatcagctgccatgaccacatcagttgttgcagctcttcttcactatcttggtgtcgttagcctctcatgtccaggacaatcttctggtgataatacaactagacgagaacttgacttggttcactctattgcccaaagtgcacattgtatagcacaggggaaaattggcagtggttttgatgttagtgctgctgtctatgggagtcaacgctatgtaaggttttctccagaaatactctcgtctcaggctacaggtgggactttcctcccagatgtagtatcagatattgttacacaaaggtgggatcatgagaataaacagttctcattacctcctctgatgacccttctccttggggaacctggaaccggaggatcatctactccatcaatggttggatctgtgaaacggtggcagaagtctgaccctgagaaatgcaaagatacatggagtaaactggcctttgccaattcagcgctggagaaccaactgcgaatcttaaaaggactttctgaaaatcaccgagaggcatatgagtcggtagtgctatcctgtagccatctcacttatgagaagtggacagaggtggctactaaccaacatcaagaattaattattaaatcattgttggctgcaagggatgcttgccttgagataaggcttcacatgcgagagatgggcatagcagccggtgttccgattgagccagattcacaaacacggctacttgacgccactatgaatatggagggtgttttacttgctggagttccgggagctggtggcttcgatgcagtattctcagtgactttgggggatgcaagtaatgctgtagcaaatgcttggagctctgctggcgttctgccacttctcgttcgagaagactgccgtggtgtctcattggaagatgctgacccaagaacaagggaggtatcggcagctgtatcgtccattcagattaattgattctactgttaatattttatttatgtattgtgccgaatgctaggaggtacgtggttaaaataagtgctgcacttgcagcaagttagcacgttgtttacaatgactgttcatgagtgtagaaaataaggaattcaatggatttccatggaattagtgcttgtagttgtagctatggaatgtacgtgagaaaatgtcaaggtatccaacaaactcatactgtaaaccttgtatttgtaacttttgcggtttgtatgataattcggcatgtgttaatgtttgat

SEQ ID NO: 596 - DNA, 2767 bp, Zea mays
  Clone ID: 700084030_FLI
ggaactcgatcgcaagtataagcaagttgacatgacaagatgggatatacaacaatttggaaatgaactacatgaattcttacaacacaagaggtacttgatcgttgttgacgacatatgggatgctagatcatgggagacaatcagatatgccttgaaggacaataaccgtggaagtagaataatcatgactactcgtaattttggggttgtcactaaagtagaagaggtttacaaattaaaacctctatctaatggaaactccaagaaattattctataaaagaatacaaagtcacgaaggagaaagccttgatggtgaattgtctactaaaatcatagataaatgtggcggcataccattggctatcattgcaattgctagtttgttggttgaaagaccatgtgaggagtggtcaaaagtctatgactcgattggtcttgggaatgaagacaatacaacaaagatactatcatatagctattatgatctgccttcttatctgaagccatgtctactgcaactaagcatatttccagaagactatatctttgatacaaaagctgcaatatggatgtggataggtgaaggcttagtccatcttgacaaagaggagggtagcctatttgaggttggagaaagatacttcaaggagcttgtgaatagaagtatgatccagccaatagagggcatatatgctcggtttgtggaagaattccgtattcacgacattgtgtttgatctcatccgtaagttgtcgaaagatgaagacttcattacccttttggactgtagcgggctacttttatttccggttagtttaagaagagagaagaaaacaggcgtgcctcactctgactgcaagctacgccgactggctgttcgaaatcaccgtatgttgtgctttgaagacaccatggatacgtcagaggtgttgaggtcgcttaacattatatattgtaatattatgataaaacccccacttcatagcttcaaagtttgtcgtgtgctatgtatagaatacaacattttgcatatcaacctaaaacatctagggaatttgttgcatctcaagtacctaaagctatatgacacgcctgttgatgagctccctaaggaaattgggcatttgaggtctcttcagacactgatattaatcaaaactagactagatgagctgccaccggctgtttgctcacttacacggttgatgtgcctgatagcaaacgggttcgaaaggttgccagctgacaggatggggaacctaacgtccctggaggagctacggttaaagagcgtggttggtcggagtgccacccaagccctagtggcagagctcggcaagctaacaaggttgagggtggtcaacatcaccttttcagaggagctagaggagagtttgcaagaagcattggtgcaatctctgttcaatctgcggggactccaggaactagtgctttcttctgaaatgtggcagagttcttctaaaatgtggcatctttcttctaaaatgtggccgcagggaagccctatgtggggagactgggagccaccaaggcagctccggcgcctgactattgaaggcatcatcttctcacgacagcctcgatggatcaaccgctcctgcctgacacgcctcaacttcttatctctgatggtacacgctgttgaagcagaggacctagataacctagtgaggttgccagagctccagtatctcaagctagatggtctcagctggcctccaaggtatgctgttggtccggatgacttcaggaatctgaggttctgctatgtgggtacaatgcttgagtttcatatgggtgccatgccaccaaggcttgaagagctgcagtttggagtttatgcagggtactgtagttggaaacacaatggtgtgctgttggagcagttcccaacaatggatgtgatcgaagatcttgacttgggcctagataacctcctttcacttgagcaagtcagggttgaagtcgactgcagaggcgctactgcagcacgagtgctggaggtggaggccgtggtcatgcgtgctgtggaaaatcatgccaaccgtccaaccataaaaatggttcgagtatatgaagaaagtaacttatctattgaagagcaggagacttgggtgaggctgttctcttcgagtctgcttaagaaaatatgttgtcttaattatatatgttcttgggtactacttactcacctgtatgtttgtgtactgcatttctcagcttcagcgacagattgaagagcttcagcgacagattgaagagcttcagcaacagaaagtggaatccgagtttcatcgtaaccatccgaatatcaaactgaccagaaaaaacaccgacgaaatggcctcttcatctgactatcctgacacatagctcaagaaattcgtgtctcttgtccaatccttgcaatccagcagcaggtaaacgtgagttgtttaagtacggaagagataggtcctgttcagccagatgattacaagcattcgcagggcttgttagatttgtggttcttagtctaaaatcacattgaagagggagatgaacacaagtgatgcagtttatgtgttatctacatttgtctctatttttgtaagatggccatatatttcctcgaaagtgatcttgattgattatgtgtgaagtgtatttttttaatgacatgggtcatgtatttccttggaaacggccatgagattggttgtgtatttgcttgaaagatgaggatgatataattttccttg

SEQ ID NO: 597 - DNA, 177 bp, Zea mays
  Clone ID: 700084036_FLI
cctgaataatgtaggcgcagttaaacagcagcagcactgccgatctctttatttttcaatattgttatctagtggttcaggaccaaataagtaggccaggtgctgactgttgtatagtttttagcaacgacaataggccacaaactagaaatgcgcgtactaatgttgcattgctgc

SEQ ID NO: 598 - DNA, 884 bp, Zea mays
  Clone ID: 700084059_FLI
cccacacagaagcggcggcggcggagcaaacgcaggcgaaggcgagggtgtgagggaaggagcaccagccatggtgcacgtcaacttctaccgcaactatggtaagacgttcaagaaaccaaggcgtccttatgagaaggagcgtcttgatgctgaactgaagctggtcggtgagtatgggctgaggtgcaagcgtgagctttggagggtccagtatgcactgagcaggatccgtaatgctgcaaggcacttgctcacccttgacgagaagaacccccgtcgtatctttgagggtgaggcgcttcttcgccgcatgaaccgctatgggctgcttgctgagggtcagaacaagcttgattatgttcttgccctcaccgctgagaacttcctcgcaaggcggcttcaaacacttgtcttcaaggctggcatggccaagtccattcaccatgctcgtgtcttgatcaagcagcgtcacatcagggttggcaggcaaattgtcaacgtcccatcattcatggtgagggtggagtctgagaagcacattgacttttcactgtcaagcccattcggtggaggccccgcaggaagggtgaagagaaagaatcagaagaaggcaagcggtggcggcgatgctggcgatgaggatgaggagtgaggatggacaagtagcgttacccaatataataatattatctagttttcttgaacttgttcgaatgatgagtgcttagctgtgtgatctgacgcagagttccctgtgctgactctgtgtcatggatggtccattttatcttgtggtattatcagcctttacataactgctatgtttggatatgttcaattctgttgcaattttatgtggttgttttttgcgttttgttgct

SEQ ID NO: 599 - DNA, 1665 bp, Zea mays
  Clone ID: 700084070_FLI
agcccatgtcctccgaggacctcttcgacggcctgcctccgcccgccgccgccaccgccccggccggaggcggagctggcgcggcctccctcttgcagcccccgccgccaccacctcctccttctctggcgcaagcaacggcacccaagcccgcgctgaagagctcactcaagcggagcaagccctccccctcctcagacgctactccctcttccactcctgcccccgcggctgccgcgcccgaatcccatgttcctgagaaacgtcttcggttcagaacaaccgttgatgcttcagaaacacaagtgattgaggctatgcagaagatagcttcacacatagggaacgcttcaaaattcagcaaggcatcaaaactagctttgcaactcatcgaggctggaagcgtcaagcctggaacaatcggtcatttctttgctatactagaagctgcgatgtcttcaccgggagtgtgcaacgagccttctgtacgagcagactaccacaaattgttcgatgctgctcagggtgtaacagagttactcaaccaagagcagaaaaatcgattcaacatatgggtgctgcatgcagtggtggctaacgatcttttcactgatgacagctttgtgttctcaaaggctgtaggaaagatcaaagatgccatctcagccctgccagtggcaacggtggatgacgacaacgatgaagctgcggcccttgctgctgcgagcaaaactgatgtggcgacggacaacgaagcaggtcatggcgtcccagccgcagcttctgactctgtggtggatgatggcgcgcatgccgtggccttggagccggaagaagaatcctccgaccctttcggtttagatgggcttcttgagcacaggcctaagaagacgtctgggagagctcgagagaaggcagtcgcggctctgaacagaaagacggtcgaggaggaagcaaagagggttctcaagtcgcagcgggaggcccttctgaaatgcctggaaatagccgctcggcgctacagaatcccgtggacacagaccgccattgacattttggcgaagcaggcgtacgacgacgctgcccggttcacacggcggcagcgggacgcgatcgctaagctgtggaactcgatcaaggagcagcagatccggcggaagcaaggcaagtcggtgagcgggaagctggacgtgaacgccttcgagtacctccaggagaagtactcccgcgagaagatgagcatccggcacagcgtgggcggcggcggcgatcgtcgcgcgacgcagtggctgggctaggccatgcgtgtgtgtgatggtttgtgctttggcttcatcagcgacacggcgtgggagttgtttgtgcttggtttttcgtagaggagaggagagagttgacatgttccccgtagcatgtgatgggtggctcttggtgtaacgttacgtactagctgcactgaactcgttgcatgtctttttcagtactggaactggaagcagcagctgaaactgctgacaacgacatggcagtgcagcacagtgcggctgttgggcgcaaaatgctttgtctatgccggcagcacatactactagagtagcagcagtctatcaccaccctttgtttgactgagttgttcacttaagattaaaactaactgtttagact

SEQ ID NO: 600 - DNA, 1713 bp, Zea mays
  Clone ID: 700084087_FLI
caattcctgacctcagtggctcctccaacctatccatcattcatcttgagaacaaccaactgaccggaaatgttccttcctactttggcagcttgccaaaactgagcgagctgtaccttgagaacaaccggttgtctggacccattcccaaggctctgctaagtcgaagcattattttcaactactctgggaacgtgtaccttggaacagcagggaagcaaaagaagaagcatgtcatcatcattatatctgctctgcttggagcatccttgctacttgcagccgccctctgttgctatatgctgacacgcaaggccatgaattcatcatcctcaccacaagcacaagagaaggcgcttcctgcagagcagaacaagttgcagaaatacccaagcacgcagcagctgcagtcgatcgccaccgagacggctcatccatacagcctgtgtgagctggaagaggcgaccaacaagttcgcgagcaggatcggctcagggggtttcgggatagtgtactacgggaagctgagcgatggaaaggagatcgctgtgaaggtgcctagcaacgattcgtaccaggggaagaagcagttctcgaacgaggtggtcttgctctcgaggatacaccataggaacctagtggcgtttctaggctactgccatgaggatgggagaaacattctggtctacgagttcatgcacaatggaacgctcaaagagcagctgcataggcgcgacaagcacatcagttggatcaagcggcttgagattgccgaggatgctgcgaaaggcattgagtatctccacactggatgcacgccatcgatcatccacagagacatcaagacgagcaacatccttctggacaagcatatgagagccaaggtgtccgactttgggctctccaagttgctggcagcggagggcaaggactcgcacgcgtcaaccaacgtgagagggacaatgggctacctggacccgcagtactacgtctctcagcagctgaccgagaagagcgacatgtacagcttcggcatcatcctgctggagctcatatccggttgccctcccatctccaccatcgccttcggggacaacttccgcaacatcgggccgtgggccaagttctactacgagagcggcgacatcgaggccataatcgacccctccatctccacggcggccgagtaccaggacgtgcagtccgtctggaagatcgccgaggcggcggtccggtgcatcgacgcagagcctcggaagcggccctgcatgcctgaggtggttaaggagatccaggatgcattggcgctggagcgggcggcggcggagacgaccaccagcgacagggcgctcgcctgccctttctcccccgcggctgcgagcgtcaggtccggcgggacaatgaggtcgcacgacatggtcatggacaacctgctgctcttggacgatgacgacgactccaccttctccggttcgaccgtcaccaagctcaagtacccggagctacgatagctgtgatggaaccaagctcaagcaggattgcaattaattagtatagtagtagtcagcaattcatttgagttagactgttagagcagtggtgagatagcagattttaatttgcagttgttgttacgttacattacattacgaatgtgtttggttggctggcctaactcaggaccaggcccatttgatacatgcacattatgtt

SEQ ID NO: 601 - DNA, 1024 bp, Zea mays
  Clone ID: 700084118_FLI
cttgactgaaaagttaattgcatctgaatcttcccttaaaagtttggagacttctctcaattctgtatcaagggaaaaggaagatttgggaatgcaacttactgatgcccttttggacatggaatctgaaagatcaatttggacagcaaaggagaaagaatatgtagaagctaatcatagattgaacatctgccttgatgagaaccacaaactttcagaagatttgatgaaggtgatgcaagagctagggtgttgtagagaacaatgcaaaacaatggaggataaactggtgctttccatgaagagtgacatgaatgagaaagtaacggaatgcagcgaggcttgtaaagcatccgaccaaattgtggagaatggaggaaccattcctggtgctgcgtgtgaaaatatgagatccatggtcgctgaagcagaggttttgaaagagaattgtaacagaaagttaatacatgccaaagatacaatagatgagttgagctctaggatatctgtcatggaagccaatctgaaaaatgatactgcgtctaataacaaagagaagacaaagcttcgcatggagattcgatggctgcgtccacaacttgacgcccatcgtggtcggctcaaagaagcgatgaatgagatgaagaccatggatgccaaataccaagaagcatgcaccacgctgaagaaggacctttctcagcatggtcgcgagatcctgaggttgagagagatgcttaaagaatcacagagcgcatcaaactgaggctataagtttctcatatctaatagctcacgtagcaaaatgcagatatgtcgtcagccctatggaagcactcgttgttgcgtttgttcgcttcggaccttcctggtaccgtggttcactgactttctttgaggtgtggtgcgattccatgcgtcagctacttctaatccaatgcgcttgcgctaccgtaaagaatcctgatgtatgggggcattttgctgttcaaactgtaccttttttttttaaatagaaagaaaa

SEQ ID NO: 602 - DNA, 1994 bp, Zea mays
  Clone ID: 700084152_FLI
ggcagtttgatgggtttcatttgtgtttcaagtgattcccgccaattggagcagatattttgtaagcctccgacctctgcaaggtcccagtcagaatcatctatgacatcttgtgatgggagttgcagcaacactagtcacagaatcaattcgttgaatagaagttcttttgattctaatctacccctgcaaagcactttagcatccaagataacgaatttggctaccaaggtcacaaataaagttcgttctcgggtcaggacagacgagaatggcgatggtggcagtggtgagagccattgcttggatcgtggtgcaaaggaagagccaacatctagcggaacaagcacaccaagaggggatgcaccacatggtccctttgctacagaagagaactcacctgggaaatcaacgaacccaaacagcgacgaatcagaaggaaaagtaggtctgcacaagattttgggttctaaggcagaggcactattgaacaagaaagggatatcatggccttggaaagggcgcgagaatgagggacctgatgaaagaaaccatgtgatattgccgtggttgcatggtggccaagagaatggtgtgaatcatcagaaggtttctgattctagtatatctccagacgcccaaggcgctgaacacaaccaacctagcaaaaatgaggcatcaggttcctggtcctctttcaacaataacagcacaggcagtgcaagcagcacgggaagcactaatagcagtgctctctacaaagtagatcatgaagcagattgtctggattatgagatcctgtgggaagaccttgtcattggagaacaaataggtcaaggctcttgtgggacagtatatcatgctttgtggtatggttcggatgtggctgttaaagttttctccaagcaagaatattcagaagaagtgatactgacctttcgacaagaggtatcccttatgaagaaattgcgccatcctaacatactgctcttcatgggtgcggttatgtctccacaacgcctttgtattgtatcagagtttctcccccgtggaagcttgtttcgcttacttcaaaggagcgctaccaagttggatgtgagacggcgtgtccacatggctttagatattgtaaggggcatgaattatcttcaccattccagcccgcctatcattcatcgagatttaaaatcatctaaccttttggtcgacaagaactggattgtgaaggtggcagactttggtctttcacgtctcaagcgtgaaactttcttgacaacaaaaacaggaaaaggaacaccccaatggatggcgcccgaggtgttgcgcaatgaaccttccgatgagaagtctgatgtgtacagttacggggttatcctgtgggaacttgttactcagaagataccctgggaaaatctgaactcgatgcaggtcattggtgcagtgggttttatgaaccaaaggttggatatcccaagtgaagtagatcctcagtggaaatcaattatcctgagctgctgggaaagcgacccgcagcaacggccgtcgttccaggagcttcttgagaggctccgggagctgcagaggcactacgccatccagcaccggaacacaaagaacagcatcgaggagtgaagaacacaatgcgactctcagagcgctgtggcttgcttcgaagcattttgcgagcgaacgaacgaagaaccaggtctctagaagggcctggaccctcctgtactgtatggttttgctttggcggaacagccaaggctggaagaagtttgttgtacagacgggggtacgttcttctttgtttgacagggcaattgtgactgtaatctctgggtcctaacacccaagggtagggtagagactatagagtgagtagtgactgagctccggattgctggcgcatttgggttcttctgattcgtggcaatgcaaatgcgtggttaacaataacatccaatccggggcttgtgtttctggaaaagggc

SEQ ID NO: 603 - DNA, 233 bp, Zea mays
  Clone ID: 700084182_FLI
ggcgttgtgaccatcatcgtcggttatgcagtgaccaaacaataccttagcattgctgggtctccgtggttatctacgtatccgtattccatttgttacctttccagtctcactgctatgtacccaagggcgcctgtcaattcggtggactttgtgcagtttcatcagtagcgtcataccttgtgaatacaattggccaaaataagaggaagtgtaaactaaagttcatgctt

SEQ ID NO: 604 - DNA, 1312 bp, Zea mays
  Clone ID: 700084190_FLI
cgcctgccaaggtgttggattttggcgccgggccaagttcagctctttgggcaatgagggcagtgtggccaaaatcaatagagagggttaacctggtcgagccttccaaggaaatgcaaagagcagggcagagtcttctcgacaatctgaaggggttgccacttattcacagctatgacagcatccaagagttgaaccgcaaaatagaaaaacatgagcgaggccatgatcttgtagtatcatcttatgcacttggcgagattccttctttgagtgaccgaatcacaatagtgcgccagctttgggacctgacgagtgatgttttggtataatcgaacccccagccctctcaatgtagttgcatgtgtgggtgataattttttcagttacttgtatctgaagtaaacaatgtgcatgtttaggttttgttagagcctgggacacctcaaggagcaaagatcataagtcaaatgcgctcttatattctttggatggaaaaaagaaagtgtcgcaaaattgaaaaatcctcaagccgtcctccaagtagcgtgaagagtatcgtagcacaaaaagtctcattgaaaaatgggtcttttgtggttgccccttgtcctcatgatggtcgatgtcctttggagaattcagacaagtactgccactttgtccagagattggagaggacgtcatctcaacgtgccttcaagaggtcaaaaggtgtgcctttacgtggttttgaggacgaaaagttttgctatgttgctttaagaagaggcaaacgcccagaggaagcttggccgcttgatgacttgaactttgagacacttaaagaacgcaatgccaagagaaagccagaagatcttgtcatcgactatgacgaccaatttccaagcgaggaagacgaagaggttcatgtcgatggtggggacagtctggtaccatatgcttcagatgaacatgaattaagtcttttccatgacagtgaagaagcagaggcggaacaaacggttcgtgctgaccttggaggaggttggggccggattatatacagccccatgcgaagagggaggcaagtacaaatggatgtatgccgttccaccaaacgggacgcatccgaaggcacatttgagcgtgtagttgtcacccgaagcaagaaccctaccttgcattttcaggcccgtaagtcactttggggtgacctctggccattttaaatcagtatcctcaagtttggttaaagccatattgttagggaaaattggctgtgtaccctaaaccctaaaagattgcatctttggagatgtaccattaaaag

SEQ ID NO: 605 - DNA, 1086 bp, Zea mays
  Clone ID: 700084203_FLI
tccctcctctccgccgcctacagctgcggggagctcgccagtcgccacttcgccagtcgccacttcgccagaatggttgcccacacggtggcttctcctcgctttgttcctcctaccggcgtggctgctgatctcggccgtttttgtgtaatttgtttggatcccgcagttccatcagtaccaggcagcgggtcgcgcgctgccagtccccgctgatgagcaccccaagatctaccgcatggagcttgcgctaccaacgaggtctgctccaaatccaagctctggtactatctgaggaagctcaagtctcaagaaggtttaagagcaacggtcagattctcgccatagacgagatctttgagtgtaaccctacaacaatcaagagctgtggcatctggctgtgttaccagtgcaggacaggttaccacgacctgcacaaggagtaccgtaataccaccctgaatggtgccatggagcagatgtacaatgagacggcttcctgtcatcgtgtggtcaccctacatacagatcatcaagacggcaacaatcaactttaagctttgcaagagggacaacgccaagcagttccacaattcaaagttcaagtttcctttggtttactgcaacaagtcaggccaccaaataggaagctgaagaccaccttcaaggctttaaggcccaacttgttcgtgttatccaacttgccctgacaccctcccaaatctgtgaggctgtcagtctggtggtttgctagttcagggtaatgcaatctacatgcaacctattgtttctaagttctagttggaggtccatgaaagggttcttagtgtgatggcaaaggcttccgagtagcaccctagtgacccgggtctggtgggttgctagttcagggtaactcaatctacatgcaacctattgtttctaagttctagttggaggtccacaaaagggctcttagtgtgatggccaaggcttccgagtagcaccctagtgacctgggttatgactcccagtgggagtggatttatgtggactgggtaaaaatatccctttgtctaaccatacgtcaaagcacgatttaaggcc

SEQ ID NO: 606 - DNA, 961 bp, Zea mays
  Clone ID: 700084239_FLI
ccttgaagttgaagttgaaaaggtcggcctgcgcggcgatggatgtcaagtgccggcgtctggaggggaaggtggccatcgtgacggcgtccacgatggggatcggcctcgccatcgccgagcgcctcggtctggagggcgccgccgtcgtcatctcctcccgcaagcagaagaacgtgaacgaggcggtggaggggctcagggccaagggtatcaccgcggttggtgccgtctgccacgtctccgacgcacagcagcgcaagagcctcatcgagacggccgtcaagagctttgggcacatagatattcttgtctccaatgctgccgcaaatccttctgtagatagcatacttgaaatgaaagagtctgttctcgataagctgtgggatattaacgtcaaggcttctatccttcttattcaggatgctgctcctcacctacggaaggggtcatctgtgattattatttcttcaattgctggttacaatccagaacaaggattgacaatgtatggtgtcacaaagactgctctctttggtctcacgaaggctcttgctggtgagatgggacccgatactcgtgttaactgtatagcccctggttttgttcctacacggtttgctagtttcctcacagaaaatgagaccattaggaaagagcttaacgagaggaccaagcttaagagattgggtactgtggaagacatggctgcggctgcggcttttctggcgtctgacgacgcatcatacattacggctaaaaccattgttgttgctggaggggtgcagtctaggctgtaaatctggctgaagtttatatttacttggttaataatgtgtactagtgccctagagcatcaggcgtggctaataatgtgtactagtgccgctagagcatcaggctaccttctatatatgacaggcaactctaaaagattttctatatcttattcctcttcaat

SEQ ID NO: 607 - DNA, 2406 bp, Zea mays
  Clone ID: 700084248_FLI
gatgtgatagttgagtttatctctgaagaaattcggcatggccctttaatcctttttctgaaggacacagagaaaatttgtgggaataatgattcctatcatggtctgaagagcaagctaaaacattttccagctggcgcttttataattggatctcaaatccagcctgacaatcgcaaagagaaggcaaatgttagttctccttttctttcgaagttccggtacagccaagctatacttggcctcacattacaggacattgatgggggaaatgataataataaagaaacatcaaaggcaataatgaagcatttgatcaaacttttcccgaataaagtgacacttgaggcaccacaagctgaaatggagctttcacggtggaaccagatgttaaaccgagatattgaagtccttaaaggaaatgcaaacatttcaaaaatacgctcttttctaacaaggcttggattggaatgcactgaccctgaagcgatattggtcacggatcgcattcttacaaatgagtgtattgataaaataattggttttgctttgagccatcaacttaagaactgtacaaatccagacccccctttgggtagtgtgcagtttgctctatccagcggaagatgaaaaatgagtttatggtgaactgggatggtctgagaacaagggagaaagaacgtgtattagtacttgctgcaactaacaggccatttgatcttgatgaggctgttgttaggcggcttccaaggaggttgatggtgaatttgccagatgcatcaaataggagaaaaattcttagtgtaatactagccaaggaagatttggcagacgacgttgatctagaaactatagttaacctgacagaagggtactcaggcagtgatctcaagaatctgtgtgttactgctgcacaccgtcctattagggagattcttgaaaaggaaaagaaggagagagcttcagcagaagcagaaaatagatcattgcctccgtcacacactagcaatgatgtccgtgcattaagaacaagtgatttcatacatgcgcatgaacaggtgtgtgcaagtgttccctcggattccagtaacatgagcgagcttgtgcaatggaatgatctctatggagaaggcggatcaaggaaaaagacaacgctaagctacttcatgtagcttaggttataaatatattgggagaagtgccctggcacaaagcagcaatagttggaggcggtgcagttggaaaaaaaaagctatgctcatctgccagacatccatatcaaagagaattgatggttcaggtggagcggaatagaatggaatggaatagtatacatacacatggttgctgcctctgctctgggccatgcatcatgcatctggacaggacggctatcctggcttgcagttgccctatgcagttttgagtgcaatggtcaccatctgtgaagcacggataccacagagatcctggccccaaccactcttttcacaaatggagctgaggacctttggagttctaccaaaagtgatcttaaatctttgttctttgactttccgttttgtgaacggaaggccccactctgctagtatggattgttgatcctccgtttctctggtactgactgaactgctcatacaaaactcgttcaacaggcagaaatgctgcctggtggccttctagagtgcttctttgacgccgcagagagcacatcaaaaaatgtgtttgtttcgaacgatttgtgctgcattccattcacggcgatatcaggtgccgttgtttgtgtttggttccgcaatcaagggagtgaaagccattagcacatccaatcaaacaaatagcgatatctctttcactgtaccagttagcgctggtctcggatgctattaacattgctgttgtctgtctcggaaccaaacaccgcctaactcgtcggctgttaaatatttctgaactgaattactgcacttggttggggtttcatgcttatcaagttggcttatatagccaacaatactttgtgcagttctgcatcctctgcctgcttatgcgcgatctcattggctgagcggtacgaagataaaacggtagctaatccgaagcgatggcttctctttttctttctacggtattttgtctctatgaattacagttacagcagtcagaacagctgatttaaaaccgcagcgaaaaggctgattgccttgcccatttttgggtgggtggaggttaatacagatttctgtaatttttttactttaatattgtttgacatattgtgcaaggcaaatgatttcctaatgatttgttctacttgatattgtaatccatattgacctatatgctatgctcagttccttagagcatctccagtacttgatattgtaatccatattgacctagggg

SEQ ID NO: 608 - DNA, 1340 bp, Zea mays
  Clone ID: 700084301_FLI
cgcaccttctttctgatgtggcagcatttgccatatcgttattctctctctgggctgctggatgggaagcaacaccgcagcagtcatatgggttcttccggattgagattcttggtgccttggtctccattcagctcatatggctacttgctggcatactggtatatgaggctattgtaaggctcattaacgagagtggcgatgtgcagggctccctcatgtttgctgtgtcggcgtttggactgtttgtcaacattataatggctgtattgctaggccatgaccacgggcacggccatggacacagccatggacatccacatgaccatggtcatggtgattcagacgatggccattctcaccatgaagaaccagaacagggccatgttcatcatcatgagcatagccatggaagttctattactgtcacaacacatcaccaccaccactcaggcactggacaacaccatgacgctgaggagccactgatcaagcacgaggccgactgtgagggcacccaatctgctgctaagaagcctcgacgcaatataaacgtacacagcgcttaccttcatgtgcttggggactccatccagagcatcggggtgatgatcggcggggctatcatctggtacaagcccgagtggaaaatcatcgatctgatctgcaccctcatcttctcggtggtcgtgctgttcaccacgatcaggatgctgcgcaacatcctcgaggtcctgatggagagcacgccccgtgagatcgacgccaccaggctggagagggggctctgcgagatggaaggcgtggttgccgtccacgagctgcatatctgggccatcacagtggggaaggtgctactggcttgccatgtgacggtcgccagggaagccgacgcagacgagatccttgacaaggtgattgggtacatcaagacggagtacaacatcagccatgtgaccattcaggtcgagcgtgaatagagggggagctgtcttttgggctgtcagggcataaatggcgtcacgccttcactggttatcttactctgtcggttaaaacttttttttggcacctgggaaggcatcaggcagccatcggagtcttgatgtgcttgcaagttcatctgtggttcaagctttgatggtcagtagtgttatctgttactactagtctattaggcgggggtaggcgtcaaccagtgtgtacgggtttgattttcggtcatgctgttaacagcattgcggttcgtcgaactggatatgtagtttagtacgctgtgtcatcacctcttgtgtaagggaacgcttcttttctgtggtatggaagatgtgaacttcgtg

SEQ ID NO: 609 - DNA, 1656 bp, Zea mays
  Clone ID: 700084322_FLI
cttcgaggctcttgggtggcacacgatctgggttaagaatgggaacaccggatatgatgacatccgcgcagccattaaggaggcgaaggcagttactgacaagcccaccttgatcaaggtgactaccacgatcggttttggatctcccaacaaggccaactcatacagtgttcatggaagtgcactgggtgccaaagaggttgaagcaaccaggcagaaccttggatggccctatgacacattctttgtaccagaggacgtcaagagtcactggagccgccacacacccgaaggtgctgcacttgaggctgattggaacgctaagtttgcagagtacgagaagaagtatgcagatgatgcagcaaccttgaaaagtatcatcacgggggagttacccactggctgggttgatgctcttcctaaatacactccagagagcccaggagatgccaccaggaacctctcccagcagtgcctgaacgcccttgctaatgttgtgcctggtcttatcggaggcagtgctgatcttgcatcctccaacatgactctgctgaagatgtttggtgacttccagaaggatacagctgaagagcgcaatgtccgcttcggagtcagagagcacggaatgggcgccatttgcaacggcattgctctgcacagcccagggtttgttccgtactgtgctacattctttgtcttcactgattacatgagaggtgccatgaggatctcggccctgtctgaagccggagtcatctatgtcatgacccacgactctattggtctcggagaagatggcccgacccatcagcccatcgagcacctggtgagcttccgtgcgatgccgaacatactgatgctccgccctgctgatggcaacgagactgccggagcatacaaagtcgcggtcctcaacaggaagaggccgtccatcctcgctctctccaggcaaaagctccctcacctgcctggcacctcgatcgagggcgtggagaagggcgggtacaccatctctgacaactcgaccggcaacaagcctgacatcattgtgatgggcaccggctccgagctggagatcgcggccaaggccgccgacgagctgaggaaggaggggaagacggtccgcgtcgtctcgttcgtctcctgggaactctttgatgagcagtcggatgagtacaaggagagcgtcctccctgccgccgtcacagcgaggatcagcatcgaggccgggtccactctcggctggcagaagtacgtcggagcccagggcaaggccattggcatcgacaagttcggcgcgagtgctcctgccgggacgatctacaaggagtacggcatcaccgtggagagcatcattgcagctgccaagagcttttaagagctaacaacggtctggagttttttttattgtcgtcgttgatgccaaaggaacactgtacctagaggacagtcctatgcctcggagcttggaataatgatgatggagggagcggaaggatgcctgccatttgttggagcgtgcgtggtagtatttctaggcctgtaataaacaatgcctttttccatttacgttgttggttttatccggtgaccctcacacgattcatcaaggtggtgagcctggctattaaatcgggtgctgttttttttttgggt

SEQ ID NO: 610 - DNA, 459 bp, Zea mays
  Clone ID: 700084361_FLI
acaactcttacttcaaggaacttctgagtggtgataaggagggccttcttcagctcccaagtgacaaagccctgctgagcgaccctgttttccgccctcttgtcgagaaatatgctgcggatgagaaggctttctttgatgactacaaagaggcccacctcaagctctccgaactggggtttgctgatgcttaaatagaccctatcttggagtgatacattctgctgcctgtatggaatcatgtggtcttttgcatctggagtcaatgtgaacaagcagattgtcgtattgtctttctcgtaataaatttgtcgatgttgagcccttaggctgttgttggtacattggtacttcgtcgatgcttgaattgggaccctttgtccgttttcctagactctgatgctgtatgcaactgaaacaagtaaatctatgatcttaaggctgcagtatgttcttgtt

SEQ ID NO: 611 - DNA, 737 bp, Zea mays
  Clone ID: 700084405_FLI
gctggcttctcctccccctcttatcaagtcctcctcgggttagggttccttagggttttgtggaggggcgatggcggcggctgatgtggagtaccgttgcttcgtcggcggacttgcctgggccaccagcaacgagtcgctggagaatgccttcgcctcctacggcgagatcctcgactccaaggtcatcaccgaccgggagacggggaggtcccgcggcttcggcttcgttaccttctcctccgagaactccatgctcgacgctatcgagaacatgaacggcaaggagctcgacggccgtaacatcaccgttaaccaggcccagtcccgtggcggcggcggcggcggcggcggcggtggctacggcggcggtcgcggcggcggcggctatggtggcgggcgccgtgacggcggttatggcggcggtggcggctacggcggtcggcgcgagggtggtggcggcggctacggaggcggtggcggctacggcggtcggcgcgagggtggtggtggcggctacggcggcggcggcggcggctggagggactgatgtgtggccccatcctggcttcggccgagttatcttatctatctatagtatcgtgttaccgttcgcttctgtcaccgtgttagtgtccgttctacctttggattaggtgttggtaccccttttgttcgctttggttgctcccgctatgaaacgatacgagagaagaatgagcaaggtttttgttcgc

SEQ ID NO: 612 - DNA, 1825 bp, Zea mays
  Clone ID: 700084487_FLI
cttgccgagatccgtgatgctgtgttttcattcattcgaaagatggaaccgaaaaaagttatggatactatgttagtttcaagagtcaagatattatacatcagatctttgcttgctaaatcacctgaactacagtccatcaaggtctctccagttgagcgtttcttggagaaatcaaatactggtcgaagtagaagttctagtaggggaagtagtcctggcagatctcctgttcaccaccatggttatggttcccgaactgcgcttgttgatgaacatgtgcatggtttcaaggtgaacattaaacaggaaaagaaatcaaaattctcctcaattgttctgaagcttcgtggtatcgaggaggagacatggagacagcatgttactggagggaagctccgcgaaattactgaggaagctaaggccttttcaattggaaacaaggctttagctgctctctttgttcacacgccagctggtgaattacagcgccaaattcgtgcatggcttgctgaaaactttgagtttctatctgtaactggtgcggatgctgctggaggagccgcaggacagcttgaactgctgtcaaccgctattatggatggttggatggctggtcttggtacggcgcagccccctaccactgatgctttaggccagcttttatcagaatacacaaagcgtgtttacacatctcaactacaacacttgaaggacatagctggcacattggcaacggaggaggctgatgatcctgcacatgtcagtaaactccgctctgctctggagtctgtggatcacaaaaggagaaagatcatgcaacaaatgcgaactgacactgccttgttaacaaaagaagaaggtggctcaccaattcgcaatcctcctactgccgcggaggatgcacgattagcatctctcatatctctagataacatcttgaagcaagtcaaggaagtaattagacaaagctctacaggacctatgagaaaatcaaaaaggaaagctttgctagagtcattggatgacctcttgacacagatgccctctcttcttgatatagatcatccatgtgctcagaagcagatcatggaggcacggaaagttgtcgagtcactgcaagaagaccctgatgatcctgccccacactctaatgcattgggagagggcgaggtttcacagtggaatgtactgcagttcaacacgggaacgactgcgcctttcatcataaagtgcggagcaaattccagtggtgaactggtgattaaggctgatctgcgagtccaggagcctaaaggtggcgaggtgatccgtgttgttccaagaccaacagttcttgccgacttgagttttgaggaaataaaaggtgtgtttgagcaattgccagaggcagttagcttgcttgccttggcacgaacagcagatggtacaagggccaggtattcaagattgtacagaaccttagccagcaaagtgacggccttgaaagagactgttgcagagatggagagaggtggtgttttcaaagatgtacgataaatgctgtgttattgtagagttatttatgatattgatgttgtatatggatgccatttgtcggcatcccttgtaactgtatttgtttttactatgtggaaacctatgttgtaacactattctttggcaagagatgagccttgcctgccccaacccgtaatactatggttgtgcaaggcatcaatgtaaattgtagctgcagctgataaatgtctgcagtgctgcaagtctgaacttatcaggctatggaactattcaatgtttatttgtattaagcttttaagatgtt

SEQ ID NO: 613 - DNA, 946 bp, Zea mays
  Clone ID: 700084509_FLI
tggaaaatgtctgacaacaagaggacattggggcttggccaatttgttgatctctgtagtgataatagaaagcgtcacattgttctaaagaagttgtcttcaaagtcttggatgatgcgtatattgcagttgctccacatgttccaggatagtgaaattttattcatggttgcctgataaagtgtggaattatataaattttcagcataaattgttttattattaacgttcgtttttgcctaaaataatgcataagtatatgagatgataaaagggtaatcatgaagcattctgtggtccggtggcccttaagttgcaattctattccagcacaaagtgacaatgatatgatgacttttggtctggtattattaattctggacagtaattcagtagctgtggtaacggcaaaatacctcagggttaagctggcatgcaggttattacacttggtttccattgctgtgtgattgtgtttgccttagctttgacacttaaatattacgtaggttactgttttcattttatgtagcctggaggaccattttctgctggcagccaggtttggctgagttttatggatgctaagatatggttcccctcaagtgacagcattgtattgtggtatgtctgacatcttgtacactaatgccatcagcaatcattttgggcttcatgtctgatgttagttgttgacatcataactcatggaatgttgcaaaggaatgatgctgtagctgtagctgtaatgtgaacggactgtaattcacaaatttcttgatttgttttacataggatgtccatatgctctttaatagacctttaccagttgtttactacaggttctttcaatccctgcattatacagtcttttgtgatacatgttacatcctgtgtagttcttcaactccttatgatttatagaatatttcaattttagattctt

SEQ ID NO: 614 - DNA, 211 bp, Zea mays
  Clone ID: 700084512_FLI
tgtttcacccgacgccactctcttccttccagtacaaagagtagagcacttaaagctgaatggaagcgctgaagaggcaacccatcgtccacttgaattgaattgtgcactgctctgaaacttcgctggatgaactcgaccggtcttgtcccatgttcttgctgtattgaacaaccccttgtgaagttgcgattctggttcagtttgtcgt

SEQ ID NO: 615 - DNA, 792 bp, Zea mays
  Clone ID: 700084522_FLI
agaaaaaatgcctatgtcgttccagccaccaaaatacttatgctagtatgtgttcttgtgatctgttggagttggaggctttaggcctatcatatacaatgtgattgtgtattttttgtcgtagcaactagcgagttttacttgaactgttcttgtaacattgcagagtagggctatgcatcatatatcaaaagcctttaccatagcatgttcaaagttggagaagattggaaacgtggaaaccgagcctgatgcagtagcctctgaatcaaagacccaaaaggaagcaatcgacctgaaggaactcaaacgaattgatcatatcctgtcatccttgaaacggaagataggggctgctcctcccccacccccttatcccgagggctatgtcccaccatcagcagaacaagagaaagcgccggatgatgtggcagcatcagaggcaccgcctcaacttgaccctatcattgatcaaggtccttcgaaaagaccaagattccaatgaaagatttgtagcttaaacctgctgactcgacaacttcctgtatgcttttaagttgcagacgtggactttataaatccattgttgccggttggttatttacaggccaaagacagaactaacctcgtgtcatgatatttcgttctctgagttactagcttgaatcttgtagattggccagcgccatttgctccgggcttgtaatcttgtagataggccagtgtcatttgatctggtctatctactgagctgttataacttatgaggtggttatagtattaccttggtgc

SEQ ID NO: 616 - DNA, 605 bp, Zea mays
  Clone ID: 700084624_FLI
gtcatctgattacattttttattgacaagcattgattgtggttttttcacaatactgtacatgattgcatggaatggaaaacatttgcggttagatgataagatcaaagctagcgaaattgttgcatgcagaatgaaactcacacatatgctgatcaaatctaagcaaaatagtgctgatccatgtaatgtggttaaaaaactagatgtgaatataaagaaatatagcgttagttcccgaaaggtgatcacaagtaagaatttgacgatgctgatgggactaatagatcaagagattgaagagattaatgcaaaaaagagaaagcgaagtggacatccagcaggacaaccagaactgaaggacgatgacggtcaactaagggcaaacgcagtcaaggctcgcgacgctgaattgggttgtgaaatgtaaagctacggcgactatagcactttgaaaccgctgttgctccccctgacagagaaagcagtttgaatttgacgatgctgtggctacctatagcttcaaagctagacaagactaattcgtccttcagtagagctgattgacataaacgtagttgcagctcttgcgcgttctgctttttc

SEQ ID NO: 617 - DNA, 904 bp, Zea mays
  Clone ID: 700084635_FLI
gcgagaagagcggcggcgcgggcggacaaggagcaggcggaggaggagctgtgccaagccacaatgggtatctcacgcgactcgatgcacaagcgccgtgccaccggtggaaagcagaaggcctggaggaagaagcgaaagtatgagcttggtcgccagccggccaacaccaagttgtcaatcaataagacagtgaggagggtccgtgttcgtggaggtaacgtgaagtggagggctcttcgccttgatactggtaactactcatggggaagtgaagctgttacccgcaagacccgtatcctcgacgtggtctacaatgcatcaaacaatgagcttgtgaggacacaaacccttgtgaagagtgccattgtgcaagttgatgctgccccattcaagcagtggtacctcactcactatggagttgacattggtaggaagaagaaaacccctgctgcaaagaaggataatgctgagggacaagaggttgaggcagcagctgaggaaacgaaaaagagcaaccatgtcacgaggaagcttgagaagcgcaaggagggacgtacccttgacccacacattgaggagcaatttggcagtggacggttgctggcatgcatttcttcccgccctggacagtgtggccgagctgatgggtacatccttgagggtaaagagcttgagttctacatgaagaagctacagaggaagaagggcaagagcgctgtagcttagagcattctcatggattgtcttgcaccgaaatgtgtgtcctgatgagtacacttttttttggttagtcgtctcaagttcagagcgttatgccatgttttcagacctgattagtacactgttttctaaaagcgattgagctctagtccaatgtattgataatatctgctgttgtcct

SEQ ID NO: 618 - DNA, 1283 bp, Zea mays
  Clone ID: 700084655_FLI
ccaaaatttactgaagaggacaattccaaatcactagagggtactgctgaggcctccacacggaagataaagagcagatcagttctagaaaaaacaatcaagaaggagaaagaacacgtggaaaaagcaaaaaccaagaagctcaaacatactgaaaaggtttcagaagcactaaaaggtccttcagaagcttccttccccgcaccagctgggatggtagtccgcagtagctctaggattgccaataggaaatcaaagatggaagaagaggataatggctcagctaaccctccaaagccaaaggctgaaggcgacaaagataatcctgctggccgttcaagagcaaaatcaccaaggcaaaagactaaagcagacactaagaagaaaacaaaggaaactagagcagaaaagcgaagggctcctagtccagcttctcagaaggatgaagaagagcaagcatatgatgctgagggatgttctatcactaaacaacgtctgtctctacgtaagaagggggctaaaacggaagaaaagcagcagacggaggaatccagatacaggggaagggctcccccaagttctccagaacgcaaggaagaatatgcgagcgacatcgagggctgttccatgagtttcggcacgaaacaggcactgtctctgcataagaatgatatctgcccggagaagggctgctgcaggaagttcttctcgcacaagtatctgctgcagcatcgcaaggttcacgccgacgaccgtccacgaaatgcccgtggaagggctgcagcatggcgttcaagtggccatgggctaggatagagcacatgagggtccacacgggcgacaggccctacgtttgccttgaacctgggtgcggacagacgttcaggttcgtctctgatttcagccgccacaagcgcaggacatgcgtccaaaggcgaaagcaaagaagtaaggcaaagcagcagtaacttacactagtcttggttcttggaaggaataggagaaagtttgtacattccgttaggccttgttcgtttctgccggatcggtgggtcggaacaattcctaaccggattgcttctctaatttatataaactttgattaggtggaacgattccgggtgcaatccgatacaaacgaacaatgccttaacagtttagcacccaaaacccatggtggtctgtgctcacaattccattagtaaacggattctatagagcccacgattaggttggttccctgacagcaatttggttatcattaagaaattaactaattccct

SEQ ID NO: 619 - DNA, 1389 bp, Zea mays
  Clone ID: 700084694_FLI
cgtctgaaaaggatgcgcgtggcgagctgctttgtgcaggagagaatttcgcacactcgggcggtgagctgttggagtttcccttggatggttgttcggctggaggagggtttcctgtaaatgaccatcatgtctcaggtcagagcgtcagccctcaaaagaagagacggaaaacggataatggcgatgatggtgaggcatgcaagcgatgcagctgtaagaagtcgaagtgcctgaaactttactgcgagtgtttcgctgctggtgtgtactgctcagaaccttgttcgtgccaaggatgtatgaacaagcccatacacgaggaaaccgtcctctccactcggaagcagatagagtttcgtaacccgctagcgtttgctccgaaagtgatccgcatgtctgatgccggtctggaaacaggggaagatcctaacaacactccggcttcggctcgtcacaagagaggatgcaattgtaagaagtcaagctgtctcaagaaatactgtgaatgctaccagggaggtgttggatgctcgagcaactgcagatgtgagagttgcaaaaatgcttttggcagaagagatgccgagactgaactccctgaagaaatgaaacaagaagaaagtgaccagacagaaaatcctcaacaagaaaaggagaacgatcaacaaaaagcaaatgtacagggcgaggatcacccgctcctggaccttgtcccaataacaccgccttttgatttttgcagttctctgctcaaactgccaaatttctcaagcgcaaaaccgccgagaccgaccaaggctcgcagcgtgacctcccgctcgtctgcttcgaaagccactgcagcagtacagccttgtagatcatccaagcttgctgctagtgctagtgctagtggtatcgatgaggagacgccagatatcctgcacgaacctgactctctcagtaactgtgtcaagactactacttcaccgaacggaaaacgggtctcgccgccacataacgcgctcggcagctccccgaaccgaaaaggtggcaggaagttgatactcaagtcaattcccttgttcccgtcactcacgggagacacaaacagcggctctgcaatgaacagcactgatagcgcattctgcgcgtcacctctcactttaggaccatcttaaagctgtgaagttggtggccatgggaccggagtacgacttgtagtccgaacacgtgtgcctcgtatcctacggcaaggctcgaggtactgtagactgtagtaagttaggctttttaaagttgtagtaatctgtatttgtaaaatatgtagactcaataatctgtatgtaagatgctgcgatgggtgaagctgtttatctttatcaaattgtagcaacattacagatc

SEQ ID NO: 620 - DNA, 1861 bp, Zea mays
  Clone ID: 700084695_FLI
gccaccgccgcgtcatgccatgctccctctcctcctcgctctcctcaccggagctgcccctacggtgtcagcatccggggacggttgccgcgtcggctgcccgctggccctcgccgcgtactacttctcagcggagtccaacctcagcttcatcgcctccctcttcggcatcgccgaccacaacaagctgctcccctacaaccccggcatcgtggacccgaactacatcgtcaccggggaacgcgtgagcgtcccgtttccttgctcctgcctcgggctccccgctgacccagcctccaccttcctcgcggggtcgctcccctacacgctctccggcggcgagacgtacgacgacgttgcctcggaattcgccaacctcaccaccgcctcgtggctgggggtcaccaacgcggacccggcgggcaagttgcccgccgctgggaagatcaatgtcaccgtgaactgctcctgcggcgacaagagggtatcgccgcggtacgggctgttcctcacctatccgctctgggaaggggagacgctctcctcggtggcggagcaatacggattctcgtctcctgcgcagttggagctgctcaggaggtacaaccccgggatcgggatggacagggcctccgggaaggggatcgtgtttgtcccagtgaaagatgcagacggcagttaccgccctctggaatcagatgctggaaatatcctttctggaggagcggtagcaggaattgtgatagcctgtatcattattttgattgctggcatctggctgtttgcaatgtattataggaagcagaaaatgagaaaagccataccactcacatgtctagaagattctgtccaacttagcaaggtttcacaagatgagggcataaaggttgacagatccatagagttctcatatgaagaactttctgatgctacaaacaactttagtatggaccataagattgggcaagggggttttggttctgtttattatgctgagcttagaggcgagaaagctgccataaagaaaatggatacaaaggcatctcaagaattcctcaatgaattgaagattttgacacgcgtccatcacacaaatctggtgcgcttaattggttattgtgttgagagttgcttatttcttgtttatgaatttattgagaacggaaacctaagccagcatctgcatgggacgggttatgaacctctctcatggaccagtagagtgcaaattgcccttgattcagcaaggggtctagagtatatacatgagcacactgttccagtgtatgtgcatcgagatatcaagtctgcaaatatcctgatagacagagacttacgagcaaaggttgcagattttggactgacaaaactttcagaaattggaactacatcacagtcactcccatcactacgagttgttggtacatttggttacatgcctccagagtatgctcgatatggtgaggtttctcctaaggtggatgtctacgcttttggtatagtcctgtatgaacttctttctgccaaagaagctattgtgagactctcagcatgccaaaccccatggaagctcttcaggaaatgattgatccaaggctaggaggtgactaccccattgactcggctgtgaagattgcgtaccttgcaaagtcatgcacgcatgaagagcccaggatgaggcctaccatgagatctgtagtggtttctctcatggcgctttcatccaaggaccatgagttaactcggggacacgattagcatagcacattgtccctggggctgctttccatgtcagatgaaaacaatacaaaagctatcgtgtacagatgcaatgtattttcgttctgattttgtagcgctt

SEQ ID NO: 621 - DNA, 1261 bp, Zea mays
  Clone ID: 700084742_FLI
cttcctctagtcctcagcgtgcagcgggcgccgccgtcgccggcgtgctgctggtggcggctgccgccctgtgctcgtgcggcgccatggcgcagctgaccgcggactactacgactgcacatgccctgacgcctacaacatcgtgaagcaggtcctgatcgaggcgcacaagtccgacgtgcgcatctacgccagcctcacccgcctccacttccacgactgcttcgtccagggctgcgatggctcggtgctcctggacgccgttccgggggtggccaactccactgagaagctggcgccggccaacaacaactcggcgcgggggttcccggtggtggacaaagtgaaggcggcgctggaggacgcctgccccggcgtcgtctcctgcgccgacatcctcgccctcgccgcagagatctcggtcgagctgtccggaggaccaaagtgggcagtgcttcttgggaggctagacagcaagaaggccgacttcaagagcgcggagaacctgccgtcgccgttcgacaacctgacggtgctggagcagaagttcgcggccgtgggcctccacaccgtggacctggtggccctctcgggggctcacacgttcgggcgggtccagtgccagttcgtcacggggcggctgtacaacttcagcggcacgaaccggccggaccccacgctcaactccggctaccgggcgttcctggcccagaggtgcccccagaacggcagcccctcggccctcaactacctggaccccacgacgccgaacctgttcgacaaccactactacaccaacctggaggtgaaccggggcttcctcggctcggaccaggagctcaagtcggcgccgcaggcgcagggcgtcaccgcgcccgtcgtcgaccagttcgccaccagccaggccgccttcttcagcagcttcgcgcagtccatgatcaacatgggcaacatccagccgctcaccgacccggccaagggagaggtccgctgcgactgccgggtggctaatgatgattaatccacgacgacgacgtgtgtagttagaaacggacgtgaatgcatgtgcatgtgcccggccgggtcgttagtacaccgacaagcaagagtgcactagcgctatggatcggactatatggtgcacaactgcacatgcatgcatataatatcagggcctcgtcgtttcgaattgtttgctgtcgacttcaattaatagtttctcataaatgtgcaataaagaggaacccaatttctcctgtt

SEQ ID NO: 622 - DNA, 1152 bp, Zea mays
  Clone ID: 700084757_FLI
cgcgctcctcgaatgttgcagccactggatcactgggcaatgcagcgcggccagacgtctcttttaggtacagaggggcggagtcttgtaagaaggtagctgcaagcttgaagtcgtgtgagccatgggggaacagggcattctggacaaacgccgctgggccaggttggaagttgagctttgctgttgagccatggactaagggctttagcacgtcgtgtgcggcaccatattctgctggagccacagagcatcaattatcgatcgatgagaaggtggataactccaccgttgcatctgattctgatgggaagtcaccagtttctgaaaaattgaagtttctctctggttcatgttacttgcctcaccctgataaggaggctactggtggtgaggatgcacatttcattagcattgatgagcatgtgattggtgtagcagatggtgttggtggttgggcagatgttggtatcgatgctggactatatgccaaggagctaatgagaaattcaatgagtgcaatcaaagatgagccagaagggaccatcgatccaaccagagttttggaaaaggcttatatgagcaccaaagcaaggggatcatccactgcatgtatcatcactcttaaagatcagggtatccatgctgtaaatcttggggacagtggtttcgtagtagtccgagacggccgcactgttctcaggtcaccctcacagcagcatgatttcaacttcacttatcagcttgagagtggaggtggcagtgatcttcctagttccgcacaagtatttcacttcccggttgcccccggtgatgttattgttgctggcacggatggactttttgacaatctatacaataatgagataagtggtgttatcgttgaagcgctcagggttggacttgaacctcaagttgcggcacaaaaaaattgctgccctggctcgacaaagagccacagacaaaaataggcagtcaccatttgcatcggccgcccaagaagctgggtaccggtactacggtgggaagctcgacgacataacggttgtggtgtcgtatgtgaaaaccgcttgattcgagcctttctttttattagatgtaatgtcaaaatcttagtcccgaatttaatggcacatgtgttctcaaggtgtg

SEQ ID NO: 623 - DNA, 1050 bp, Zea mays
  Clone ID: 700084780_FLI
ggccgatccggcggaggagaacgttgtctcgccgccaccgacccctgcggccccagccgtgggcgcctcagacccgcccctgcagcctgctgctgacagcgcctcaacggagaaggtgtctgctccggcgccggaggtaaggtcccggggattcaggcttcttggagaggacacttccgtgcacaaatcccttgggggcggtaaaactgctgacgttctcttatggaaagacaagaaaacttctgctgttgtaataggcggcgcaactgtcatctgggttctgttcgaagtgcttgattaccacctcctgaccctgatatcccatgtactgattggtgtgcttgccaccttattcctgtggtccaaagcaaccaccttcatcaagaagagtccaccagatattccagtagtgcaggtatctgaggaccttgttgtgaatgtttcacgggcattacggaatgacatcaacagagcgcttcacttgttccgtgagatcgcaatggggcatgatctgaagaagtttttgggtgtgatcgtggggctgtgggttctctccggagttggaagcagctgtgacttcctcacgttgacatacattgccgtcctgatgctccacacggtgccaatcttgtacgacaagtaccaggacaaggtggaccatttcgctggaagggcacacaccgaggccctcaagcagtacaaggtgctggatgccaaggtcctgagcaaaatccccaggggtgcggtcaaatccaagaagcagaactagttaggataagccgcagattgtgaatgcccgtatcctgagtatcgggcttgtggttttgcatggcatatgtcaatctgtctgttggcttcagcttggttcttctgcgactactttgttgatgttattctagtcctatgtatgtcactgtgtacatgacagagatgttcgaatgctacgtctagactactgctgtagcttgtaaattccagtggtgcgttgctaagcacgatgctccccttgttttatgtggtgttggactaatgattactacactaaggttt

SEQ ID NO: 624 - DNA, 337 bp, Zea mays
  Clone ID: 700084793_FLI
cagggtttgcccactttgtcgtggcgatgtttgcagatctgatgcacccattggaaagaccagctgattctgtctcttgagaatggagcttcttacagaaaattggagagcttggcatggttctcatccaattccgatagaaccgccaaacttctgcagctgttattttcatttcctcctctcttatggtcagtacagcatcgcagtcatcctattatgaaactgatgacgacatgccatggtgaatttaggattcttgtgtggtggggcgagtttgttgataatggattattggcttccgtttgggcgattgatgtcgggtgcagccattctggcc

SEQ ID NO: 625 - DNA, 1548 bp, Zea mays
  Clone ID: 700084819_FLI
cgagaggaaggtggggaaggaaaccacagccgcttctggcgggcgctcaccctgccccttccacctcgcctcgcctcgcaatggaggtttccaggtggaccccggcggccggcctcctgctcctgttgctcctcccgctcgcggccaccccgtcacgcgccgccacgatggcgagatcgccgtcgtcgtccactgccgtgttccagctccagggagacgtataccccaccggccactactatgtcacgatgaacattgggaacccagcgaagccctacttcctggacgtggacactggcagcgatctcacctggctgcagtgcgacgcaccctgtcggagttgcaacaaggtgccacatcccttgtatcgaccaacggcaaaccgccttgtaccgtgtgcaaacgcactctgcactgcacttcacagcggacagggctctaataacaagtgcccttcaccaaaacaatgcgactatcagataaagtacaccgacagtgcatcttctcagggtgtgctgatcaacgacagcttctcactgcccatgagatcctccaacattcgtcctggcctcacatttggctgtggatatgaccagcaagtggggaaaaatggcgctgtgcaggcagcgattgacggcatgcttgggctcgggaggggatcagttagccttgtttcacagctcaagcagcaagggatcaccaaaaatgtcgtcggccattgcctaagcacgaatggaggggggttcctcttctttggggatgatgttgtgccttcatcacgtgtaacttgggtgccgatggctcagaggacatctgggaactactactcacctggctcaggaacactgtacttcgatagacgttcactaggcgtgaagccaatggaggtggtatttgacagtggtagcacctatacttattttactgctcaaccataccaagctgttgtttctgcgctcaaaggtggtctcagcaaatcacttaaacaggtgtcagatcccactctgcctctgtgctggaaagggcagaaagcattcaaatctgtgtttgacgtcaagaatgaattcaagtcaatgtttctgagctttgccagtgccaagaatgccgccatggagatcccacctgaaaactacctcattgtcacaaaaaatggaaatgtgtgcctgggcattcttgatggaacggctgccaagctgagtttcaacgtaattggagacatcacgatgcaggatcagatggtgatctatgacaacgagaaatcgcagctgggatgggcgcgtggggcatgcactaggagcgccaagtctattctgtcttcctttccctgagctcagttctatgtacttctgatagagtttaagaaaatcactatatcaaacctcctcgcaatgcatgaatttcctaactgaagagggagggagagagagagagagaatgttcctgtttatgtagagatggagtccaaaatttgtgtgcctgatgagttcttccccatatgatattaactgaaagtagtatatcaattgaatgtattacattttaagtttt

SEQ ID NO: 626 - DNA, 790 bp, Zea mays
  Clone ID: 700084820_FLI
caaaatggaaaggctcagaggtgatatattttggtgaccatcttttgagtgacttgagaggaccttcaaaagctggttggcgaacagctgctgtaattcgagaacttgaggatgaaatagaaatccaaaacggtgacagctaccgattccaacaggcaaaattgagtataatacatgatctacttgggaaagtccatgcagctgttgttagcaccgagaaaggccaagtctataaagcattgctcaatgagttgaatgcagaaagacgtcaatgccgatctgggatgcgagatttgttcaatacctcttttggtgcaacatttcttacagacacgggaagggaatcatcattttcctatcacattcatcaatatgccgatatttacacgagcaagcttgagaacttcttatcatatgcccctgaatcttggcttcatccacctcatgacataaagatcatgccacacaatgcgaaggtcccagcgagccttttcagtacctcctagttcatcctttctctatttcggtggagaaccaagccgtagtacccccacctatggtttctgtgcgtgaccacgtgacaggattgtggactgctgctgcattcgcttgcgttatactataactgaagcaccatatgatgcatcaatccagcagaccagcaagttagcattctctagaattgccatggaattgtcagtcatgtgagtagttaaccgactcatttgcctgtatgacgaagcctctgttttccgtttaaaataaaaaaaggaagcatctgagaggccgc

SEQ ID NO: 627 - DNA, 2509 bp, Zea mays
  Clone ID: 700084860_FLI
aaaacgagggtggtttagctagctgttcgtcccgtgtcccgttccagtcctcgcccaccaccgcacgcggacaaaaccgctctccgctcctcacgacctcgccacactcccagcccagccggccacccctcctcactcctcactcgcgcacaccacctccagtcagtccagttcccgcagtgcagcagcggccagcggctgcctaatctctccagccctttttcgtcccctagccacgccgcccaccgctgccgcgtcatccgcccgtcgtcgcctgccccgcggcttccgcccccattcgccgccgaagcacgccgagccccgtcccagatcgccggccgcgcttcctgccgccgccggcgcggcgcagggttggaaatctgattgaccactcagtgagtggcttcatgttaaatccatttctggtttcaagatgcttcaccaatgacatctggaaactgtaatagtatgtgctgatcttctatgcttcaccacctgatcatcaatgggctctttcctgtggaaacagcccagctacctcttcattttgataattctgcaccttgttgctcatgaggcaagaacactgagttcagacggcgaagcacttcttgccttcaaaaaggcagttacaaattcagatggagtcttcctaaattggcatgagcaagatgcagacccctgcaattggaagggtgttagatgtgatagtcatagcaagagagtgattaatctgattcttgcataccacagattagttgggcccataccaccagaaattggaaggttaaatcagttgcaaaccttgtcattgcaggggaacagtttgtatggttcactccctcctgaactggggaattgtaccaagttgcaacaactgtatctacaaggaaattacttaagtggatacatcccttcagaattcggcgaactggtggaactcgtggcattggacttatccagtaatacattgagtggatctgttccacattctcttgataagttgtccaaacttacatcattcaatgtttccatgaacttcctgacaggagcaataccatcttctggttcacttgtcaatttcaatgagacatcctttgttgggaaccttggtttatgtgggaagcagataaactcggtgtgcaaagatgcacttcaatcaccatcaaatggtctgcagtcaccttccccagacgacatgattaacaaaaggaacgggaagaattctaccagacttgttataagtgcagtggcaacagtgggagctctcctattggtggctttaatgtgtttctggggttgctttctttacaaaaattttggaaagaaagatatgcgtggtttcagagttgagctctgtggaggctcttctgttgtgatgttccatggagacctcccttactcctcaaaagacatactcaagaagctagagactatggatgaagaaaatatcattggagcaggaggcttcggaactgtttataaacttgcaatggatgatggcaatgtctttgctttgaaaagaatagtgaaaacaaatgaagggctagatcggttctttgatagagaacttgagatattgggaagtgttaaacatcgctatttggtcaatcttcgtggttattgcaactctccttcatcaaaacttttgatatatgattatcttcaaggtggaagcctggatgaagtgcttcatgaaaagtctgaacagttggattgggatgcacgtattaacatcatacttggagctgcaaaaggcttgtcttacttgcatcacgattgttcgcctcgaataatacatcgtgatatcaagtcgagcaacatcttgcttgacggcagttttgaggcccgtgtatcagactttggacttgcgaagcttttagaggacgaagaatcacatatcaccacaatagttgcaggaacatttggttatcttgcgccagagtatatgcagtttggcagagccaccgagaagaccgatgtctacagttttggggttctggtacttgaaatactcagcggaaagcggcctaccgatgcatccttcattgagaagggattaaacattgttggatggttaaattttctggctggagagaaccgggagagggaaatcgtcgatctgaattgtgaaggagtgcacaccgagaccttggacgccctgctctctctcgccaagcagtgtgtcagctctttgccggaggagcggccgacgatgcacagggtggtacagatgctggagtcggatgtaattacgccgtgccctagcgacttctacgattcagagtagcctcctggacggacaagccacagtggtgccgctagtttcccgtggaggcgcattcctttattctttgcagatattgtgtaaatgcattgccgcggtgtttgtttggtctcctccaatcggctggttcaacgggtgacatttttgcgtctgtgtttatctgtcatgctacaggttggctatatgctgatttaataagagagaacttaccagtgtgtgttt

SEQ ID NO: 628 - DNA, 1383 bp, Zea mays
  Clone ID: 700084995_FLI
ccaggcaaaaaaatatggttctttgcaagttgtctgtcaatactaccagttacagtgtcctgctaggggttcaacacttgcttttcatcccttggagcatttgcattctttgagttttcaccggcctggtgaaacagttcttcacattgctggttctactattgagcttaggtcacgtgatacaagcttagaggttgctgagatgcgcaatgcactctttgctgaggaggaatcgactgctttgtccacatgggcagtggcatccatttgtggatgcctcaggttggaacatgtaatgacactttttgctgccgcactcctggagaaacagattgttattgtctgttctaatctgggaatgttatcggcttcagttttgtccatcttacctctaatacgaccgtatcagtggcagagtctcctcatgacggttttgcctaatgacatgatggattttctggatgccccagttccatacatagtgggcgtacaaaacaagacatctgatgtgctcaaccggctaacaaatgccgtagtcattgatgccaacaggaatcagattaagtcctcttcagtcccacaactaccacagcacagagagttgctttctgccttgcgcccgtatcattcaatacttgttggcgaaagttatcttgcaagaaaacgccctgtttatgaatgcacagatgcccaggtggaaggggctaaaggtttcttggcagtgcttagagactaccttgacacactatgctcgaacttgagatctcatacaattaccaatgtgcaatctaacaatgacaaggtttccttacttttaaaagagagctttattggttctttcccaagccgggataggccttttatgaagctttttgtggacacccagttgttctcagtacatacagacctagttctctctttttatcagaaggactaagtgtctggcagacttgaatgtctgcctcgtcttgccaagcctttagatgttgagctaaactgtacatatcggcagctcagtgtttgtgcaaagagctcgaaggagaagccatataccgtcagaaaaaagtggtagattgccaggatccagttatgggtattgaagaagaatgcttgtagctgcttaagttagtctggtgcggtaatccaaggttttgttggctgtagttggtgcccccataagaagccttgtatggattgttcctgcaaatgcctgtgctgtaacggaaccgtgtctgtggcaaaatctccgaacatgaatgcgtccatttggcaaatctaagcgtgcaatgggacatcgaagaaaatgtaataattcgtggtactccctccaggccgaatcagttgacgctatggtatttaataacggtcgagctttcttatttt

SEQ ID NO: 629 - DNA, 691 bp, Zea mays
  Clone ID: 700085002_FLI
tgtttttcgcagcaatagctcctcgtctgcaaccacgatactactcaatttcatcatctccaaagatggctccctccagaattcgtgtaacatgtgcattagtttttgggccttcaccaacaggaaggatccaccaaggagtttgttcaacatggatgaagaatacaattcctctggaacatagcgaagaatgcagctgagctcccatatttgtgaggcagtcaaatttcaagttacctgctgacccatccactccgattatcatgattggtcctgggacagggctggctccttttagaggtttcttgcaggaaaggttagcactgaaacaatctggagcagaactgggcacttcaatccttttctttggatgcaggaaccgtaatatggactacatatatgaagatgagctgcaaactttccttgaggcgggggcgctttctgagctaattgctgcattctctcaagaagggccaacgaaagaatatgtgcagcataagatggtggagaaggtcagcataaaattgtgtatccctaacaagtttgtagcaaagggggtacataattacagtttgagatgaggacatcatttatactgtttgagacgaggacattatgtatatacttggtacattagaaggccaccgaaaacaaattttgcatctggtttttgaaagcatgtaatccttcc

SEQ ID NO: 630 - DNA, 1248 bp, Zea mays
  Clone ID: 700085008_FLI
catcatgattctgagtctgatgcagatattgactataggaagaagaaaatagaacatacagagggtattcgtgatgagagaaagaagataccagcgagaagctctcgccatgattctgactctggtgcagataataatgggaaaaacaagagaccagtgcaaagctcttgtcatgatttggaggatgagaagcctagattgagaaattataattatggctctcgggcttccgagcatgagaaacatagtaagtacaaggaaagctttcgccatgactcagattcagatggttattcccgtggtaaggaaagacaattgaatgttgcagtgttgaaaaaggatgtgcaagagaaaagaaaagtagctacctcaagtgatagttcagattacagcagcagcctcagcagtagtgataatgacacgagtgcagatagctatgaggaacagaaaaggagtcaagctggagggagaagaaatgagctgaatacacaaaggcagaaagaggaggaaagaaaagagcttgaaaagcaacagaagagagaggtagagaagaaagagctggataagcaaaagcaaagggaggaagagaggatggagatggagaaggagaagaaaaggcaacgagagagggaggaagagagacagagggagagagagcaatacgaaaggaaaggtggaaatgatgtggagagagacaacaaaaggaaactgatagatgatcggtatgatccaaattcaagtagagatagagaagagggatacagagactctcagaacagagatgacaatagaaggcaggaagagcatggtcaacacaatagatatatggatagtcatgattccaagaggtcaaggcatgactcgcattaccattcaaggagggattatgaacaacgctattctagagacgaacatagagacagaaggcgtcactaaatgttggaagaatgccgttctaggtggacaacttattctcagctatcacccataagttccagtcccagatcttttctacggcagcaagaccaacccatcagtacctccgctgcagcattaatctctgcttttgtttgtatcatactttgggttttattacgcaaagagagaagtctgcaatatgtaatatgttgtggcacagacatgaatggcaggattttttttctttgttggaatttgtggtgcgcatgttgctgatcataattatgataagttttcttaagcttatatttgatgagctccaggtttttc

SEQ ID NO: 631 - DNA, 1330 bp, Zea mays
  Clone ID: 700085012_FLI
aaagcaggcttctggtgtttcagaaattgatgtggctgaacacaagatagaagaaacaagcctggttggtgttgcccgcaaagcccctaagggagttgactccccagttgcgattctggctaatcctacgataccaaaacgaagcctggaaggtctggatcggatggaatttgcaaggattgtggcagaaaggcagacagcaaaggaagaattatctgtgacagatgtgaagctgcgtaccatgtttcgtgtctgaagcttgccatcgatgaagaggccccagcaaaatggtactgtcccagctgcgttgagccagacgtagctttgaagcataaaaaccatggcaggtcacatgaaggctgtgatgtatgcgagtggctcgtggtgaagccagaagagcctgctgaagatgttagcgagcctgaactggcggtcaaaacgcaggagagctcagtgtcaagcatgggcgaagacagcgaaccagacctctcaacgactgctctagcgaacttgtgcaagaactgtggcacatgcgaagacgaggacaggaagttcatggtatgcgggcatggtttatgttctttcaagttctaccatgtcctgtgcctgaaagagagacagattgcaagcgagaagcagaagaatctaaagtgctggtactgcccgtcttgcctgtgcagacggtgcttcaaggacaaggatgatgagaaaatagtactgtgcgatggctgcgacgaggcttatcacatctactgcatggacccgccgtgcgagtctgtcccgagaggtaaatggttctgcacgcggtgtagcgcgcggaggtcagtgcaagggatgcagaggtatgagaagtcgatcctggagaaagtcaagcgtgctcctggtgccaatgggccgaaggtgcaggcatctgctggtccagaaaaataggcagcagtgtggatgatgtttcacaggccatactagggtagaagaaagggaaggatacttttgttcctctgagggagggggtatacattgctctggtagctttgaagaatcgatggatgggttgtgtatacgtggggggaaggaagatgccccgttggctgctgatgttgattcactgtgctgccatttcgtttttggaattcttgagtgtcgctcggcttgttgttgtgctgttatgttgtgtctgatggtaagtggcatcgcttatcgatgatatgtacatgcctgtaactcgttttcttttatttgttggacattgtgtgtgtgtgtgtgtgtgtttgaattgtgatgacctagagaacgctggtgtcaatcaatgcagcgtaccttgtttgcgcct

SEQ ID NO: 632 - DNA, 2871 bp, Zea mays
  Clone ID: 700085021_FLI
tgatctaaaagagaaacaaaggacacataataagacacttgttctagtcaaaagttattgggagcgactcatagcagatctgggtatagtttctgtttgcaaaaatgaatcttcacgttcaagctgcagtacagggaacaacaatatacgaaaggactttttaaatggacttttggaggctggtgccacagaaagttcaggttctcccaattgccaactaggaaatgacgtctcttcagaacaatcaacaacaattgatattctgcagaagctattccttccatcaagtggtccatggcatgtgaataacgagtttgtttctgctgctctcatgaagttgccagaaaatgaacacagcaggcaattgcacaatgctaccagcgatgtgttatccaagcttcatgtggtgatgcgtacagtagataatcttcacttgaaacacaggcagttagcagcgaactatcaaaaacaaagagattcgagtgcctggaacagagctgaacagaaacgtctgaaagaggagttgactagtgttgttgccaagttggaaggaagcaaacaaaaactggcagtactgaaagcacagggagacaataaacaagcaacaccgatcctggttcctacgctgggaaacaaaaatatgactgcagaaaaggtgagagataaacaaacagaactgcaagatcttgaagctactcacaaggagttaatggaattgatttcaaagcgtctggaggaaattagaaggctgcatacagagagaattgaaattttgaacaagttagcaacttttcagaatatactaacggatttcaaaagcattcactcttccaaagcttttcaacttgtcaatgaccaacttcagaagtcacaagcagaactggatgatcaccaaacgttgttagagaaattacaggttgagatggatacctttgtttggcgagaaaggcaatttaatcaaaaagttgatttggctgaaatcccccagaaggtttctgcatactgtgtgtctagaattgctgaccttgaaaaggatgtccagaaactgtgtaatgaaaagaatatgcttgtgctgaaacttgaagaggcttcgagagaacctggtcggaaccaggttatctcagagtttaaagctctggtgtcatcactaccgagggaaatgggtgccgtgcaaagtgaactgtccaaacacaaggatgcttccttacagttgcattctttgcgagcagaagttcattcactttctagtatccaaaccagaaaggaacaagaaattgaagaaatgtcatttagatctgcccatgctggatctgatataagccaacttcaatctctggtccgtgagctgagggaaaatacacaggagcttaagctatttgtggagttgtataagcatgagtccactgattccagacagctgatggaatcgagagatagggaactcgctgaatgggctcgagttcacattctcaaatattctcttagtgaaagtaaattagagcaacgtgtaatttcagccaatgaagctgaagcaatctctcagcagaggttggcaactgctgaagctgagattgctgaattagggcagaagctagaaacttctaggagagatctagtgaaacaatctgatatactgaagtctaaacatgaagaatgtgaagcgtatgttgtggagatcgagagcattggccatgcctatgaagatataatgtcacaaaatcaacaattgctacagcagattattgaaagagatgatcataataccaagcttttcatggagggtgttaaatcaaaacagtcacacgatgctttgcatttggaggtgcgctcgttgcaaagaaatttgcagcatgcaagtactttgatggatttgtgcaaccagaaaactatccgcctagaggaccagctaagaggttggtcagagcggttgaggagactgtcagaggatggaatgcagcagtctatttcattgggcaattatcaaaaaaagctgtctggtatgcatggagaagctccaaagctcaggcagtcaatggatgttctacaagcgaaggctgggagcaatcggctggaaattgctgagctgcttatagaactagagaatgagaggtttggtaaaaagagactagaggatgatcttgatctaatgtcaagtaaagctaattctctaagagagaagacagataattcagcagttcttcagaaacttctccatgaggccaaggagtacaggggaatattgaagtgtggtatttgtcatgataggcagaaagaggttgtgattgccaaatgctaccatctcttctgcagtcagtgcatacagaagccacttgggagccgtcagaagaggtgtccatcttgtggactaagcttcggtgttaatgatgtgaaacctatctacatatgaaacagaaggttggcgcctgtgtcgcagcaccaaaacaaaactgcttggcgcttactaatttccggtatatggtaggcggccatggtaattcagtcggtgatgtagcataagattatgtagcatttaagttgctacatgtgattgctggtacccgctggcatatatgatgctggtgttacctcaagcgccttttgtaaagtctgcttgccttgcccaatctggtagaatagcctgacatcgtcaaccattagttccttttaggagaaaaaaatatccaacaaatgaggattgatgcttcctgcaatagtgagcaatgtacaatatatagctttagtcagtttcattgttgtagctgacagtaagaatgtagttttcttttctttttaatataccggttatccagtttgtatgtttctggagtttgccaattctgtttatcaaaaaaaggagatttagtcatttct

SEQ ID NO: 633 - DNA, 486 bp, Zea mays
  Clone ID: 700085033_FLI
ttttgcagaaggattttgcttggcatcaaggaacagtgcaaactagaagaaacctccgtcatcagcgacctctccccaacggcgccgacgatggcgcaacagcagacgcagctaaccactggctcgggcatcctggatgccgtcccgctcttcgtcgtcatcctcctcgcggcccacgtcctggccctcgtgttctggatgtacaagctggcttccgagaagcaaccaccccggaggaagacacagtgacggcgccgatctacgccatcggcgatccttcgctagcctctttatcggttccattttcatgtgaaccagtaccctccagaacattcaggccgtcaattattcagagatatccatatagtctttcaatttgttttatttatacttattgcattttgggtattgtttgataacaacttagcgatattctatgaatcactatccgtttgggtgataaataaatgttcctagttttagacc

SEQ ID NO: 634 - DNA, 764 bp, Zea mays
  Clone ID: 700085075_FLI
ctcccggtccttaaatttttttggaaatttttacccggattaacaatttcacccccgggaaccggctattgccctttgtttcgccaaagtcctaattcgactcccttattggggaaattggtacccctcaggtacccgtcccgaattccccgttcgacccaagggtccgtttctaaacccgcccggaagaacttgagaagttcagcacaagaaaaagagactcgtccagtcgcccaactccttcttcatggatgttaagtgccaggggtgcttcagagtcaatgtcgttggagaaccatcttgcctcgggctgcggcggagggaagatggttctccagaacgacattgatctgctcaacccgccggcagaactcgagaagctcaagcacaagaaaaagagactcgtccagtcgcccaactccttcttcatggatgttaagtgccaggggtgcttcagcataaccactgttttcagccactcccagactgttgttgtgtgccctggctgccaaactgtcctctgccaacccacaggaggaaaggcaaggctcactgagggctgctctttccgcaggaagggagactagagcggatgtggtcttcaagttttgctctatgccagatactagcgtcatgaactgcctttagctaagattttccataagttgttctcgagcagctatgtgttgcatgttggctacttccaaacttatatctggtttggtttggattgtgatgaactaatggctctttgaatttatatt

SEQ ID NO: 635 - DNA, 783 bp, Zea mays
  Clone ID: 700085079_FLI
cacatgggtcagcaaagaatttgccgccttcatgcacttcgacgttacctccaggaacgtgctttttcccccagaacgaggtgaaacagatacagacacctctgttcatcctcaacgcagcatacgattcatggcaggtaaggaacattttggtgccaggagtagctgaccctcatggaaaatggcatagctgtaagcatgacatagaccagtgctctgcatcgcagctacgggtattgcagggattcagaggtgattttctgaaggaagtggcaggactagggaactccgactcgagagggttgttcataaactcatgcttcgtgcactgccagtctgagatacaggagctatggttctcatctgactcccccgtgctcggaaacacaacagtagcaaacgctgttggcgactggttcttcgaccgcagctccttccagaagatagactgcccatacccttgtgactcgacctgtcacaatcggatctacgatgactcatcacaagcatagcaattacagtggcctcacttcgtactgccattcaccatgttattacatttgacgcttccagcattgctaacagtagggcaatgcgttgatagccattgatttttttttctttttacgaataagatcaggtgccggcggctttaactcggttgctaccggaaagtgagcgtgcatcttccgacggtacatggcatggtttatctggatggatgaatcgataatcataaattcttaaaaacacaataaatattctagaatttttatgttgtgc

SEQ ID NO: 636 - DNA, 1612 bp, Zea mays
  Clone ID: 700085094_FLI
gtttggtgtcggtttctactcggcataccttgttgctgagagggttgtcgtgaccaccaagcacaacgatgatgagcagtatgtatgggagtctcaggccggtggctccttcactgtcacacgtgatacctctggggagcaacttggcaggggtacaaagatgaccctttacctcaaggatgatcagttagagtatcttgaggagcgccggctgaaggatctgatcaagaagcactcagagttcatcagctacccaatctctctctggatcgagaagaccactgagaaggaaatatctgatgatgaggacgaggaagataagaaggacgaggagggcaaggttgaggatgttgatgagaaggaagaaaaggaaaagaagaagaagaagatcaaggaggtttctcatgagtggcaattggttaacaagcagaagcctatctggatgagaaagcctgaggagattaccaaagaagagtatgctgctttctacaagagcttgaccaacgactgggaggagcatctcgccgttaagcacttctctgttgagggtcagcttgagttcaaggctgtcctgtttgtgccgaagagggccccctttgacctcttcgacaccaggaagaaactgaacaacatcaagctctatgtgcgccgtgtcttcatcatggacaactgtgaggagctgatcccagagtggctgagctttgtcaagggcattgttgactctgaggaccttcccctcaacatctcccgtgagaccctccagcagaacaagatcctcaaggtcatccggaagaacctggtgaagaagtgcattgagctgttctttgagattgctgagaacaaggaggactacaacaagttctatgaggccttctcgaagaacctgaagcttggcatccacgaggactccacgaacaggaacaagattgcggagctgctgaggtatcactccaccaagagcggagatgagctgacaagcctcaaggactatgtgactaggatgaaggagggccagaatgacatctactacatcactggcgagagcaagaaggccgtggagaactcccccttccttgagaagctgaagaagaagggctatgaagtcctgtacatggtggacgccatcgacgagtatgctattggccagctcaaggagttcgagggcaagaagctcgtctcggccaccaaggagggcctgaagctcgatgagagtgaggatgagaagaagcggaaggaggagcttaaggagaagttcgagggcctgtgcaaggtgatcaaggaggtgctgggcgacaaggtggagaaggttgtggtctctgaccgcgtggtggactccccctgctgcctggtgacgggcgagtacggctggacggccaacatggagaggatcatgaaggcacaggcgctcagggactcgagcatgtctgggtacatgtcctccaagaagaccatggagatcaacccggacaacgccatcatggaggagctgcgcaagcgcgcggaggccgacaagaacgacaagtctgtcaaggaccttgtcatgcttctgttcgagacggcgctgctcacctcgggcttcagccttgacgaccccaacaccttcggcggccgc

SEQ ID NO: 637 - DNA, 839 bp, Zea mays
  Clone ID: 700085101_FLI
caagcagcgagcgctctcttaacgagtcagagagccggcaagtcaggagctgcaccaaggtaatcatgcaaggaatggcggttggcagggcagtggacttgacaaggttagatgggtatgctgatctccaccgcaagttggaggagatgtttgatatccagggagagctttctgccaacctcaagaaatggaaggtcatttacacagatgacgaggatgatacgatgctggtcggggacgatccatggaatgaattcctcaggatggtaaaaaggatatacatttactcttacgaggaggccaagtctttgactcgcaaggcgaagccgccggttgttggtgacaccatcaagccagacccaaacaaattgccaccggaatctgacgtgccacatgactcaaacaacaatgctcccgttgctgctgattatcaggactgatggatgctaacttggctcctaccttttctttcccctcttggatgtcggtcatgggaggcaatgcacgctccttgggacttgtaagagttatctgttttgttgcttcgcgggcccaaaggacgcttccctgcaccatctgcctttgtttggaacggcttggaccgccgtggtccttttacctgcagcaaggaaaggaatggctgggagggaatggatactggtatcgttccgtgtgtggcaccccgtgatctgtttgccgtgctttgtaggaggcatggcgtattgccgggtactttggttttggagactgctactgactgctgccgtcgtcgggccgctcctctcacctctggtaaataggactttgtacacaattattttgttagtagcagtatatgt

SEQ ID NO: 638 - DNA, 1461 bp, Zea mays
  Clone ID: 700085123_FLI
ctagctttggaatatttgcactctatgcacatagtccatagggatctaaagcctgacaacttgttgatagcccatgatggacatattaagttgacagattttgggttgtccaaggttggtttgatcaacagcacagatctgtctggtcctgctgttagtggggcttcactgtatggagatgatgagcctcagatgaatgagctcgaacaaatggatcaccgagcacggagacaaaatcgttctgctgttggaactcctgattatttagcaccagaaatccttttggggacaggacatggttgcagtgcagattggtggtctgttggtgtcattctgtttgagctcattgttggcatacctccattcaatgcagaacaccccgaggcaatttttgaaaatattatgaatcgcaaaataccttggccacatgtcccagaagagatgagttttgatgcacaagatttaattgacagattattgacagaagatcctcatcaacgactaggagcaaatggtgcctcagaggttaaacaacatccatttttcaaagacattagctgggatacccttgctaggcagaaggctgcctttgttccttcctccgatagtgcatttgatactagctacttcaccagtcgctattcttggaatcaatcagatgaaaacatatatgaagcatatgagttagaggactccagtgataatggaagccttagtggaagcagtagttgtgtgagtaaccaagatgacatgggggaggacagcactggcctcaatgagtttgaatctagtgcaaatgtcaattattctttcagcaacttctcgttcaagaatctatcacaacttgcttccatcaactacgatctgctcaccaaaggattgaaggatgatccaccgccaagaacagaaatgtagcagttaatctaaatttggatggactcatttgagtactcagacagtctacaaggtgctcgtgggatgtaggtcttgtacatatcaaagtgtgaggcatggtctgttcctattgaggctgttcctacatctcgcggatccgagtacagttttggtgttgccttgttttcatgactattgccatgccatcatcagtgaaatcacccttgaccaaatttggcattcgacctaggagcgctgtctttttggttcgtctttcctttttttttttagtcctattatgagccttgggtttacggagattggtcaaggttactgtattcagaatacagctcctgaagacgtaggcgggtttcagagaattgccattctggcatacagttgactctggttcgttaagctggtagcccgctggacttcctgcggccagaactgtccacaacattttgatggccgtggaatataacattttgcttaatgtgtccagtgtccaacagaatcagggacattttaagaagaatattaaccgattgacattataaggatatc

SEQ ID NO: 639 - DNA, 766 bp, Zea mays
  Clone ID: 700085160_FLI
gctcgattcgctgttttctgccagagcacaccgtggacgccgtccccgctcaagtgaggttcggagctcagagccttgcgatctctcggctgcgcgcgcgcaagatggctgacccagaattggaagctatcaggaagagaaggatggaagaactaatggcaaaacacggtggcggtggggcaaatcaacaaaatgcaagccaacaaaaagctcaggaagacgcgaaacaggaagctgaggaacgccgacagatgatgcttgctcagatattatcttctgaagccagagaaaggatctcccgcatagctttggtcaaacctgacaaagcaagaggggtggaggatgttctgctgagagctgctcaaactggtggaatatctgaaaaggtgtccgaagaaagacttatctcccttctagagcaaattaacacccacacaagcaagcaaaccaaagttacgattcagaggcgtcgaagtgtccttgacgacgacgattagacgcgacctgcaagctttgcctctgagtgtgtgatgatgggctggtgattgattgattataagcggtaccgaacttgtttgcttaaagacaatgatctgatgcgactgcaaacagccatcaaaacttggttgtatatgatccgatgtcttgttggtgtaccccccgttgaggacagtcgatgtattggctgtgattatccctgaaacactgttcttccttgagttatagtatttattaatgggtgttcgatctccacgccggccctgtc

SEQ ID NO: 640 - DNA, 2027 bp, Zea mays
  Clone ID: 700085188_FLI
gaccttgactgcttcagatacaagtacccatggtggattctctgtcctcaggaggcatgctgaagaatgtttgccccaactggacatgactcagaatccaccgtggcaagaactagtggctaaagatctccatggaaatgaatggcatttccgtcacatctttcgagggcaaccaaggaggcatctacttacgacaggctggagtgtttttgttagctcaaaaagattggttgcgggtgacgcgtttatcttcttgagaggtgagaacggagagctgcgagtcggggtaaggaggctcatgagacaactaaataacatgccgtcttcggttatctcaagccacagcatgcatcttggagtcctagcaactgcatctcatgccatctccactggaactctcttttctgttttctacaaacccagaacaagtagatctgaatttgtcgttagtgtaaacaagtacctcgaagctaagaatcacaagatgtctgttggtatgaggtttaaaatgagatttgagggtgatgaatcccctgaaagaagattcagtgggacaattattggtatgggatgcatgccagctaactccacatctccatgggctaactctgaatggagatcattgaaggtccaatgggacgagccttctgctattctgcgtccagatagagtttcaccatgggaagtagaaccccttgatcgaactaatccacagccacctcaacctcctttacggaataagcgagcacggcctcctgcttcaccttcgattgctccagaacttgctccagtttttggtttttggaagtccccagctgagcctgcccaagctttctcattctcaggactgcagcgaactcaggagctataccattcaagccccagttcaatgttctcatcgtcgttgaatgtgggattcaatccaaagtacgagggtcccactccaaacaccaaccatttgtactggacaatgagagagacaagaactgaatcctactccgctagcatcaacaaagctccaactgaaaagaagcaagaatccactacttctggctgcagattgttcggtatcgagataggttcttctgcagtgtcacccgtggttactgttgctagcgtcgggcatgatcctccgccacctgctctctcagtagacgctgaatcagaccagctgtcacagccgtcccatgccaacaaagcaatggatgccccagcggcaagcagcgatcgctctcctaacgagacagagagccggcaagccaggagctgcaccaaggtaatcatgcaaggggtggcggttggcagggcggtggacttgacgaggctagatgggtacgatgacctccgccgcaagttggaggagatgttcgatatcccgggagagctttgcgccagcatcaagaaatggaaggtgatctacacagatgacgaggacgatatgatgctggtcggggacgatccatggagtgaattttgcaggatggtaaaaaggatatacatttattcctacgaggaggccaagtctttgactcccaaggcgaagctgccggccatcggtggtgacaccggcgtcaagccggacccaagcaaactgccaccagaatctgacgtgccacagagcgactccgacaacagtgctcccgttgctgctgataaggactgatggacgctagctcggccgtaccttctctttggatgttggccatgggaggcaagtgcagtgcccatgctccttgagactgctaagagttgatcatctggttccatctgcctaggcttggaccagcgaggatggccgggagggagtgcatgccgttccgtgcgtgtttcgtttgccgtgtttggtaggagcccatggcttgttgccggctacttgggttctgtagactgttacactgactgctgccgtctcacctggccgccccctctcacctctctagtaatatatactagggcttatgtacacagctgttttggtagtggcatatgtatatcgtcggtcatgttgcttgcgacatttagcatcc

SEQ ID NO: 641 - DNA, 1062 bp, Zea mays
  Clone ID: 700085254_FLI
aattttcacgaggaaaatctcttttgcgtttttgtttctcgaggttggagcgccgctcgagattgtcggtcggctttctgccctcgctgatgacgtcgaaacgaattcagacggcagacaagaagaacaaccagcagacccagagctcgatcagttcatggagatctactgtcacatgttggtaaggtacagacaggagctcacaaggccaatccaggaagcggacgaattcttcaaaagcatggaggcccagatcgactcattttcattagatgacaatggctatgaagaaggaggcggttcctccgacgaagatgagcaagaaaccgtcgacttgggcggccttccggtccctgagaccggcagcccgtccggagagggcaaggagctgaagaaccacctcctgaacaagtacagcggctacctgagcagcctctggagggagctctcgaggaagaagaagaaaggcaagctgccgagggacgcccgccagaagctcctccactggtggcagctgcactacagatggccctatccctcggagctggagaaggcggcgctggcggagtcgacggggctcgacgcgaagcagatcaacaactggttcatcaaccagcggaagcgccactggaagccggcgccgccgacgatggcgctaggcacaccagattacaggatgggccagcacggcggcggtgcttctagcagctcggcctccgctggtctccgcgtgcaggggcagtacttcaccggcggaagctcgtatccccgtggcccgtgacgatgcatgcgtcgcctgcaggctgagcgcgtgaggtgtcgacatggattgttgccgtgcatgcatgcatatcagcatacgtatacatacatacgtgatcattatttgggtatagatggtgtggacgtgtcgtgtttcctatacagaaatttgattgtctccttacttgcattgctcatacgcatacatatctacatatatgcagctgatgccagagttataaagttgtaactatatattattattatttgtcttactaacatgagagcagttgtacacgt

SEQ ID NO: 642 - DNA, 1143 bp, Zea mays
  Clone ID: 700085256_FLI
gtgaccctcttcactcgcttcaccctgttcatcactcgcttgtacaagaagtcacgcaccaaacgggcaagggcaaacaccaccaaagaaggcgagaacgcactccgtccctctcctccaggaccgcccgctcttatcccgtttctcccttctctgggctcggagaatcggagatggcgtccagcgcctctcggttcatcaagtgcgtcacggtcggcgacggtgccgtgggcaagacatgtatgctcatctgctacaccagcaacaagttccccactgattacatacccacggtgttcgacaatttcagtgcaaatgtcgttgtggatggcaccacggtgaatttgggcctgtgggataccgcagggcaggaagattacaaccgactgaggcctctaagctaccgtggtgcagatgttttcgtgcttgcattctcacttgtgagtcgagctagctatgagaatatcatgaagaagtggataccggagcttcagcattatgcacgtggggtgcctgttgtgttggtaggcacaaaatttgatcttcgtgaagacaagcactacttgatggaccatcctgggttggtgcctgttaccacagcacaaggggaggaacttcgtagacaaattggtgctatgtattacatcgaatgcagttcgaagacacagcagaatgtcaaagctgtgttcgatgctgccatcaaggttgtaatccagcctccaactaaactaagagaaaagaagaaaaagaaatcacgcaagggatgttcgatggtgaacatcttatctggaagaaaaatgctatgcttcaagtcctgaatgatcgaagggggtcttacctgaactaataccatgagtgtgaccccaagttcgcgaagcttgaaatcttgatgcgctcgttgcgcatgtatatttgcacctttggttattaatcactagaggtagatgattgaaactaatctgcttaaccaatgtgcactgctgggcgctggcgtggttagctatatcagttaggcagttcgacagaggtcaaagagattgagattttgttctttcttggcaatgtcacagcttttgtgaatctggtctcatcatactgtccgctagtttatccaatgattccatggtggaatcaatccatagc

SEQ ID NO: 643 - DNA, 1160 bp, Zea mays
  Clone ID: 700085383_FLI
gaggaaggaagctgagaactgtgactgcttgcaaggattccaagtatgccactcccttggtggtggtactggatctggtatgggtacgctgttgatctcaaagatcagggaagagtaccctgaccgcatgatgcttacattctcagttttcccctcaccgaaagtatctgataccgtggttgagccatacaatgccactctttctgtccaccagttggtcgagaatgctgatgagtgcatggttctcgataacgaagccctctatgacatctgcttcaggactcttaagctgaccacccctagctttggtgatctgaaccatttgatctctgcaaccatgagtggagtcacctgctgcctaaggttccctggtcagctgaactccgacctcaggaagctggcagtgaacctgatccccttcccccgtctccacttcttcatggtcggcttcgcgccgctgacgtcccgtggctcccagcagtaccgggccctcacagtccccgagctcacgcagcagatgtgggatgccaagaacatgatgtgtgccgctgaccctcgccatgggcgttacctcaccgcctcggccatgttccgcgggaagatgagcaccaaggaggttgacgagcagatgatcaacgtccagaacaagaactcgtcctacttcgtggagtggatccccaacaacgtcaagtccagcgtgtgcgacatcccgcccaggggcctgtccatggcgtccaccttcatcggcaactcgacctccatccaggagatgttccggagggtgagcgagcagttcactgccatgttcaggaggaaggctttcttgcactggtacacgggcgagggcatggacgagatggagttcaccgaggccgagagcaacatgaacgacctcgtgtcggagtaccagcagtaccaggacgcgactgccgacgaggaggagtacgaggacgaggaggaggtgcaggccgatgacatgtgaggggagggctgttatcgtgtgaagccttgtggtccctagggcaagcggacctcgatgagttcggtgttccctttcgtgttgttgccatctttctactgctagcgtacccaccctcgtggcccattccgtcgctgttgacgtatgtatttttcttgtgctatggaaccttgcttttggt

SEQ ID NO: 644 - DNA, 3126 bp, Zea mays
  Clone ID: 700085405_FLI
ctcctctccctctctcgtcgtcgtgtgcctgggtcgaccagcgacctggctagctagctctccagctgcgcgcgccatggccaacccaacagctaccaagcatgctttcaagcgtattttgacgagcctgcttaagcctggcggtggtgaatacggcaagttcttcagccttccggcgctaaatgatccaaggatcgataagcttccctactctatacgtgttctcctggaatcagctatccgccattgtgataacttccaagttacagagagtgatgttgagaaaatcattgattgggagaacacatctccaaagctggctgagatacctttcaagccagcgagatgcattctaatggacaacactggagtcccagcagttgtagaccttgcagctatgcgtgatatgatgccaaagttgggatgtgatccctacaagattaatccattgattcccgtggatgctgttattgaccacgcagtgcgagtggatgtagcagggacgtatgatgcattagatagaaacgaggagctggagttccaacgcaacaaagaaaggtttgcttttcttaaatgggcatccaatgctttccacaacatgcaggttttccctcctggttcgggcactgtacaccaggtaaatcttgagtatcttgcccgagttgtcttcaacgaagatggcattctttacttcgacagcgtggttggcacagactcacacaccactatgattaatagtcttggagttgctgggtggggagtaggcggtattgaagcagtcgttgcaatgcttggccagccaatgggcatggttttgcctggtgtggttggattcaaattgagtgggaagttacgggatggtgtcactactactgacattgttcttactatgacccaaatgctaaggaagcacggtgctattggcaaattcgttgaattctatggtgttggtgtgggcgagctatctttgcccgctagggccacaattgccaacatgtctccagaatatggagctaccatgggcttcttccctgtagaccaagtagcattggactatctcaaactgacaggccgaagcgatgaaactgtatcgatgattgaagcatacctgcgggctaacaaaatgtttgtggacaagcatgagcctgagacggaacgagttttctcttcatatctggagctagaccttagtgaggtggagccttgcgtttcaggccccaaaaggcctcatgatcgtgtccctttgaaggaaatgaagtcagactggcatgcttgcctggacaacgaagttggcttcaagggctatgcggtgccaaaagaacagcaaggcaaagttgtgaaattcgacttccatggaaggccagctgaaataaagcatggcagtgttgttcttgcagcaatatgtagctccacaaacacatcaaatcccagcgtcatgattggtgctggccttgtggcaaagaaagcctgcgaattgggccttgaggtgaagccatgggtaaagacaagccttacccctggatctgtggttgctaccgagtacttgaaacatagtggccttcaagattatctgaaccagcaagggttccatgtcgctgcgcatggttgcgccacttgtgtgggcaactccggtgacctggatggatctgtatcagctgctatcacagaaaatgatatggttgctgctgcggttctgtcggccaaccgaaacttcgaggggcgtgtgaaccctctcactcgggctaactaccttgcctcgccgcctctggttgttgcctatgctcttgccggcactgttgacattgactttgagaaagagcccattggagttggaaagggtggcaatgaagttttcttgagggacatatggccttcaaaccaagagatcgatgaggttgtggagtccagcgtgcagactcacctgttcaagaaagtgtacgactccatcatggaacgtaaccctaggtggaaccagctgccggttccaaaggaggcactgtacccatgggaagacaggtccacctacatccgcaagcctacgtacctggagggcatgtccatgacgccgcctgcagccccgcccacggtgacggaggcctactgcctgctcaaccttggggacagcatcaccacggaccacatctcctactcggggaagatccccgagggcacacctgcggccaagtatctgctcgagtatggcgtggagcccaagaactttagctcctatggtggccgccgcgggaacaatgaggtggtgatgaggggagcgtttgccaatatgaggatcgtgaataagcttcttgatggcaaggctggtccctggacgatccatgttccttccggggagaagctctatgtttacgacgcggcaatgaagtacaagtcggaaggtcatgacatggtcatcattgctggctccgagtacggcagtggcagctctcgtgactctgctgccaagggaccaatgctactgggtgtcaagtcggtgattgcaaagagcttcgagcggatccaccggagcaacttggtggggatggggatcattcctctctgctttaaagcaggagaggatgccgattcactcggcctcaccggacgtgagcgctacaccatccacctccctaccagcaccgccgagctcagtccaggccaggacgtgaccgtcacgacccacgacggcagatccttcacttgcactcttcgcttggacacacagcttgaggtcacatacttcaaccatggaggcatccttccctacatggtccgcaacctggcagcacagatgaaataagttaaaaaagcaagctagcttattggtgcggtgggaataaattaaaaaggtactcagtgccccacgtatttgacgtatgtctgtaaataagtggcacattcgagcgctcttcgctctgccattgaggtggatcgaagctgccacatattttctccgcaggacatcggcacgaattttgtcttagcaaaccagttaattttgtactctttagattctttaattggttccatgctctctttggtacttttcatgtcagtttgctttgcaaacattatcagcgtgcccttgtagatttcgtaatggttatatgtatatgccctattgaaattgtc

SEQ ID NO: 645 - DNA, 2210 bp, Zea mays
  Clone ID: 700085542_FLI
gttttggaaggctttccttcctgtggtctacaacatatttaatcttcatggtgcaacactaatggcaagggagaatgaccgcttcttgaagcaaattgcttttcatcttttgcggcttgctgtttttcgaaatgattctattaggaaaagagctgttgttgggttgcagattctcgttaggaacgcattcaactatttcaagaacactacaaggttgagagtcatgttgacaattactttgtcagagttgttgtctgatgtgcaagtgactcaaatgaaatccgatggttctcttgaagaaagtggtgaagctcggcgccttagaaaatcactggaggaaatggctgatgtaagaagcaaggatctgttgaaagattgtggcctccctgttactgcattggaggcggcccctgatggttcctctgataatatgtggtcttgggcagaggtgaaacatctctctaaatgtctagtccaggcccttgatgctggtctggaacacgccctcttggattctgtagtgactgtagacaggtatgcagctgctgagggtttctataaactagctatggcctatgcgcccgttccagatcttcacattatgtggttgcagcatttgtgtgatgcacaccaggagatgcaatcatgggctgaagcagcacaatgtgcagttgctgcagctggcgtgatcatgcaggcacttgttggaaggaatgatgctgtgtggagcaaggagcatgttacttcgctacacaagatttgccctatcgtcaacactgatgtgagtgcagaagcatctgcagctgaagttgagggatatggtgcatccaaattaacagtggactcagcggttaaatatcttcaacttgccaataaactcttcacacaagctgaactttatcatttttgtgcaagcattcaggaactcataattcctgtgtataaaagcagaagggcttatggacagctggccaaatgtcatacatcactcacaaacatctatgagtcaattcttgaacaggaggcaagtcctataccattcattgatgccacatactaccgagttggtttctatggtgagcgtttcggcaagctcaataaaaaggagtatgtatttagagaaccacgagatgtacgtcttggtgatattatggagaagcttagtcatatatatgaggttaaaatggatgggagtcacactttacatataattccagattctagacaagtcaatgctgatgagttgcagcctggcgtctgctatttacagatcactgctgttgatcctgtaatggaggatgaggacttgggtagcaggagggaaaggattttttctttatctactggtactgtacgtgcacgtgtttttgaccgttttcttttcgatacaccattcacaaaaaatggaaaaacacaaggtggtctagaagaccagtggaagaggcgtactgtgctccagacagagggttcctttcctgctttggtgaaccgtctgccagtcaccaaatctgaatctctggagttctctcctgtcgagaatgcgattggaatgatcgaaacaagaacagctgcattgagaaatgaactagaagaaccacggagttctgaaggtgatcaactcccaaggcttcaaagcttgcaaaggatactccaaggaagtgtggctgtgcaggtcaacagtggggtattaagtgtgtgcactgcattcttatctggcgagccagcaactaggctcagatcccaagaactgcagcagctcatcgccgcattgcttgaattcatggctgtctgcaagcgtgcaatccgtgtgcatttcagattgataggggaagaagaccaggaattccacacccaacttgtcaatgggttccagtcactcaccgctgagctatctcattatatccctgctatactctccgagctatgatagaactgtaacaagccagaaattaggtagcatgtgaatgattcattctttcagttgcaggttcccaccaaatgtccatatttccattagttttggttgtatagttgcaccgattcctgattttggagtgtaaagtttgtataacctagtgttatctgttatgcaccagttatatgctgagtgccatgttttttgcggtttgctactgtatcacagcgagccgacattttacaacagttatatgtaatgttctgtagtgatacaatagtgcctattctgggtg

SEQ ID NO: 646 - DNA, 2194 bp, Zea mays
  Clone ID: 700085587_FLI
atttgagtatctacctcgtggcagtccatctgaagcatgccttatgaggatatttgtggcaacggttgaagctatacttaggagaacttttccttctgaaacatcagagcaatccagaaagccaagaagtcaatctaagaaccttgctgttgctgaacttcacacaatgatacattcactctttgttgaatcctgtgcctcaatggaccttgcctcccggttgctatttgtggtgttaactgtttgtgtcagtcatcaagctttgccagggggtagcaaaagaccaactggtagtgataaccattcccacgaggaagccactgagcattcaagattaacaaatggaagaagcagatgtaagaagagacaaggccctgttgctacgtttgattcatatgttctagctgcagtttgtgccttatcttgtgagctccagctgttccctttcattactaagaatggatcacattcaaatttaaaggattccatgaagattatcatatctggaaaaaacaatgggatgaataatgagctacacaacagcatcagctcagcaattcttcatactcgcagaattcttggcatcttggaagccgttttctccctgaagccatcatcagttggtacctcatggagctatagctcaaatgaaatagttgcagcagctatggttgctgctcatgtttctgagttatttcgtcggtccaggccatgccttaatgcactctctgcactaatgagatgcaagtgggatgctgagatttcgaccagggcatcatctctctaccatttgattgacttgcatggtaaaacagtttcctccattgtgaacaaagctgagcctcttgaagctcacctgacccttacaccagtaaagagggataatcaacatcaccgtgaggaaagcaataccagctcattggatagtgtcaagttggaaaacaagaatggttcaacatcacacaagaaaaacggtttctcaagaccactcttgaaatgtgcagaagaggtcctactgaatggcgatgttgcaagtacatctgggaaatccattgcaagcttacaggtggaagcatctgatttggcaaacttccttaccatggatcggaatgggggttaccgaggttcacaaactcttctaagatctgtattatcagagaaacaagagctgtgcttctctgttgtctcattgctctggcagaagctcatagcttctcctgaaatgcagatgtctgcagaaagtacatcagctcaccatgatggaggaaggttgttgatgcactttgtgatgtcgtttcagcctcaccaaccaaggcatcagctgctatcgttctccaggccgagaaggacttgcagccttggattgctagagatgacgaacaaggtcagaagatgtggagagtcaaccagcgtatagtgaagcttatagctgagcttatgaggaaccatgacagccctgaagcgttggtgatactcgctagtgcctccgaccttctacttcgtgctaccgatggaatgctcgtcgatggtgaagcttgtactttgccacagcttgagcttctggaagtgaccgctcgggctgtccatcttatcatcgaatggggagattcaggtttatcagttgcagatggtctttcaaatctgctgaagtgccgtctatcaaccaccatccgctgcctttctcacccaagtgcacacgtgcgcgcactcagcatgtctgtcctccgcgacatcctgagcaacggatccgtgaaccccaacaagacaatccaaggggaacagcagcggaacggcatccagagcccgtcctaccggtgcctggccgcaggcatcatcaactggcaagcggacgtcgagaggtgcatagagtgggaagcccacagccgccgcgccactgggctgacgctcgccttcctcagtgccgcagcgaaggagctcggctgccctctcccgtcatgacaaggccattcctggatctgacatcggcttccaattgacggtcagtgctggcacagctgctgcagggtccgcgagtaggacggctctaatctctccatcacgtgttattatctggtgtttccataatgcgatttgatttcaatttggcgttagatgttgtacacgtgtatttaactgcttgagttgtacgtaatttgtatacttgtaactttgtttaataatatggctattactc

SEQ ID NO: 647 - DNA, 990 bp, Zea mays
  Clone ID: 700085710_FLI
gttagagccgggtcggcctaggccagcaagttgcattggtttaatttggagctaccaacaatggcggccagacgaggcggcatggcgtccggagccggagcggcggcggcgcacatcgcatcatcgatggtgttgtctctgttgcttgttggagttggcgtctcccgtgcccagctccaggtgggcttctactccgactactgcccggacgccgaggacacggtcaccgccgccgtccaggacgccgccggcaacgaccccaccatcctccccgcgctgctccgcctccagttccacgactgcttcgtcaaggggtgcgacgcgtcggtgctcatcaggagcgccagcaacgacgcggaggtggacaacggcaagaaccagggcctgcgcggccagaacgtggtggacgccgccaaggcgcagctcgaggaccagtgccccggcgtcgtctcctgcgccgacatcatcgcgctcgccgcgcgcgacgccgtcgccatgacgggcgggccgtcgttcgacgtgcccacggggcggcgcgacgggctgacctctaacatccgcgacgccgacgtgctgccggacgccggcgactctatcagcgtgctccggtcacgcttcgccgcgagcggacttgacgaccgcgacctcgtcctcctcacagcggcgcacacggtgggcacgacggcgtgcttcttcgtgaaggaccggctctacagctacccgctgccgagcggcgggagggggccggacccgtcgatcccggcgtcgttcctggcggagctcgaggaccggtgcccaccgggcaacttcaacacgcggctggcgctggaccgcggcagcgagagcgacttcgacgactccatcctccggaacatccgctctggcctcgccgtcatcgcctccgacgccgcgctggccaacagcaacgccacccgcgcgctcgtcgacgcgtacctgggcccctgggcgggcagcttcgagcaggacttc

SEQ ID NO: 648 - DNA, 554 bp, Zea mays
  Clone ID: 700085717_FLI
ccacgcgttcggcaggggcatatggaacttcaccaaccctggcgttgtcagccacaatgagattctggagatgtacaagaaatacatcaatcctgattttaagtggaccaacttcacactcgaagagcaatccaaggtcatagtcgcacctagaagcaacaatgagatggatgcgtcgaaattgaaggccgagttctctcaactgatgtccatcaaggattctttgatcaaatatgtctttgagcctaacaggaaggttccagctaattgaggatttaggataagaagggcatcgaggtattagttactattaaacattaaattagctataatgtttgtcaatttttttatgcatcgtattttaacagaacacgtagatgtcctttgttctatatagtggatgatgtgttgagatgtggttatggacaacacaataagtcgttctgttgtgcattttaattatttgttgcaatgtgctttcttttctttctctttttcttctgaaatttgtttatggtgtttgtatgccaaaatcaaataatctccgtttagat

SEQ ID NO: 649 - DNA, 958 bp, Zea mays
  Clone ID: 700085722_FLI
gccgcgggcctcggggcctgcaaggtggagcccggcctggcggagagcggcggcgcgttcggcgctggcgctggcgctgcgccgccgccggccctggcgtccaagaagaagagggtcgaggggatgccgtccaagaacctgatggccgagcgccgccgccgcaagcgcctcaacgaccgcctctccatgctacgctccgtcgtgcccaagatcagcaagatggaccggacgtcgatcctgggcgacacgatcgactacatgaaggagctgctggagaggatcaagctgctgcaggaagagatcgggcagcagcaggaggaggcgccaggcatgctcagcgtcttccgggagctcaaccccaacgagatggtggccaggaacacccccaagttcgacgtggagcggaaggagggcggcgacacccgggtggagatctactgcgccgccaagccggggctgctgctgtccacggtgagcacgctggacacgctagggctcgacatccagcagtgcgtcgtcagctgcttcaacgacttcggcatgcacgcctcctgctccgagatgcagagggaaatgatcagcgccgacgcgataaagcaggagctgttcaagaacgctggctatggcggaggctgcttgtagaggggcatgtcatcatggcatgggaggaagaagaagaagaggcagcaataaattaatcttaagcagctgtgggagcagcagtagtagtatcagttcaggtccagtagcggaaaaggcaggcagggcaaagatttgggaggcctttttgcaatccatctcccccatcataacccacttcgatctatccatgttagcagtacgtgtccgtccgtcctatagcatcatgcaggatgcaaaggttgccctgtgctgctgaatctttctcctatatactattctatttaattaacaagagcaaagctcgctgcctttcttc

SEQ ID NO: 650 - DNA, 960 bp, Zea mays
  Clone ID: 700085735_FLI
tcaagtctggccaggtctctcccatatcgggttctcccttcctcttcctgtttccgcgcgcgagatcgccgccccgggtgggctctagatcccgatggcctcgcgccgccgcaccctgctcaaggtcatcatcctcggcgacagcggggttgggaagacgtctttgatgaaccaatatgtgaacaagaagttcagcaaccagtacaaggctacgattggggcggatttcctcaccaaggaggtgcagttcgaggacaggctcttcactctgcaaatatgggacactgctggtcaggaaaggtttcagagtcttggcgttgcattctaccggggagcagattgttgtgtcctagtctatgatgttaattctatgaaatcgtttgataatcttcacaactggcgtgaagagtttctaattcaggcgagcccatcagatcctgacaatttcccttttgttctgttgggtaacaaagttgatgtagatggtgggaacagccgtgtggtgtcggagaaaaaggcaaaggcatggtgcgcctctaaagggaacatcccgtactttgagacgtctgctaaggatggaacgaacgtggaagatgccttccagtgtattgtaaagaatgctctgaagaatgaaccggaggaagaattgtatgtgccagataccgtggatgtggtaggtggcaaccgggcccagagatcatctggctgctgttaagacatgaggcatccacgaggcgtggtgatcatcatcggctatgcagtgatcaaacaatacctccttaacattgctgggcctccatggttatctacgtgtccgtattccatttgttacctttccagtctcctgctatgtacctttcccatgctgtcagtcaatccgtagacttcatttgtgcagttccatcagtagcgtcataccttgtgaatacagttggacaaaataagagcaagtctgaactg

SEQ ID NO: 651 - DNA, 2509 bp, Zea mays
  Clone ID: 700085782_FLI
gcattataccaaaatgcagacatttatcttcttgatgaccctttcagcgctgttgatgcccacacagcaactagtctttttaacgaatatgtcatgggagctctgtcagataagactgtccttttggtgacccatcaagtcgattttttgcctgtatttgattctgttctgttaatgtcagatggtgaaattattcgtgctgcaccttatcaagatttattggcacattgtcaagaatttcagaacctcgtaaatgcccataaagacactattggtgtttcagatcttaacagagtcagatcccacaaaacaaatgaaaacaagggatcgattgatattcatggaagcttatacaaagagtctttgaagccatcaccagcagatcagctgatcaagacagaggaaagagaaatgggtgacactggtctcaagccttatatcctttacttgcgccagaataaaggcttcttcaatggctctatgggtattctttgccatgtgattttcgtatgtggccaaatagcacagaattcatggatggctgctaatgtccagaatcctgatgttagtacacttaagttgatttctgtgtacattgcaattggattcatcacagtgttcttcttgctgtttagatcgatagcacttgttgttcttggggtccaaacatcaagatctttattttcccagttactcaactcattgttccgtgcgccaatgtccttttttgattctacccctcttggaaggatacttagccgggtatcttcagatttgagcattgttgatcttgatgttccatttggattgatgcttgctgttggtgccagcataaatgcatatagcaatctgggggtgttggctgttgttacatggcaagttctgttcgtctctgtgccgatgatggttttggcactcaggttgcagaagtactatttagcctcagctaaggaactgatgaggatcaatggcactaccaaatcagctctggctaatcacttgggagagtcggttgcagggtctataacgataagggctttcgaggaagaagatcgtttctttgagaaaaattcggaacttgttgacaagaatgctgcttcatatttctataattttgcagcgactgaatggctgattcaacgcctggaaacaatgagtgctgcagttctttctttttctgccttcatcatggctctcctccctgcaggaacttttagctccggctttataggaatggcgttgtcttatggtctgtccctgaacaattcctttgttttctctatccaaaaccagtgccagctatcaaaccagataatctctgtggaaagggtgaaccagtacatggacataccaagtgaagcagcagaggtcattgaagaaaatcgaccatcaccaaactggccccaagttggtagggtggagcttagagatctgaagatcagatacagggaagatgctccccttgtactgcatggaatcacatgcactttcgaaggcggagataagattggtatagtcggccggacaggaagtggaaagacgactttaatcggtgcattgtttcgtcttgttgagccaactggggggaaaataattattgactctgtagatatcaccacgattggcttacatgaccttcgttcacgtttgggtatcattccgcaagatccgacactctttcagggaaccataagatataatctagatcctcttgagcaattttcggatcaacagatatgggaggttcttgacaaatgtcagcttcatgaagctgtccaggagaaggaacagggattggactcacttgttgtggaggatggctccaactggagcatgggtcagaggcagctcttctgtttgggacgtgcactgctaagaagatgccgtgtcttagtcctcgacgaggccacggcatctatagacaatgctaccgatgcgatccttcagaaaacaatcaggacagagttcagagactgcactgtcatcactgtcgcgcaccgtatacccactgtcatggactgcagtatggtacttgcgctgagcgacgggaaactggtggagtatgacaagcctacgaagctcatggaaaccgaagggtctctcttccgtgacctcgtaaaagagtactggtcgtacgcatcgaatgggaatatctagaagccacctccaaactacgaccgtttgcatgtttccactcgctgcatcctcttgaaaggagatacaagaacctgggcttgcacatccgaagaacccttgtatctgaaatcttgagaaaaggcgtcaggcattgtcatgaaatgcttgttgtcaagtttcaccactcgtttttcagcaacttttggtagtttctgttttgggtcattgcttccttcagcgcttgaataaaaggaaacatgttttatctcccccccccccctctcccctccaaaaaagtagaggaaatcctcaacgtttctttgctcacagtgatactttatgctcataacaaaaattgttaggtttggtgctc

SEQ ID NO: 652 - DNA, 1114 bp, Zea mays
  Clone ID: 700085785_FLI
cctgctaccaccaccagctagctctataaattggtgcaactattggctgcccacccatcatatcgatcagctcttgcaaccttatctccattgcactgcattgcattgcattgcattagtagagggagatccatggccagagaaatggagaaggcaaagaaggccacatcttcccctaagagctcaacaattagtactggtcccaagagcccggtgaggaatggaggaggatctccccctcataagaaaaacactactactgctaccgaggcacgtggacggaaacatgagcagcaaaacgttcgaaaaggaggagacacgttgtctcatgacgagagcaaaccacgacgttcttcatcaactgcggcacaaacctcacccaagagatcaccgagacacgaacaacccctgagctacaacaggctccacacagaggagagagcaataaggcgggctggctacaattatcaggttgcaagcaagataaatacccaggaaatcattcgcagatttgaagagaagcttgcacagttgatggaggagcgcgagataaagctgatgaggaaggatatggttcccaaggcccaactgatgccagcatttgacaagccattccacccacaaaggtcgacgaggcctctgacggtgccaaaggagccgagtttcctgaggctgaaatgctgcatcggtggggagttccatcgccatttttgctacaatggagtcaacaacaaggccatcaagtcgtagtccatacataatacatgcacgcagagagatatacacacatgtgcctcactacactgaagctacaatatcgatcagcattctttttgccgccgccgttgcatacgtttccaacagaactactgtataacacccacgcaagccatgcatatatacgtagaagttgcacatgtgcgcacaaatttttcacgtacgtagcacacacacagatgtggttaatcgcatgctgatgatgtaattaaatttcgcctaccgttcccccacttctttttctttgtcttttacatttttcatccctctaagttaagttctcttttcctcgtttagctagcgtgttccatgcatgtatatttctgctggcataaat

SEQ ID NO: 653 - DNA, 1686 bp, Zea mays
  Clone ID: 700085821_FLI
gggagagattggagggaggcccctgcccaaggcaagagaaaccgcggcgcgcggagagggaggaagggcagacgcagacgggcgaacaagatgagggagatcatcagcatccacatcggccaggccgggatccaggtcggcaacgcctgctgggagctctactgcctcgagcacggcatcgagcacgatggcaccatgcccagtgattcctcggttggcgtcgcacatgatgccttcaacacgttcttcagcgagactggttccggcaagcatgtgcccagggccatcttcgtcgaccttgagcccactgtcatcgacgaggttcgcactggctcgtaccgccagctcttccacccagagcagctcatctcggggaaggaggacgcagctaacaactttgcccgtggccactacacggttgggaaggagattgtcgatctatgcctggaccgtgtgcgcaagcttgcagacaactgcactgggctgcagggattcttggtgttcaatgctgttggtggtggtactggctctggacttggttcactgctgttggagcgcctttcagttgattatggcaagaagtctaagcttggtttcaccatttatccttccccacaggtgtcaacagctgttgtagagccatacaacagtgtcctctcgacccactccttgctcgagcacactgatgttgcagtcctcctggacaacgaggctatctatgacatatgcaggaggtcccttgacatcgaaaggccaacctataccaacttgaacaggctgatctcacagatcatatcatcacttaccacctccctgaggtttgatggggctatcaatgtggatgttactgagttccagaccaaccttgttccatacccacgtattcatttcatgctttcctcatatgcccctgtaatatctgctgagaaggcctaccatgagcagctctctgtgcctgaaatcaccaatgctgtatttgagccctcaagcatgatggccaagtgtgacccaaggcacggaaagtacatggcttgctgcttgatgtaccgcggtgatgttgttcctaaggatgtcaacgctgcagttgcaaccatcaagaccaagagaactgtccagtttgtggactggtgccccactggattcaagtgtggcatcaactatcagccaccctctgttgtccctggaggtgacctggcaaaggtccagcgtgccgtgtgcatgatcagcaacaacaccgccgttgccgaggtgttctcacgcatcgaccacaagtttgaccttatgtacgccaagcgcgcattcgttcactggtatgtcggtgagggtatggaagagggtgagttctcagaagcccgtgaggacttggctgctcttgagaaggactatgaggaagtcggtgcagagggtgccgatgatgagggtgacgagggagacgactattgagtagctggctaataagtagttctctggtggttaatggttgggttattttgagtatatactctatggttccactccattggatactgctgctgtgtgtgtttccattttgtactatgtagtaaattgttcgtagccccctattggccatgattgttcatatcatccttctttggtttgcaacgctattcgtccaatttcggtgtatatgctataatgctattatgttgcaagtgttctgtgctc

SEQ ID NO: 654 - DNA, 798 bp, Zea mays
  Clone ID: 700085831_FLI
ggcttagtgtccatgctttctgcccactgctcaaagggaaaaggggcggtgctgtgacaaaggttgggccatggggcggaagcggagggtctccaatggagctgacagagacggagacgcccatgcgtctggagagcatcaccgtccgcagcggcgtggccgtcaactccatctcattctcctacgtcgactctgccggccacaagcgctctgctggtccctggggtggttccggtggacagcctgatcaggtccagctcgccgagtctgaggtggtcacacaagtgtccggaacatacggcaccatcgacgacgacgaccgcaccgtgataacctccattaagttcgtcacgaaccttgacaagacctacgggcctttcggagcgtacggggacggcgacgacacctcctttaccgtccccgtgcagccggggagtggcgccatcgtgggcttcttcgcgcgcgttggcggggccggggactacctggacgccattggcgtctacgtgcgccccctctaaaaagctttgttttgtgatgtgaatgaagcagctgcatgcatgctgctctactccacacagagtcgagtccatcaccaccagctgcttgaatgcgtgcgtgcggccggcttccagttgctttatttcgtacctgagtgttgtgttgtggtgtgtttgctcatgtacttcggtacgttgcttggtaaactctggtcagtgttgtgtgtgtttgcctttgtcatgaatttcgacggaataataaagacctcgtgtagaagaggtcagggttttatcactc

SEQ ID NO: 655 - DNA, 1824 bp, Zea mays
  Clone ID: 700085854_FLI
caatgatggtattcagaaatgcattagggtgcgcttgggttcagggccacgctgtggtaggggaaggaacaggagaggcatggacacttcaggctggagagatgacaagccgtttgacagtagaggctctacattctggccttatcacctggggaagttcctgaggtttcacctttataaggagaacaaggacacacatgaggcactaggggttataggaaaattggcaggggttcagccaagatcgtttggatttgcagggacaaaggataaacgtgctgttacaacccaacaggtgacagtttttaaagtgcatgctagcaggctggctgctcttaatagcaaactcacaggtatcagagttggagactttagttacgtgaaggagggccttgttcttggtcgactcagagggaaccactttgcaattactttgaggaatgttattgcagaatcggccgatgttataaatgctgcagttaatggtctaagtaaaaatggatttatcaattactatggcttacagcgctttggcagcggttctgtacctacccactttgttggtgctgctttgctcagaggagaatggagacatgctgttagcttgattcttggtacaagggtacattataaatggcatgttgatgttgatgcagcacttaggggcatgccccgacatctcacagtggagagagctattcttcagagattgaagaactaccctggcaactatctacaagcactaatggctatacctaaagcactgaggctgatgtatgtaaatagctaccagagttacttatggaatcatgctgcaagtatgagagtggaaaagtatggtatttcacaagttgtagaaggtgacttagtttacaaaactgggtcctcccttggagaagcaattaccacagatacatttgatgacgatgatagccacgttaattcacctgaaatggaaatgtcttgtgaaacacttactgaagaaatgatccagtctgtgaaggtagttgattctgaagatttattgaaggcagtctattcgtttgaggatgttgttctccctttgcctgggtcagaaacattgtttcctgggaatgaagttactatgatttatcatgaaatagccaagaaggatggcattagcctgatagagagcgcccatggtatcaaggacttctcgattacaagcatgaaaggaggttaccgccgcgtactccaacgccctattgattttgaatgggacctgatgacttacacagatgacaatacacctttagtaccaactgatttagatgttctatcagaaacccagttatcagaaacaaatgagccattatctgatgggacttgcagttgtccatcaagtgattccaggttgcaagttttattggacacctctggaccaaccattgaagctagctcagtagaaaccaaatcaattggcatctcagatctgtcaccagagaaactggctgtgaaattagaatttactctaccagcatcatcttatgctacaatggccatgagggagttgacgaaaacttcaacttcggttgcttgccagaaaacattaaacggctgaccaagccttgcagtgtaaaatgctttcttcgcaagctggtatccattgtgacaaaacacaccatgtggatttaactgggcccaggggatggaaccaagcttcggaaaagaaggaacatttcggttctttgctctcactaggaatgatgttccatgattttttagaaaactggaacaggtgttggtctgtcatacatggatgtaaacttagatgactgaaaagtagctttaccttttgcagac

SEQ ID NO: 656 - DNA, 635 bp, Zea mays
  Clone ID: 700085873_FLI
ggcgaaaaccctagtaagcaaaccaccggagcagcggcgcttgcgcgagcggagccatggcggacgacgattacaacgaaattgacatggggtatgaggatgagcccccagaaccggagattgaggaaggagctgaagaagagcctgagaacaatgaagatgcccctgatgacgtcataggtggtgagggtgaagataaggaacaggaaaagaccaagcgtgaacgcaaaacaacaaaatacatgacgaagtacgaacgtgcgcgcatcctgggtacacgagccttgcagataagcatgaatgctccagtcatggttgagcttgagggagaaactgaccctcttgagattgcaatgaaggagctgagagcgcgcaagatacccttcacgatcagacgttacttacctgatggaagctatgaagactggggagtagacgagctcattgtggaggactcctggaaacgtcaggttggtggagactgaagacgcggatatacttggcatggaaagggtctgtggtgcagtgggtgtttcctgtagttacaattcttcgttgccactatgagtggatattgtagcgaatgaaccaagacgaaatgatgctatgttaacttaacgtctgaggttgccttg

SEQ ID NO: 657 - DNA, 1502 bp, Zea mays
  Clone ID: 700085903_FLI
cagcactccaggagtcagtgcaatactttttgatgcattagcaaaggcaaacattaatgttcgagcaatagctcaaggttgcagtgaatacaatattactgttgtattgaagcaacaagattgtgtaagggctctgagagctgctcactcaaggttcttcctctccaaaaccacacttgctgttgggatcattggacctggtttaattggtggagcactccttaaccagttgaagaatcagactgctgttctcaaggaaaatatgaacattgatctgcgtgtcattggaataactggctcaagtacaatgcttttgagcgacacgggaatagacttaacccagtggaaacagcttctacaaaaggaagcagaaccagctgatattggtagttttgttcatcatttatctgataatcatgtttttccgaacaaagttttggtggactgcacagcggatacaagtgtggcatcccactattacgattggttaaagaagggtattcatgtcatcacgccaaataagaaagcaaattctgggccacttgatcagtacctgaaattacggactatgcagcgtgcctcatacactcattacttttatgaagcaactgttggtgctggcctcccaatcattagcaccttgcgaggtcttctggagacgggtgacaagatactgcatattgagggcattttcagtggaactttgagttatatatttaacaatttcgaaggaacaagggcgtttagtgatgttgttgccgaagcaagagaggcgggatacactgaacctgacccaagggatgacctatctggaactgacgttgcccgaaaggtcgttgtcctcgcgagggaatctggtctgaggcttgaactttctgacattcctgtggagagccttgtgccagaaacactcgcagagtcatgctcgtcagcagatgaattcatgcagaagctaccgtccttcgacgaggactgggccaggcaacgcagtgatgctgaggctgcaggcgaagtcctgcgttacgttggagcgttggatgcggtgaacaggagcggacaggtggagctacgcaggtacaggagggaccacccgttcgcgcagctctccggctccgacaacatcatcgccttcaccacgtccaggtacaaggagcagccgctgatcgtgcggggtccgggtgccggcgcggaggtgacagccggtggcgtcttctgcgacattctgcggctggcgtcttacctcggtgctccttcttgagcttcgagctacaggtgccagtttcaggaagcagtcggagacacactgccatgcatgatgcctcccctccgtgtttgggctatgctcacatgttgtaatgttgttctgaataagtgccaggaaataatgcctctagcgtatgtcgagagagagaggtggttcggctttggaatagccgattaggtgttgtttttgctgcatgatgcaaatgaattatcgtaccaatgaagggatgtttgcttgt

SEQ ID NO: 658 - DNA, 1643 bp, Zea mays
  Clone ID: 700085908_FLI
ctcttgcaaggagaaaaaaaaaggaggggcaaggaacgcgctggctgagagacatggttctgacgcacgttcacgaccttgacgaggcatccgccgcatcggccgtcgtcttcgcctcgagatacgtgcaggacccgcttccaaggtatgagctgggagagaagtccgtctccaaggacgcggcgtaccagatcatccacgacgagctgctgctggacagcagcccgcggctgaacctggcgtcgttcgtgaccacgtggatggagcccgagtgcgacaagctcatcctcgagggcatcaacaagaactacgccgacatggacgagtacccggtcaccaccgagctccagaaccggtgcgtgaacatcatcgcgcggctgttccacgcgccggtgggcgccagcgagaaggccgtcggggtcggcacggttgggtcgtcggaggcgatcatgctggcggggctggccttcaagcggcggtggcagaaccggcggagggcggcggggcagccctgcgacaggcccaacatcgtgacgggcgccaacgtgcaggtgtgctgggagaagttcgcacgctacttcgaggtggagctcaaggaggtgaggctgcgggaagggtgctacgtcatggaccccgacgaggccgtgcggatggtggacgacaacaccatctgcgtcgccgccatcctcggctccaccctcaccggcgagttcgaggacgtcaggcgcctcaacgacctcctcgcggccaacaacaggcgaacggggtgggacaccccgatccacgtggacgcggcgagcggcggcttcatcgcgcccttcctgtacccggacctggagtgggacttccggctgccgctggtcaagagcatcaacgtcagcggccacaagtacggcctcgtctacgccggcgtcggctgggtggtctggaggagcaaggaggacctccccgacgagctcatcttccacatcaactacctcggcgccgaccagcccaccttcacgctcaacttctccaaagggtctagccaaatcatcgcacaatattaccagtttcttcgattaggtttcgaggggtaccgcaacgtgatggagaactgcatggagagcgctcggacgctgcgtgaggggctggagcgcacgggccgcttcaccatcatctccaaggagcagggcgtgccgctggtggccttcacgttcaaggccaaggacgaaaccccgctggccttcaagctgtcggcggagctgcggcggttcggctggatcgtgccggcgtacacgatgccggccaatctggagcacatggccgtgctccgggtcgtggtccgggaggacttcggccgcccgctggccgagaggttcctgtcccacgtccggatggcgctggaggagctcgaccacgcggccaagggcgggcccgtgcccaggatgcggctcaccatcgagctcggcccccccgccaggggctccggcgaggaggcctccgccagggtcgtcaaccgggaggccgtcgtgccggtgcatcgcagcgtgtcgctcgccggcgggaagaccaagggcgtctgctagactggccggtccatggcccgaaactctctgtagtggtatggcgaggcactgaataaacatgtgtcgacaaaaggc

SEQ ID NO: 659 - DNA, 1147 bp, Zea mays
  Clone ID: 700085919_FLI
gtccgcaacccccactactacagtgcccgccgccgctgcgtccaccaccacctcctttcccaactcctccgcgtacccccgccctctccggcggcccgcgtaaccacccgcgcagatggcgacggcggccacggcgtccgcgacggcggcgacccgcttcacgctcctagcgggcgccggcctccgcagccgcatcagccgcctccccaccgccgtgcggttccagcgccagcgggggctcaccaccaccgcgctcctgaagaccgccgacctccagcccaaggagcagggcaagcccgagacgctcgactaccgcgtgttcctcgtcgacggcgggggccggaaggtgtcgccgtggcacgacgtcccgctgcgcgccggggacggggtgttccacttcgtcgtcgagatacccaaggagagcagcgccaagatggaggtcgccaccgacgaggccttcacgcccatcaagcaggacaccaagaagggcaaccttcgatactacccgtacaacattaactggaactatgggttacttcctcaaacatgggaggacccaacttctgcaaattctgaggttgaaggagcgtttggggataatgatcctgttgatgttgttgagataggtgaaagacgtgccaatgtcggggatgttcttaaggttaagccattggcagctttagcaatgattgatgagggagagcttgactggaaaattgtggccatttctttggatgacccgaaagcatctcttgtgaacgacgtagatgatgttgagaagcattttccggggacactgactgccatcagagactggttcagagactacaagatacctgatggaaagcctgccaacaaatttggtctcggcaacaagcccgcaagcaaggaatacgccctgaaggtcattcaagagaccaacgaatcatgggagaaattggtaaagagaaatattcccgctggagagctctcgttggcctgattttggcccatgggaagccaccacattcttttgaactgctttcgtgagcatgtcgttttgtatgctgtgaccatgcttcttcgtttgcattccaaacctttttacgaattgtttaacaaaaatgatcttgtcggatgaataatgattctggtgcgagtttaccag

SEQ ID NO: 660 - DNA, 1976 bp, Zea mays
  Clone ID: 700085945_FLI
cttgcttgcattgcatgtaagcatttctaaggccggccttgcgagagttgggcagctcgatcgcccatcgctagctacgagcagatcagcaggaatgcacgcatcactcggcatgtcaagctcaagcagcagcagcagcaggggttggtcgtcgtactcccccctgctcttcgccaccctgcttacactactactctgctcccagctcgccattgccaaggagcagtaccatgagttcgtggtgaaggaggcgactgtgacgcggctgtgcgggacgcagcagcagcggatcatgacggtgaacgggcagttccccggtccgacggtggaggtggccgagggcgacgccctcatcgtgcgcgtccgcaaccggggcagctacaacgtgacggtgcactggcacggcgtgcggcagatgcgcacggcctgggccgacggcccggagttcgtcacgcagtgccccatccgccccggcacctcctacacctaccgcttcaccgtcgccggacaggaaggcacgctctggtggcacgcgcacagctcctggctccgcgccaccgtccacggcgcgctgatcatccgcccgcgcgccggcgtcccgtacccgttcaacgccggcgacacgccagccagggagatcaccatcatactaggggaatggtggaacatgaaccccatcgacgtcgtgcgcaccgccacccgcaccggcgccgcgcccaacatctccgacgccttaaccgtcaacggccagcccggcgatctctacaagtgctcatccaacggcaccacgacgttctcggtcacgtccggcgagacgaacctgctgcgcttcatcaacgccgcgctcaacacggagctcttcgtctccctggccggccacaccatgacggtggtgggcgccgacgcctcctacaccaagccgtacgccacgcccgtcatcttgatcgcgcctggccagaccaccgacgtgctcgtcaccttcgaccagccccccagccgctactacctcgccgcgcgcgcctacgccagcgcccagggcgtccccttcgacaacaccaccaccacggccatcttcgactacggcaccggcgccagcaacagcagcagccccgcgatgcccaccctcccggcctacaacgacaccgcgacggccacggcgttcaccacgagcctgcgcggcctccgcgcggcggaccttcccgcgcgcgtcgacgagagcctcttcttcaccgtcggcgtcggcctcttcaactgctccagcggccagacctgcggcgggcccaacaacacgcgcttcgcggccagcatcaacaacgtctccttcgtgctcccgtccaccacctccatcctgcaggcgcactacgcgtacgccgccggcggggcgacgccagcaggcgtgttcaccgccgacttcccggcgaacccgccggtgcggttcgactacacggcgccgaacgtcagccgcgcgctgtggcagcccgtgccgggcacccgggtgtacagcctcaagtacggcgccgccgtgcagctggtgctccagggcaccaacgtgttcgcggccgagaaccaccccatccacctccacggctacgacttctacatcctcgccgagggcttcggcaacttcgacgccgccgcggacaccgccagcttcaacatggacgacccgcccatgaggaacacggtgggcgtgccggtcaacggctgggcggtcatccgcttcgtggcggataatcccggggtgtggctcatgcactgccacctggacgtgcacatcacctggggtctcgccatggcgttcctggtggaggacggcgtcggggagatgcagtcactggaggcgccgccgtctgacctgcccatctgctagctcattctagtcttgcatagggggcctcaactcatttattatgctcaaaattcgtcaaggaacattcttgccgatttataattcaatcatataatactattcaaac

SEQ ID NO: 661 - DNA, 1088 bp, Zea mays
  Clone ID: 700085950_FLI
tgaaccagctttcctttgctatgcggctatagtagttgcagcagccttagtgcttatatattttgttgtccctcatcatggacaaacaaacataatggtgtacattggagtatgttctcttctgggatcactcacggttatgagtgtaagagctcttggaattgccttgaagctaacattgtcaggaacaaaccaattattctatcctcagacttgggcctttgcactgattgtagctacctgtgtgagcacccagattaactatctaaataaggcattggatacatttaatacagcagtagtctcaccaatatattatgtgatgtttacatcactaacaattatagccagtgtgataatgttcaaggattgggaccatcaaaatccaacacaaattgttacagagatgtgtggcttcatgactatcctatctgggacgtttcttcttcacaagacaaaagatatgactgatagtcctggacaatctttgttgacacgacggccaaagcatgctagtcagaatgcgtttgcaattgaagtgatgccactaaaatgtcaagattatatagatgacgagaccttgacgttatcacttcccaaggttgaaaatggttacctaaaggaagagtatcttcttagatacaaggactcgagtattgtctgatagataattcttcgccaacatttgacgggaagctcttgagaatcattctgcttccagacatgattgattgatgtagaactggagttggcagttttacctcaacctggccttggatagattgatattacagattgtaagttgtcaactgtggtttgtctatatctggattctggatgatgttttgagggaaggagcatgcaagaaggatgccacattgaggccaattaagtgctagtcatctaggaattgtggttccggaaaagaatttgaagtgtacttagatacaattgtgtcaccaactatactcttttccccctcttttctctctcattttaggacgccatgtgatagctgcaatgtgatcttatctgattcataggacgacgccatatagaaatgtcaagcatcgttttttcctgtaatt

SEQ ID NO: 662 - DNA, 2031 bp, Zea mays
  Clone ID: 700085987_FLI
cgaagaagttcatcgagaaccactaccgttcgcagatgaagaccatccaggagcgcaaggagaggcgctttaaattggagagacagctagcttcttctcaagttcccaaggagcagcaaatcgatttaataaaagatcttgagaggaaggaaactgaatacatgcgacttaaaaggcacaaaatttgtgtggatgactttgagctgctcactattattgggagaggagcttttggagaggttcgattgtgtcgagagaagacctccggcaacatctatgcaatgaaaaaactcaagaagtctgatatggttgtcaggggccaagtggaacatgttagagccgaaagaaacttgttggcggaagttgctagtcactgcattgtgaagctttactattctttccaagacaccgagtatctttacctaattatggagtacctccctggtggtgatatcatgacccttctcatgagagaggataccttgactgaacatgtagcgcgattctacattgctgagacaattcttgctatccaatccatccataaacataactacatccacagagatattaagcctgataatttgcttctagataaaaatggtcacatgaagctgtcagattttgggctgtgcaagccaattgactgttcaaagctctcaacgttgaatgaagatgaacccatgggtgatgacaacatgagggaatcaatggatattgatagttctttgtccaatacagcaaatggtagaagatggagaagtcaacacgaacagcttcagcactggcagatgaacagaagaaaactggcattctcaactgtcgggacaccggattatattgctccagaggttctgctgaagaagggatatggaatggaatgtgattggtggtctctaggcgcgatcatgtatgagatgctagttgggtatccaccattttatgccgatgatccaataactacatgccgaaagattgtgcactggagaaaccatttgaagtttcctgaggatgcaaagttgtcaaatgaagcaagagatctcatttgccggttattatgtgatgttgaccacaggattggcagtgcaggggcagatcaaataaaggcacatccttggttccaaggagttgcatgggataaactttatgaaatggaagcagcatttaagcctcaagtaaatgatgagctggatacacagaatttcatgaaatttgaggaactggaaaatcctccagccaaaacaggctctgggccttcaagaaagatgatgctgaactccaaagatctgagctttgtggggtatacatacaaaaactttgatgcagtgaaagcaataaaaatttcagatctgcaaaggaattcatctctaacaaggccttccattggttcgatattcggtccatcaggcatggattctcccatggaaccaaacggaagggacacacacatgcacacagtttcatctggtgacccaatgattccctaaccttcagtgccgtctgtcctcagcaaatttccgaactaaatcagcgtgcaaacgccagggtgatgtggctccagctggacaacatgcttatttttagccaggtctctgctctctttatcgtgggcaagcggtttgtagaaatccaccaaagtttctagttgtaaaatagtatgccacagacttcaacaaaggtcccatgcattattggctcatcagacatgggggcagtttttttttggagaaattgcaccttgcggctggctgcccaggttggcagagcaaattgcggccttctcttgtggcagttcccggtctgcaggaaagggaaatacgacggtgttgttgcagcaggaattctcatggttagtgtcgttgttggtgtttgatatgtatcaggaattttcacatttgaagtagggtttctgttagcagagttgtagctattgacaagcaacatccttttacggagttgctttttttcgttgatgtatggaaaacgagacattgtagaaatcgaagttcgatctagccttgtatgctgcat

SEQ ID NO: 663 - DNA, 1929 bp, Zea mays
  Clone ID: 700085996_FLI
cacattttctgcattatctctaaatagccctttgtatatgttgaaaacatgtattttcttggtttgtatttccctttatttgatcaaagactcaaaataaacatctggtatcatcacggataaaattattacagcgaagcattcagtgaggcattcttgagttgctcattgtggaggcatctaattgagtaacttgtgtcatgaacacatggtttggttttcctgaatcttttttggcagcattttgtgtctgaattttgaggatttgcctcttgtttcttggcacttcagattttgcaacttgacatctcacattttgatttacatatgggttgtaggcacttaatgttagccagaaagcagagcgtgtctgtccccaccccacacacattttcatttgtgttggtcttcattccttagaaattagaatgctcaattagaagttgaagtgcagagttagtcctgatttatcctatccattgtttataatctggtagtgatggaggcttagtaagttggtatgctagttgctgctacctaatgcattaagaatggtgcaattagctgtattctttcactgtgtatagtgcttccatttttttagacatatccctatagctgtattgtttcacaaaagtgtcacttttgggtgttgtggagctaattttgccacaaagtttagagaaaaataacggagtattgaacctgcctttttttgcttaattaaaactaagatacaatttctcacaaaatatacctttttatactgcagtttctaaaacatacgagtactggtgaagtgtatgtaattgctttaggtagttatatcttgtgcttgttcagagggtttaggattcatctatgtatttccttgtacatgcagatatattcttctagccttttgaatgtcagtatctttccagtgtagactctggcattagtaagaactatggctaattgaatctttgcagtagctttgctacaaattttgcatctgttttaatggaagaagactatgtttttttattgttcccactatcattgaagcctaacataagtttattattgtgctggataaaaaatcaggttgacacattgctagacagtgtgaagtgggacagcaaagggttggctgttgccattgcacaaaatgtggatactggagccattcttatgcagggttttgctaataaagaagcccttgcaaaaactatatcaaccaggaaagccacattctttagccgttcacggtcttccttgtggacgaaaggggagacatccatgaacttcattaatgtgcatgacattttcctagactgtgaccatgactctataatataccttggaaagccagatggacctacctgccatacaggagcagaaacgtgttattatacttcagtttatgatgctctacaaagttcaaagcccaatgaaggcaggcaggttatgacaaccctatactcacttgaagatacaattagtagacgccacgaggagaaagttactgatggaggtggcaagccatcatggacgaaaaagctactccttgataaccagctactttgctcgaaaatacgtgaagaagctggtgagctaattcaaacgctgcttgagaacgaggaccaatctcgtgcagcttcggagatggctgatctgctgtaccacgctatggtgctgctcagagtcaaggatgtaaagatggaacaagtccttgaggtcctgaggaagagattttcgcagtctggtatcgaggagaaggccagtcgcaataaatcttagcgtgattggttaataatgccttgatggtggatgactctgatttgctatcggtgcggaatgtgcactattgaagaattttgtgtttgatggatcagttgtgtttttgttttctccgacaagacatctatgaaatatgtggcaggtgtc

SEQ ID NO: 664 - DNA, 1208 bp, Zea mays
  Clone ID: 700086035_FLI
cttaatagcatatagaataaaattcaccccccatccacatgctggcgacaagtggtgtgtctatccgagctatgactacgctcattgcatggtggattctcttgaaaacatcacacattcgctgtgcacacttgagtttgacatacgtcgcccttcatactactggctacttgttgacactggctggtctccggcgacggggagtatcatcaactgcaataaattcctttattcgtggaatcgggataacgagaagtgacaatagcttaattcgtgttgatcgtctagaatatcacatcagggaggagcttaacaaaacagcccctcgaaccatggttgttttgcgacctctaaaggtggtaataactaacttggaagaaggaaaagtactagaccttgatggcaaaatgtggcctgatgcttctgatactgatgcttcctcccactataaggttccgttctcaagaactgtctacattgagaaaactgattttcgcctaaaggactcaaaagactactatgggctagcccctggtaaatctgtcatgctaaggtatgcgttccccataaaatgcacagatgttatctctggtgatagtcctgatgatattgttgaaattcgagctgaatatgatcctttgaagacttctaaactgaagggtgttcttcactggattgctgagccagcacctggtgtagagccattgaaggtggaagtaagattattcgagaaattgttcatgtcagagaatcctgctgaattggaagattggcttggcgatcttaacccacactcgaaagaggtgataaaggatgcttatgctgtaccatcacttgccactgcggttctgggtgacaagttccagtttgagcggcttggttacttcgccgtggatactgactccacacctgagaaactcgtgttcaacagaactgttaccctccgtgattcgttcgggaaagctggacccaagtgactgttcagtgtaatttagggagggcgctggttttgatcggttgcagaggcgcacctgaactatacagtttgtgaagaaaatggtcgtctaatacagaacagtttaaaggccttactctttataaaatttagggttttttaatctggtgccctcagttttggtgatgtgttcatttgtaccccttgtttacttcgaatcagattttgtatgatagtgttagtgtcccgattc

SEQ ID NO: 665 - DNA, 1078 bp, Zea mays
  Clone ID: 700086040_FLI
gctagtcagagagagagagagagagagagagagagagagagagagaggcggggggcgggaggatggctttgctgcagagccagagcctgccaggcattggctgctgcagcagcagcatcgtcttggcacgagcgagggtgcagcagtgtctggcagcggcgtcgcactcacaggcgcccctcctgcaggccaatggcggcagggcgggcctcccctcctcctcctcgatccttaaggctggcaatgcgatcagcttcagccggcggagaaggagagacctgcgcgtcgtcgcggaggcggccacggcggggacggccaaggtcacgccggcctcgtctggcggcgtcagcctcagcgacgtgctctggccttctgccggtgagtctgaagaaacgctggtgcttctgccggagcattcctggccatggcggtactggggaaaatggaccagatggtggcgttcaagggagtatccttgacgattgcgccccttggagcagtctgctgcgtgcttttcagcgctccagactcgcctgcggccaagaaatacaatatgttcgtcgcgcagattgcttgcgcggcctttggcgtattagccctctcgttgtttgggcctggctggttagcgagaggcgccgctctttcagcctgcatagcattcatgaccatcacgggtacctcgcatcctccagctgcgagcttgcccctcttgtttatcgatggccccaagtttcacagtttgcagctttggtacgcgcttttccctggagctgcaggctgcatcgtcctttgcttgattcaagaggtggtggtttacctgaagaagaacttcaagttttgactcaagcagcttgacgctatggatttttgtggaagtggtccgattaattattcaatcatgtaacataaattacattgcctgcatttgcgataaagttgtgaaaatgaaggtttactgtctcctgtcttggttaaagaagaaagaagactttccttgataccttgtgctcatcaaaatgcagttgatacaaatgtgtacataccattctcccatcgaataaagtctgacaatttattc

SEQ ID NO: 666 - DNA, 1194 bp, Zea mays
  Clone ID: 700086042_FLI
cctattccctcgtgtcatggcgcttctcctgcgcctcgctgctccgtcggtgccgccccggcggagctccggcctcagagcattgccgcgcgtcgtccttccggaggtcgtttccaaacaatcatttcttcgtttactagttgacagcactgcaagtatgccctgtcctattaagtgttctgcggctcggtgtgccccatcattgactgaacacaacgattctaggaataatggcatccatgcatctagtgtatatggacatgatctcatgaagtccatgtctgatctccaggaagttgtattttcctcctttagcaaagcatgtcttctcagtagttgtatcatatatggtctaccacccagttgtatagcagaaccatgtgagcaagaatactttctccctaacatgcctttgctgttcgcaatagccatggttggtgctactgttggaggtaagctcatcacactcataacttgaaagtttcaggcatggaatgtttgttggagcttgagaactggttgtggatttaagcatgacaatacacagtggacggtttccttctgtttttatgttttctaatcttcattaacatcatcttttgttacaaatgatttaaatatcttaacgccaaaagcacacattgaatcacttctaattccggcgaaatgcaggagtgtggctatgcactcttgcaatttaatacttattaaacacaactttttatgtcttcttattttttccagtttcttatttagcagtgcatttcattaaatttaaaacatatgcatagaaatgcatattcattattcagatgcaacaaatacgagtgcatagaaaattacatctaggagtatcctagttattatcatacctatgttcaattactttttccacagtttccttatttgtcaatgcatttttgttaaatgtaaacatatacacagcaactgaaacagatctaaatgtaacaaagaagggatgcaaagaaaattacattttggagcatcctggctatcttactgactcctggtttccttactttctgcacccagttattgtgagaaagacatctcattgtaaatatgaggaaaggggcacccaaatttgagttgaagaggactttttttttctcgaaagcgtaggagagctacacatcttatatacgaagaaaaaagtccaaaatagaccattac

SEQ ID NO: 667 - DNA, 1046 bp, Zea mays
  Clone ID: 700086072_FLI
caatcactgctgcgcccgataggtggcagcgagccagcgacccacccgactctgttccaacgagccttccctcccaaacttgcacgctgtccccgcgctcgcctccgcccccgatccagatccagggtggaatagggaacggccatacaccatggcggatttctccaaggaatcttgcccttctgtgaagaacattttacttctggattctgaaggaaagcgtgttgctgtaaagtatttctcagatgattggccgactaatgcatcaaagttagcctacgaaaagtctgtttttactaaaactctaaagacaaatgcacggacagaagctgagataacattgtttgatggttatattgtcgtttacaagtttgtacatgaccttcacttttttgtcaccgctggagatgatgagaatgagctcatcttagcaagtgtactacatggtttttctgattctgttggtcttctactcaggggtgatgttgagaagcggactgcgcttgagaacttggatttgatacttctctgcattgatgaaattgtagatgggggaatcatcctggaaacagatgcaaacaccattgctggtaaggttgcaaccaatgctgttgatggttctgtgcccttttctgagcagacgatatctcaggcactagccacagctagggagcaccttgcaagatctttactgaaatgaacaaccagcaatatgtatgacatatatgtgtgttaaaggttgggctactgaatgttaagggtctttgtagtcgttattcatcccaaagtgctgctgtgacagagcctagttgaatatccgagggattggtcacatgctcgttattttttttgaaccagtgagtttgtagctgccatatttcaggtaaaacataaaataaagagttgtaattgggtgtaatataattttcaccatacaaaaaaaaatcatctcaactatcaaaccatggtaaaaggttcaaaattatctatcaaatgattatccctccaggtcggaggaaaaatggatcctctgtcattgaaaaggt

SEQ ID NO: 668 - DNA, 1110 bp, Zea mays
  Clone ID: 700086081_FLI
tcttattgccaaaggatgcaagaaggtggttgtggtcaaccgttcagtggaaagggtggatgccatccgcgaggagatgaaaggtatcgagattgtgtacaggcctctttcagagatgtacgaagctgctgctgaagctgatgtcctattcacgagcactgcatctgaaaccccattgttcacaaaagagcacgcagaggcacttcccacaatttccgatgccatggatggtgcccggctttttgtcgacatatctgtcccaaggaatgtcagcgcgtgcgtctctgaaattggctccgcgcgagtatacaatgtcgacgacctgaaagaggtggtggaagccaacaaggaagaccgtctcaggaaagcgatggaggcacagacaatcatcgccgaagagctgaaacggtttgaggcgtggcgggactcgctggagaccgttccaaccatcaagaagctgaggtcttacgccgacaggatccgggcctcggagctcgagaagtgcctgcagaagatcggggacgacgctctcaccaagaagacgaggagagccatcgaggagctaagcaccggcatcgtgaacaagctcctccatggcccgctgcagcacctgaggtgcgacggcggtaacagccgcacccttgacgagaccctcgagaacatgcacgctctcaatcggatgttcggcctcgacaccgagaaggctatcgtcgagcagaagatcaaggccaaggtggagaagatccaaaactgaggacaggaagcagtttttcttccacgtgtatacataccataccctccaatctgattccttttttttttttgaccctttcacttactgagctcctcccctgctcgctgagacgtggactgtgccgtgaattagcgccatggcagcagctcaatctgttgagagagagcggcaaattgtctcaactccagctgcttttctttcttcatttttgcttgagctgctgtggcaagagcccccattcttaagctatatacttcattcggacggaacaggaatgtatcaaggtgtcagctgatgccgttttcatttgtcattatacttgtaaggtttactgatactgtaataccttttacgct

SEQ ID NO: 669 - DNA, 1701 bp, Zea mays
  Clone ID: 700086106_FLI
atcccgtcgcatcccatcccactaccacccatctcgtcgtccgccgattcgatccggttcttccaacccagggtgagtctccggatccgtcgccgtctggtatccgtgtgctctcgtcgccgtcgccgtcgccgccgtctgactgcccccctcgcctcccgcggcgtcgggtctctggtgctgctgctgctgctgctgctgctgcgtgcagggcagtgatggcgacgaagaggagcgtgggcaccctcggcgaggcggatctgaaggggaagaaggtgttcgtgcgcgccgacctcaacgtcccgctcgacgatgcccagaagatcaccgacgacacccgcatccgcgcctccgtccccaccatcaagttcctcctcgagaagggcgccaaggtcatcctcgccagccacctgggtcgtccaaaaggtgtcaccccaaagtacagcttgaagcctcttgttccacgcttgtctgagctccttggagttgaagtcgtgatggccaatgattgcattggtgaagaagttgagaagttggctgccgctttgccagaaggtggagttctgctcctagagaatgttagattctacaaggaggaagagaagaacgaacctgagtttgctaagaagctagcatctgttgctgacctttatgtcaatgatgcttttggcacggcacacagagctcatgcttcaaccgaaggagttaccaagtatttgaagcctgctgttgccggcttcctcatgcagaaggaacttgactaccttgttggagctgttgccaacccaaagaagccatttgccgctattgttggtggatccaaggtctcaagtaagattggtgtcattgagtccttgctggcgaaggtcgatatcctcatccttggtggtggtatgatctacacattttacaaggcacaaggatattctgttggaaaatctctcgtggaagaggataaacttgagctcgcaacttctcttattgagaaggcgaaggcaaagggggtttctcttttgcttcccactgatattgtagtagcggacaagtttgcagctgatgctgagagcaagattgtccctgccactgctatccctgatgactggatgggtcttgatgttggccctgatgccaccaaaacattcaacgaagcattggacaccaccaagactgttatttggaacggccccatgggagtgtttgagttcgagaagtttgcagctggcactgaggcgattgccaagaagctagctgagcttacaaccacgaagggtgtcactaccatcatcggcggcggcgactctgttgctgctgtcgagaaggctgggctggccgacaagatgagccacatttcgaccggcggcggtgcgagcttggaactcttggaaggcaagactctacctggtgtccttgccctcgatgacgcctagatccgctgctgctgctgctactcaggttctgccagctttgcgtgtcatcttgtttcggaccttggtgtagcactgcaaggctaaggtttactcctccgcacatggacttttggggataggcttgccaccgtgttttgctagatgagtcgtggaataagcttttacttcctcgctgctgtgggtgaagtgactggaattcggaaatttggaactaacaaaaccccccgtggatttgtatgatatgttttgttcgacagtttgcgtcccatctttc

SEQ ID NO: 670 - DNA, 1714 bp, Zea mays
  Clone ID: 700086107_FLI
ctcttggcctacacttgctggacctgtcggtgaacaatctcacaggtgagatacctgtggcattggtgaagaagctgacatccatggatcggttcaacttctcatacaacaacctgactgtttgcgcatctgagctctctgcggaggcgtttgccactgcatttgctcagtccaggaatgactgcccaattgctgtgaatccagacagtatcgtgaaaagtagagggaaacataagggaatgaagttggttctggctgttgtgctctccttgttcttctctgttcttgggttgctttgcttggcagcggcatgtcgaagggggaggaagaggtgtgatgagctgcctgtggttaagcaggtgtcgtcgttcgatgagcctgctgtatcagggccattttctttccagaccgattcaactacatgggttgctgatgtgaaggttgcaacttcggtgccggttgtcatctttgagaagcccttgctgagcctcacatttgctgacctcttggcggcgacatcaaacttcgacaggggcaccttgttggcagaaggcaggtttgggccagtgtacaggggattccttcctggtggaattcaagttgctgtgaaggtgttggtccatggatcagcaatcggagaccaagatgctgcaagggagctcgagcggctgggacggatcaaacatccaaacttagttcccttgactggttactgtgtggcaggggttcagaggattgccatctacgagtacatggaaagcggcaatctgcacaacctactgcacgacttgccgcttggagttcaggcaaccgaagactggagtggcgacacatgggaggacaacaccggtggtgtcgcaacaactgaaatcgtcacgccggaaggtactgcgacatggatgttccggcacaaaatcgccctaggtgccgcaagggcgctggcattcctccaccatggctgtatcccgcagattgtccaccgggacgtgaaggcaagcagcatctacttcgactgcgcaatggagcctaggctgtccgatttcgggctgtctatggtggcaggaaccagggccgatctgctacaccattccccgggctacgcgccgccggagttctccggctcggagaacgccgcggcgaccgccaagtccgacgtctacagcttcggcgtcgtgctgttcgagctggtcacgggcaagaaaccgctgggcgacgagtaccctggggtgcagaaggaggcgagcctggtgagctgggccagggcgatggtgaaggcgagcctcgcgccgagcatcatcgaccccaagatccgcgacacgggaccggagcggcagatggaggaggcgctcaggatcgcctacctgtgcaccgcggagctgccgtccaagaggcccgccatgcagcagatcgtcggccttctcaaggacatcgagccgaaggtggaagaggagggggactgaagatctggaggagtgtgatcggttgcaccttgcagcgtgtcggatggtggtgagatttgtgtagtgacagcgtcggcaggcaggcaggctgtgactgtgagtgagctcgtggttgttttaccatcgtcgagctcactatgccatgccttgctctgcatatatctttttcatccttctttcttccctttttcccgcttctatctcgctgattcctccagttgctgaagattattgcaatactgctctgttacatt

SEQ ID NO: 671 - DNA, 791 bp, Zea mays
  Clone ID: 700086121_FLI
gtctgcagcccccaactacccccagcctcggaaggaaccttccagaagcgcaagactctaaaggccgtcgccttcccattcttcctcgccgcgggggtcgcctgagatcacataaacaatggtgaaggctgttgctgtgcttggtagcagcgatggtgtcaagggcaccatctttttcacccaagagggagatggccctaccgctgtcaccggaagtgtctctggcctcaagcctggcctccatgggttccatgtacatgcacttggtgacaccaccaatggatgcatttcaactggaccacactacaatcctgcgagcaaggagcatggggcaccagaagatgagaaccgccatgctggtgatcttggaaacgtgacagctggagcagatggtgttgctaatatcaatgtcaccgacagccagatcccactgactgggccaaactcaatcattggcagagctgttgttgttcacgctgatcctgatgatcttggaaagggtgggcacgagctcagcaagagcactggaaacgccggtggccgtgttgcttgtgggatcattggactccagggctgaaaacgatcgccggacttgggggtgcctgagaggtccgtctcctgccgtccccagcagacgagcctgaacattcggagacatcgtgaaataagagcgtcgctgatctgtgatcatcgtatttgtcattatgcacctgtagcaaccgatggactgaactgtgctggattatgctgttggatcacctgagtatgtgttacatgtcggttttgatgtg

SEQ ID NO: 672 - DNA, 1251 bp, Zea mays
  Clone ID: 700086157_FLI
cgcgatgtcgcacttcgggaggtcaggcccgccggacatccgcgacaccttctcgctcctcgtcctcaacatcagcttccgcaccacggccgacgacctcttcccgctcttcgagcgctacggcaaggtcgtcgacgtcttcatcccgagggacaggaggtcaggcgtccgtttcaatttccgggccggtggttcgatggctgtttcctcaggttttgttcgtcggtggctcgcaggaccggggactcgaggggtttcgcgttcgtgcggtacaagtacgccgacgaggcgcagaaggctatagatcggctcgatggccgtgatgtggatgggagaaacatcatggtgcagtttgcaaagtacggccccaatgctgagccaatccgcaaaggaagggttaaagagggggttgagaaatcacaagacagatcaagaagccgcagtccaaggccaaggcacagagatagagatcatagaagccaaagtcgcagcaggagcagagaaaggcatgtccgtgatagagacaggggctatcgtcgtcggagcagaagtagaagccaaagtcttagttcaagccctgacaacagaagtcatcatagagcaagagatgatgataggcgcaagagcatgagtaagagcaggagcaggagcacaagtagaagccgctcatactatagtgcttcacctgcccggcacagtgctagccctcgcaagagcccaccgccacagaggagccccactcctgcaaagcatgccaatggaaaagattcacctctgtcacgctgtgtttctccattaccgaagcgtgcaacctcccgcagcccaggcagtgatggcaaggagtaaagcttgctgatttggtgatgcctagaaaacagccttctcacggagtcacgggattgcagaaccttgagaaggttgattgagcacaatggaagtagcagtctgcaatcaaccgcgatccaagttatctgttcgtgagatgggttgctgtttactggtaaaacggtattgcacgggaccaactatggtggatgatgtcttgctgtcattggtgttgatatggcaatggtgcagctgatgtgacgatgccgatgccgatgctgctgacagtgaccatcttgtttgcacaatgatcccttacaagttatgttggttcttatcgccccttctcgcagatgcttttgcatcagtgctagttggaacatggtgttgaggggtcaattatgacgggcatgggtcctgtttatc

SEQ ID NO: 673 - DNA, 611 bp, Zea mays
  Clone ID: 700086168_FLI
tgaagggttcagtggttaacatcacctctattgctggccttaaccgtgggcatctgcctggctccacgggatacgcatcctcaaaggctgctgtgcattatgccaccaagattatggctttggaattgggcgcggatcgcatcagagtgaactcgattgcacctggactcttcaaatcagagataactgctcctctgtttcaaaagaggtggttgagcaccgttgcttcaaagatagtgccgcttaaggagcatggcgctactgatcctgcattgacgtcgctggtccgttttctgatccatgaagcatcgtcgtatgtgactggcaacatcttcattgtagactcaggtgccaccatacctggtgttccgatattctcatccctgtaatccccccccttaaggtttagttcattgtaccttagtttcatatggttgcataaagcagacagttaaagactccatggaggaagcactgctggctgtatagttcattcccgacaatattccatcatttttgctgtccactattgttttaatgtattttctccagagacgcgtagtttggtacttgtatagaatgacaatctttaagatactcctttattgtct

SEQ ID NO: 674 - DNA, 312 bp, Zea mays
  Clone ID: 700086190_FLI
gagggagagcaccgagagcgacttccagaggtcccgccaggtgcgggagagcgcagaggtgcgcacggcgtcccggaggtcgaggcggacgaggatctcgtcctgcagctccgccgggagggaggagagccggtcgaccgcagccgccgcctgcttcgcctccatcacgcctccagttcaagagtctccgcctctccttttggcagcgactacagccgtacagcgtactaggctgccgccggcaaaggctccgtgcgtcggatcctctaacggtccagaaaggtgatttgattatcggcctataagctaccg

SEQ ID NO: 675 - DNA, 2293 bp, Zea mays
  Clone ID: 700086232_FLI
ctcttggatacatcaatggaccaccatatcctgggcctatccctcccatgtattattacatgcccactgtgcctatggattcgatgagaagtccatcacactacattcaaaatcaaccagctcctaatcctgttttatccccagaagctgctgagttaagatctaatatactaactcaagtggagtactacttcagtgatgcaaatctggagcgtgatgatttcctgaaatctttaatggatgagcatggttgggttccagtttcaaaacttgcagatttcaatagacttaagaaaatgaccgcagatatacacctgatattggatgcactgacaagctcaagtcttctagaagttcaggatgacaagattagaaggcgttatgattggtcaaagtgggtctcgctttctggtacatcagttgcgagcccatcatctgccagtgtgaatagcagtgtgggtgagaagaacattggtggtttttcaaataaggatgcttattctgaagatcaaaagacgcattgtcaatccaaagatattagatgtaatacagatattggtatgggggaaaaagttatcgatgaacaagtgcaagattcacatggttgttcattgaataacgacttttctgtcatcagtattgatgaaaagactaagaacctttctgcacatccttcacgcaaatatggatcttcttttagatttggtgaagttcagaaaacaaggtcgaagatagtacctaatgctcagagtgaaagaggtttctctattggtttcccaagtgccttctctagctttggtggtggtggtgaccagagcactttcttgcttgatgaggagttggaactggaacatgtcgaccattcacgtgatgacctccattcacataaaaggggtgatgatgaagatgaggacttctttgttgatgatcaagacgttagtaggctaatgattgttacacaggatactaggttagaaaaggatgacaaaaatcgcacaagtataccacaggcattttcaactgaggaagcttcaagaataagtgatgccttatactgctatgagaaactgcatggtcgatgcactgataatcaaagaagttcccaggctgatcctgcagatgctgattctaaaccaaccagtggttcaaagggaagccatattcgcactgggactaaagttactgaagaagcaggacagcccattccacgtaggcgccaaaataaaggcaacagaaaagcgcacagctcacgtaaacagagattctttgctggtaattttgtgaataatcctgatcagtatggtggtgtgtcagaaagccctccaggcaattcagttggatatttctatggatctactccagaaaatcacagttataaaagttcaaagctgagttcatctcctcatggaattcctactgggagctcgcctgttgggtctgtgcccaaatcttctccacaatctcagcatcttacttttcatcttttagaaaaaaataaactccagccgcaaaggtacaataagttcaaacatcactgccttatggagcgtaagaaattaggcactggccagagtgagcaaatgaactcactgtatcgcttctggtcatactatctgagagataattttaatgaagatatatacaaggattttaagaaactcgcactggaggatgctgcagcgagctacagatatggtctcgagtgtctattcagattttatagttatggtttggagaaaaaattccaacccaatgtatatgaagatttcgagaagcttactttcgaattctaccgtaatggtgatctttatggactcgaaaaatactgggcatttcaccattaccgaaatccagatagcggtcctgtagataaacttccagagctggagaggcttctgagggaggagttccagaccctagaggacttcaaggcaaaggagaaagcccgagcgacgacggagaaaggaactggcatcagtagcagcagtgtggtggtggccgcaagtcatagcaaggctgagactaagcaggtctgagtcccgcatgaaaattttcggtggtcgccccagcaaaaagaggaagtagcgttttctttttctttgcgaagaagtaatgattcgggtagacatgtgcagattttgctatatcccctgccagtgccgtgtgttgtggctgcccagaaattttccctccttttctcattaccttcctggcaccaatgtcaatgtgggagttgtacatagatatttttttcctctcttgttaaatggacatatcatagagaatggagttt

SEQ ID NO: 676 - DNA, 1089 bp, Zea mays
  Clone ID: 700086234_FLI
ataatggttatgtatgttctgcactttcaatcaatccatggtctcactgctgcccaacaacaggggaccgcttttcctgccagggctgcgaacttgatttacagtgctgcaattcatatgaatattgtgtttcttgctgtttgaatccttctaagatcaagaaagaagacgtgctgaagctgaaggtagctaagccagttactgctggaacatacacaaatgttttcgatttctgcatgggacgatgccgccatagctctgcaagtgtggttcatgaaaatgcctatgccagtgatttccatcactgtttttcagtgcaacaaaattcatcaggatcaactgagtctagttctgtatcaaagttgttgggcattaacgttgtagtaggaaggcccagggaatcttgcagcttggtgtgcaaagtaagaggacagtcctgtgttccaagcaggctctctgtgttgaacaaatgtgagattttgcagaaatatatgagatgcaagagtggctgctttcccagccttggaccagatcaacctgctgaagttgttgacgaagctccaaccagcttgaatccaggagcatgcttatacatgcagatggatgagcggctcacatgtgatggttcgcaccatcatacccggcggctctgtccatgcgcctgagaaggggaaatgaatgtgacactcataagacagcagagggcttgcttactcgacaggaaacaagtggaggcgataagctgataaccgatggttctccatcacacccccatgacgaacaacctctccacgcaccggttgcgggtttcctcaacaagaacgccctactctcctcctgtttctgggaaggattatggatgcaaaatgaaatggagtgcctgcaaagatctgctccggttcttgagaagcgtcgtggatgcagaaggagatgcaatacctttcaaatccttgcatggtatctggtaggattttgcatgctgaatgaaaatgcacgcaggcgattccatgagcctttcatgcatgttttgagacacctgaaccaatttatatattcgtaatatattgcacaagcttccatgcatgtttt

SEQ ID NO: 677 - DNA, 1770 bp, Zea mays
  Clone ID: 700086255_FLI
gtctcctgtaaacacccgcccgctagtgccaactgccaaccacctccaattacttcacagcagcgcggcgccgagaagatggcttccccctcgtacaggcttgcggcggcgatcacggccccctctaccggcgagttcctcgtcgtccggcagccgcgcccgccatccccacccgaggaggaagaggattaccggcgcttcgtcgacagcgatctctacgacctcccgtccgcgcccctcgggccactcgagggggcaccccggtcggaggtggccatcggcggcgcggactctgtcgccagccgcctcgacctctcgcgcctcgacgtgtccgccgcccttgatcagatttttcaccaatttggcttgccggttgggatgagtggggagtggaggctcctgaagtatgtggaggaagcagaatttggcccggatgctggcgttaacacggtgtacattgtcggatctcttgagttgagattggatgatctgccagagtcatgtaaatggatgtccaaggagtgtgcattgaggttgctttcggaagcgaaaccaggtaatgatcgcataggacagtatgcatatattggacttctgaattcggagctgtcatcaaactgcacagcttctcctgcattgcccttccaggaatatccacctgtaataacacttgtacctatgaagagtaggacactagcgccattccgtacaactaatcttgtggtagtacgatcaaccaatggtgctggtggatctacatgttctgatttttttgcttcgggggaagctctgcttatagatcctggatgcagctctcaggttcatgcagagcttgcagatctcattgattcccttccaaaaaggttattagttcttgttacacatcatcatcaggatcacattgagggtctttcagtcgttcagagatgcaatcctgatgctgttcttctgacacaccaaagtacaatggatcgcatcgggaaaggaacttggcagattgactacacttcagtaactggtggtgaaaagatatgcataggtgaccaagaactacaagttgtttttgcacctggtcatacagatggtcatatggggcttctccatgtaaataccaatacattggttgttggagatcattgtgtagggcatggtagtgcaaccttggatagtagaaatggtggcaacatgaaggattactttgaaactacatacaaattcttggagttgtcaccacatgtattaattccaatgcatggaaggattaatctatggcccaattatatgctttgtggatacctcaggaatcgaagggctagagaagcgtccattctgcagtctatagagaatggggcccaaactctttttgatatagtttcgaagacttacagtgatgtcgacaggaagttgtggattcctgcttctttcaatgttcgccttcatgttgatcatctgagctccctacataaattgcccaaggatttctctttggaaatgttcagtcgaagttgtgatgattttatctctagagtttgatggcaagtacgagaaaaggatcttctaattcactgcgttttgattgcatttaagctgctccgttcaccatttgttgttttattatgtgcatgacaccgaacaattcaatgatggggaacgaagtcttgtaataatccgataaatatgtagactggacaccaaggctcacacttccgaaaatttgtaagatttaacaactcgaatatatgcaggacttctcattggagaactttaagg

SEQ ID NO: 678 - DNA, 1974 bp, Zea mays
  Clone ID: 700086323_FLI
caaataaccattcacggccgatccctaaaccccacaaagcaaagcagcctctctctctctgtctctctctctcgcctccctctcgcctccctctcgacgacgatctcaggcgctcgcggggagtcgagtcgagaccagcttcgttccttcataaaaagctcacttagttgttgtccccgcctctttttttcgctgttcttgtttgattacatcatcttattttgtgcttgaatctaacctgccattaagtttttatcgcttcgttatttctctgttgtgcttgtcttgttcttttgttgctctaaccatggacgcaggctcccgctcgatctcctcggcgaagaaccgcgccgccgccgtcgccgccgcgccccggccaccgctgcaggaggcgggctcccgcccctacatgccatcgctgagctcgggaccccgcaacccgtcggccaagtgctacggcgataggttcatcccggacaggtcggcgatggacatggacttggcgcactacttgcttactgagcccaggagggacaaggagaacgcgtcgggcatggcggcgtccccgtccaaggaggcgtaccggaggctgctcgcggagaagctgctcaacaaccggacacggatcctcgctttcaggagcaagccgccggagcccgagaacgtttcttttgcggacacgacttcctccaacctgcaggccaagccggccaaacagcggcgccacattccccagtctgccgagaggaccctagacgcaccagagctagttgacgactactacctcaacttgcttgactggggaagcaacaacgtgctatccattgctttgggagacacggtgtacctgtgggatgcatcgagcggatccacatccgagcttgtgaccgtcggcgaggacagtggtcctgttacaagcgttagctgggctcctgatggtcggcacatggccgtcgggctcaactcgtctgacgtccagctctgggacaccagctccaaccgactgttgagaacactcagaggtgcgcatgaggcaagggtaggctcgctggcatggaacaacagcgtcttgaccaccggttgcatggacggcaagatcgtgaacaatgacgtaaggattagagaccacgtcgtgcagaggtacgaggggcacagccaggaggtctgcgggctcaagtggtccggatcagggcagcagctggccagcggaggcaacgacaaccttctgcacatttgggatgtgtcgatggcatcatccatgccatctgctggccgcaaccagtggctgcataggctcgaggaccacatggccgccgtgaaggcactcgcgtggtgcccgttccagagcaacttgctggccaccggcggcggtggcagcgaccgctgcatcaagttctggaacacgcacaccggtgtgtgcctgaactcggttgataccggatcacaggtgtgcgctctgctgtggaacaagaacgagagggagctgctgagctcacatggattcacacagaaccaactcaccttgtggaagtacccatcgatggtgaagatggctgaacttaatggccatacctctcgcgtcctcttcatggctcagagtcctgatggatgcacagtagcgtcggctgctgctgacgagaccctccggttctggaacgtttttggaacccctgaaacgcccaagcctgcagccaaagcttcccacactgggatgttcaacagcttcaaacatatccgataggatgagtcaagactattattggatattgtctatacttgacttgatgatggcctgtcgttttcggaaggtcagaaatcaatgacacagggtttgcttcagaaatcagatgtaatgttttttcctcatttttggttggaacatcaagggcgcttgtttgatgtaccaattattgtaaatcaagacagcaatatatataaattgatattttgtcggttggatttggaaattgttgt

SEQ ID NO: 679 - DNA, 1209 bp, Zea mays
  Clone ID: 700086332_FLI
tccttttgcgcggaggctgttggagcgttggatagtgcgcggtgccggcgaggacacctcgcactcgctcgcagtccaagaacgaaggcagcctctgtttccttccgaccggcgatgaggaacccgccgggcaggcacctcctctgtctcagcagccgcgccgtgcgctcttcctcctcctcatcggcgctcggccccggacccggcgctgttacctccgccgcgtccccacgcccgcgcgccatcgcgcccgggcggcccctgcgcgccagttccccatccccgccttacgcagtcgccgccgccgcgtacgtggaggacggggactgggaggaggtcgtcgctggggggcctggtactggggagatggaggaagaacaggactacagggtggtgttctggtccccgccgaccatagacgaggttaccggcgcagtcaccagcatccagcaagtatttgagaatcctcttggactggattcagatacaactgacagacagacaacactactgtctgcatcaggacattcatctggcaattcatcaggatcagatgactggattgaacctgctgcctatgttcttaactcaactgctcttctgtcaagggaacataggaatgttgtggatgctttccgtctgttgcaaaaggatcccaccgttcagaaaatggttatgtctttgtcatgcgataaggctgtttggaatgctgtcatgaataacgaggcagttcaagatttcaggagatctttacacgatggaaaagaaaatgatagaaacgaaaacactggtggtcctgctgaagtgttcaagtggatcctggaaagcgcccaggcaaaaatatttgaattcctagagaatgttcagaagataatcaacatgctgatccacactccagaggatgatgataatccagatggatacagcgatgcagttaaggtgtcgttcatgctcacggtattcgtcttcatcgtggtggccattgctcgtatcaagtgagcacaacaatccgccgactttacatatttctaggttccattgtcccttgattatacacagggcaactctagttagttagtcagattgaggtcatggaaaggttgactggccaataaatttaaattgatattgtgccgtcgtgtggaattatgatatgtcctagggatattaccattattatccttgcattcagcgtgcttatgctttttc

SEQ ID NO: 680 - DNA, 2326 bp, Zea mays
  Clone ID: 700086365_FLI
gggttctgtatacaattcaggaaaggctgtttcttcccacagtatccataataaaaaaataaagtgccctataaagtgctcttgcccctatcctggcattgcaagtctgaggtttgacctcacggcaatcatgtccacacaaggcatgacaaacagcaatagtgataggcatttgaaagatcatctccatagtgagaatcctaaagaaatgttgcagcctggaactttagacagtccttctcgtgttcatgaaatggatagcccctctagagagtcattggaagggtgtttacttcgatttagcctctgttttttgcatttatgggatgttgattgcgagctagacaaattacttgtagatgagatgcaagtttgcaagccagaaggctgccatatagcaactggggtggtaggagacaaaggctcatttacattgatgttcccaggcaaagaagccactcttgagctttggaagtcttcagccgaattttgtgccatgaggtcactgtctataatatctcttgctcaactcatgattaaattatctcgttcttgtacaaattctagcagtgctttggcagcattttatacaaggcattttgctgaaaaggttccagatataaagcctccatccctacagcttttggtgagcttttggcaacacccttcggaacatgtgcgaatggctgcacgttccttgttccactgtgcagctccccgttctattccacaaccactacgagtaaacaaaaataaagtggtcaatgcccccttgtcttcatcagataatatgaatgttcttatatgtgctgtgcagactgcctctgtatccaatcatggagagttgaaggaagatgatgaaaatgttgataaagatgatattgacactgctaatatgatcttatggttggaatcatttgaaaatcaggagtggttatcatggataggaggcacaagccaggatgcagtggcgtcaaatatcatagttgcagctgctttggtcgtttggtatccaagtgtcgtgaaagctaaactttcaagtttagttgttagtcaactaatcaagttagttatgtcgatgaatgatcgatatagttcaactgcagctgaacttctagcagagggaatggaaaacacttggaaggcatgcttgggtgctgagatcactcattttatgagtgatatccttttccaaattgagtgcctaagcactgcaccttctagcaatgctatcaataaaactgcagtggccattacaatgcgagaagcattggttggcacccttttaccaagcttggctatggctgatgtaacaggattttttggtgtaatagagagccaaatttgggctacttcgtctgattcacctgttcatgtcgcttcaatcaaaaccattatccgtgtagttcgaggtgcgccgaagtccttggtcccatacctcgacaaggcaatcaactacattctacacactatggatccaagcaatctaataatgcgaaaagcttgtattatcagttcaatgatggctctaagagaaatggcacgtgtatttccgatggttgctctcaatgagtcaatgacaaagctagctgttggtgatgctattggagagatttatgatggtacaattcgagtctatgacatagaaagtgtcacaaagataagaattcttgatgcaagtggaccaccaggccttccaagcttacttgcaggatcatcgaatagaacaacaaccatactgatatcagttctgagtttctcaccggatggagagggtctggttgccttctctgagaacggattgatgataagatggtggtccttaggtagtgcctggtgggagaggctgagcagaagccttactcctattcaatgcacaaagcttatctatgttcctccatgggaaggattttcacctaactctgctcgcttgagtataatttctagcattttagatgataaacctggaaggtcagagaaggaactaggcgaggcggataatctgaagttattgcttcataatcttgacctttcataccgtcttcactggattggtggaaagactatcaaacttacgaggcatggccaggatttgggtacatttcagttgtgatgggcttacccatgaatattgagttgctttgtagtgttgaaagacagctaattcgatggctggcaagtctaacaagaatcaccagtacattcatatgtcatgtgaggtaccttgatgtttctttgactgttaaaagcattgtctggtacagttcataaattggatccctatgtatggtaaataaaaaaactgaatgcaatttgattccatgtt

SEQ ID NO: 681 - DNA, 1689 bp, Zea mays
  Clone ID: 700086369_FLI
ggcacagaagtagcttactatgttgatgggcagagaaaggttgacgggtatattaaggatcaaagaatctactgtaatcactgcaacaaagtggttagcccatcagcatttgaagctcatgcgggtgagggatcaaggcgcaaaccgtatgataacatattcacatcaaacggagtatcattgcatgagctggcaatgaaaatatcaaaggatatggaactgtcagaacgtgagactgatgatctgtgcagagaatgtggtcagggtggagatattttcccatgcaaaatctgtccaaggtcatttcatccagcttgtgttggactctctaaagtcccctcagaatggtactgtgataattgtcgcaatcttgtccaaaaagaaaaggctttagcagagaacaaaaatgctaaagctgctgggaggcaagctggagttgattccattgaacagataatgaagagagctatacgaattgtccccatctctgatgatcttggaggctgtgctctatgcaaacagaaagatttcaacaatgctgtgtttgatgagcgcactgtgatactctgtgaccaatgtgagaaagagtatcatgtaggatgcttgaagaatcaatggcaagtggaactaaaggaattgccagagggggagtggttctgttgcagtagttgctctgagacacgatcttcattagacaagataatctccgacggagctcaactgttggtggagccagatcttgaaatcataaagaagaaacatgtgacaagaggtttatgtatggacaccagtaaagatctcaaatggcaattactttctggtaaaaggactactgaagacggaagcatattgctctctgctgcagtgccaatttttcatcaatcttttgatccgatccgtgaagctctcactggtagagacctgattccagagatggttaacgggaggggacctaaggagggaatgcctggacaagattacagtggaatgtactgtgcactgttaactgtgggctctactgtggtgtcggcagcacttttgcgtgtgatgggaggtgatgtggccgagctgccactagttgctacaagccaggatgttcaggggctgggctactttcaagccttgttctcatgcatcgagaggatgctagtttcgctgaagatcaagcactttgtgcttccagctgcacacgaagcttgaagggatctggatgaagaaatttggattctctaggaccactccggaagagctggaagcttatcttaatggggcacacctgactatattccatggaacatcatacctgtacaaggctgttccaatgtcatgatatatgggatgaaaaagatatgggtgttgcaatagctagcaggattttgtcttgtcttttctggagtcgctattgtgacgtacataaagagttgatgaggaaacaaagcattggcaagacaatgaaaggttggtatacaggagctggaagccaaggggaagaaaagagctacaagaggtctggattagttttctttctttgtttactcttgaatcgagtgtagtggcgctggggttggcaagtggtggcacacctagcaaattttggtgtaatactagatgcaatgcaattgaagcagttccgtgagtcctggtccgatagccatattttgcaattgaattttgatgtgtttgacaccg

SEQ ID NO: 682 - DNA, 1736 bp, Zea mays
  Clone ID: 700086393_FLI
tctacaaggccaagcctggcattgaagaaagcatgcctactcaaaatgactctgtactgaaggtatcaagtgatgtctcggtacacgttcgtgaagagggaacttctgtcacagagaatagagctgaatctcttaatactgttgcgaaggatgttgaaaccagattatctcaggccatagcagagaaagcaaaagctgaaaaacttattgaagaactagaaaaggcatctccgctttcaaaggctgaagttagagagactatatcagaagatgagaggtacatgttgaggaaagttggattgaagatgaaacaatttctgctgctaggtcggaggggagtttttgacggaactattgaaaatatgcatcttcattggaagtatcgagaacttgtgaagattatatgcaaagaacaccgccttgaagatgtggaatacgctgctcgaactctagaggcagagagtggcggtattttggtggcagtggaaaaagtgagcaaagggcatgctataatagtatataggggaaagaactacaagagaccatcaaaactcaggccaaaaactttgttgagtaaaagggatgctttgaagcgttccctggaaaaccaacgttgtaagtcccttaaggttcatgtacttaagctgtcaaagaacattgactacttgagggatcagatgaattccagctactatcacaaggacatgcatgatcctagtgtcaactctgtaacactacagcagcaagacgaagaaatgcctgaagttgctcccatgagttcagagcctgaggttgagaagtggacatcagttgagattgatagagccttagatttaacaaagtctggagtccctgtggaagatatgcagagcaaagtctgtttcaacaagcttgaagatgattcttctgcgactgcaggtccatgtctgactgggagttcaattgcagcttcatcctataatctgatcagacatcaaaaccaacgtagctctactgtgacatccagtcctgatggtcgctacgaaggtgcaccttcaaaagtcgtggatgcgccaaaattggatgcggaatctctttctgtatcgcctttgagagccgcaccgctctcgaatcaagaaaggcttgtgctaaggaagcaagcccttcaaatgaagaaaagacctgtactttccatagggaggaacaatgccatcaccggagttgcaaaaaccataaaaacgcacttcaagaagcaccctcttgctatcgtgaacatcaagaacagagcggacgggactccgattcagcagctgatatcggaactcgaggaggcgacaggatcggtgctagtgtcacgagaaaccaacaaagtgatcttgtacagaggctggggcgcagaagtggcccagaaaagctcaagggaaagtagcacagacgagggcgaaaaggaggtcatatcacctcagctccttgaagctatcaggttagagtgtggactgctccctgccgattcgggatagttggtccggataaccttcccccacagatcccgtgtttcgaaaggatcgtacaatgattgcccgcggatagatccgaagctgcataaacgcacgcaaggtgtgaaaccctccctgctcacgggcatagttgtaagagaagaacaggggcggcggcaggggtattcttaggtattccatgggatgcccttttttgtgaaagaaaagaatatgtattgtctatactaaaatatttagttc

SEQ ID NO: 683 - DNA, 1281 bp, Zea mays
  Clone ID: 700086438_FLI
gatgactgaaaaacttcggcacgaggaaaaggaaaatgcacagctgaaccaaagcttgcagctgatgcagctcaagtacgcttctcgtgagaatgtcttcaggacactaaacgaaaaggtgaaggatgctgaacaagcatgcagaaattatcagcaacggattagagagctggaaagtgaattaggcaatgagaaaagggtttctagggattctgctagatcctcaaggccgccacttgttcctacgagacagaagcagcctcacggaaggaacgcgccaccttcaggcccttctagatggaggctcaaagcccccacaatccacaacaaagagaacattcctgtgacgatgagcaaatcaaatcctggggatgacactaataaggctgttggcagagcaaggcgcgtttcacttactccggtgattcgacaaatccccatccagcccaagaggcggtcttcgatagcaatactaccatctgtgagagagcatctttctgtgctaaacgaaaagagagcagcttctcgactgtcgcaagtcaacatgccaagaagatcagtcgcgacctttggtttgaatttgggtccaggaacacccctggcaggacatggtggacctgttgacgccaccccagacggagcaaagttcaggagatttgatctaggaagcagcagcagcaagttcacgagccctcctccgaatgtcaccccgcagcggaagatgggaatggcaccggcgggaggtcctccaaacgcagccaagctgtgcttcagcatccagaaaagagttactcctgcacatgttcgggcaaaacctggtatgggcatctttgacccagctcttcgtgagaatatggttgtggggagaaccggcaacgcgctgcgggtgctcaacggcaagaggagacagtctgttgtctaactctggtactgcaaacgtttggacgttcgaacggagctgcagtgtgttgagaatgatggtgcctttcagcttgttcttagtgaaaccgtattaggacagaagatattcttctcagcatccgtaagggcttgtttgggtaatattggagtggagtggattgaggtggtataaagtgtatcgaagtgtaatatgaactaatttccttttcaatccctaaaatacacttcaatccacttcaattcctctttatccaaacaaggcctaaatagattttgattagttcttactagttgataagaaagctatgttatggaagtcgtcgattgtatttttcgttactaagaatcgcttgctagtgc

SEQ ID NO: 684 - DNA, 978 bp, Zea mays
  Clone ID: 700086442_FLI
ggcgcgcggcgtggtgggcaccgactccgcgaccatcgcgctgtccgggagcgagagccgggacggcggcggcaggcgcgcgaagctgcagggcgtcgtgctgggctgcaccgcgtcgtacgacggccagagcttccagtcctcggacggcgtgctcagcctgggcaacagcaacatctccttcgcgtcccgcgccgccgcgcgcttcgggggccgcttctcctactgcctcgtcgaccacctggccccgcgcaacgccaccagctacctcaccttcggcccgccggggcccgagggcggcgccgcggcgtccagcagctcctcctccgccgcagcgcggacgccgctgctgctcgaccgccggatgagcccgttctacgccgtggcggtcgacgccgtgcacgtggccggggaggcgctcgacatccccgcggacgtgtgggacgtcgcccggggcggcggcgcgatcctcgactccgggaccagcctcaccgtcctcgccaccccggcgtacagggccgtggtcgccgccctcagcgagcgcctcgccggcctgcccagggtctccatggacccgttcgagtactgctacaactggaccgccgccgcgctggagatccccgggctggaggtgcgcttcgccgggtccgcgcgcctgcagccgccggccaagagctacgtcgtcgacgcggcgcccggggtgaagtgcatcggcgtgcaggagggcgcgtggcccggagtgtcggtcatcggcaacatcctgcagcaggaccacctctgggagttcgacctcagggaccggtggctccggttcaagcacacgcgctgcgccctatgatgattgctcacggacgccgcgcatcattcctctatgccttgataaaatttgtgacgagtttggagggagttgggtttttttttcctgaatgaatgaatgaaaatataatttttagcgcaaagggaaatcgttcaccttgc

SEQ ID NO: 685 - DNA, 1007 bp, Zea mays
  Clone ID: 700086563_FLI
ggtagaaaccccccggaaacaatttccggccatggcgaccgcagcccaccaggttgccgccaccttcctctcgtacctttccccctccactcaccacctcgccccttcctccgtctccctcgggacagcctctgtcctacccgtctcccttcgggtcgctggcacaggtggcccacggctcgcctaccgcctccggggccgccgcgtcggtgccgccgtcgcccagctccccaccacgcatccagaggtagtttctggggagaagaagatcagatggtcatcaagggctgtgcggtcttttgcgatggcagagctggaggcccggaagatgaggtaccctacgacaggcactgaggggctcctcatgggcattcttgttgaaggaactagtggtgcagcaaaacttttgcgggctaatggaatcacacttctcaaagtgcgtgaggaggcagcgaatgtgcttgggaaatcagaaatgttttactttagtcccatgcatccaccattgacagaagctgcacagcgagcccttgattgggctgtcaatgaaaaattgaaatcaggtgaggatggagaagtaaatgccaatcatttgctactggggatatggtcagatgacgagtcagctggtcataaaatcctgtattcgctcggatttgacgatgtgaaagccagtttactggccaaaacggctgacgaggaggctgcaatgagtcctagatagcaaagggagcacctaatctgttattcaacttacaagagatgtgttagggtcaaatacgatatttgtactctcgcgattgccatgccggtgcctgtaaaaacgttgcggtttgtttgccacggtgaatgcttgtgttcctttgtcagctggatttgtcatcagctcataggaaaagaaaagaacttgtagggtccagtgggcctgacgagcccttcaattttttttgttcactttgcagcctgaatcctaacaggcgagaatttcatctgaactgtgatattac

SEQ ID NO: 686 - DNA, 1739 bp, Zea mays
  Clone ID: 700086591_FLI
gctccggcgaccccggcgggcgccgcgccttcgccgagttctccagctccatcgtgcgcaaggcgccgccgctggagcgcaagctcgagtgcaccctcgaggagctctgccgcggctgcaagaaggaggtcagcttcacccgcgacgtcgtcaccaagaacgggtatctgctcatctgcgctgttttgctctgcctaactgaacaaggttgacgcgaaaccttgctagaaatgaagaaatccggtgagctatcgcttgtcggtagattattattatttttgtttccaagacaacgaacggagcggagaattttaatcgaggaagggctttgtgtgccgacgtgggttcagattttaacagtgaatcaatcgatgcttggaaaactaaactcgaggttaggcaagaattcagaaccggctctgatggcgacagacattccactcggtgtagtggttgtggcacccccccccccccccccaattcgccgcactgttcggtagctcctgatgaacagtgcaccatcacaatcagtttctgttttttttcttcttcttttcaacaacaaggtcatggcgcgagcacttgtgttgtgtttttacagtggggggggagggggggggggggggtcgggtcactgcttttgtaccaccaccttgcatttgccagtggaatatttagctacctttgcaacgtcatagtaggccgtagacgtgaagcctttttacaccagtgggctttggtgcgagactccttttcccccccctgcaggtatctatgctattcttgcaagattatcctacctaacacaaggtcacgataacaatgtttcccaacgtggttagtatagtacagctagcttgggatcctatctccactacataatcctaacacaaggcccaagatgcttctttcgccacatatgcgttttagtacacgcgttttggatgtattcatatttgtttccttttttttacacgtgagggtgacagtgactcctgagcaagagcatccctcccttcctccttgttcctatggagggagactaatcgcaactagcctaatggctcgaagtacgtgctttttgtttgtgcaggtcaaccgtgaagaaggaggtgacacagacggtggtggtgaagccagggtggaggaaagggaagcaggtggtgctggaaggcatgggggacgagcggccggggtgcctgcccggcgacgccatcctcacggtgtccgagaagaggcacccggcgttcaagcgggtgggcgacgacctggtgctcaaggcggaggtgccgctggtgggcgcgctcaccggctggtccttctcgttccgcctcctcggcggcaggaaggtgagctgctcgttccaggacgaggtcgtccgccccggctacgagaaggtgatcgccggcgagggcatgccggtccccgggcagaagggcgcgcgcggcgacctgagggtcaagttggacgtcgtcttccccaaggagctcacccccgagcagcgcgccggcctcgccgagatcctcagagggtcctgctgatccatcggccccagttccaagcgtatcaagttttcttggccgtgtccgtgtgttaaattttaatatgtatactcatagcgcgtgtgatgagtatataagtacataaagagagaggggagggggcgtcgttgtacatacaggtcgtttatatattatatatgtaaggataaaaagaaatatgaaacgtgagccaaagcc

SEQ ID NO: 687 - DNA, 2373 bp, Zea mays
  Clone ID: 700086688_FLI
gtacgtgctcgccaacaagttcttcttcgagaaggtcgtggaggtaatcaacccggaggatgactacgtctgggttcacgactaccatctcctggcgctgcctacctttctccgccgccgcttcaaccgcctccgcatcggattcttcctccacagccccttcccctcgtccgagatctaccgcaccctccctgttcgcgacgagatactgaaggcgctgctcaattgtgacctcattgggttccacacttttgattacgccaggcacttcctctcgtgctgcagtaggatgctgggaattgaataccagtcaaagcgtgggcacattggattggattactttggccgcactgtagggatcaagatcatgccagtgggagttcatatgggtcagttggagtcgggtctgcgcttgcctgatagggagtggaggctttctgagcttcaacagcagtttcagggcaaaactgtcttgcttggtgtggatgatatggatatctttaaggggatcaatttgaagcttcttgcatttgagaacatgttgagaacacatcccaagtggcaggggagagcagtgttagtgcagattgctaacccagcccgtggaaggggtaaggatctggaagccatccaggctgagattgaggagagctgccagaggatcaatggagactttggccagtcagggtatagccctgttgttttcatcgatcgtgatgtgtcaagtgtcgagaagattgcctattatacgatagcggaatgcgtggttgtgactgctgtgagggatgggatgaacttgacaccatatgagtacattgtctgtaggcagggtgcaccaggatctgagtcagtatcagaggtgggtgggccaaagaagagcatgctggttgtgtcagagtttattggctgctcgccgtcactgagtggtgctattagggtcaatccatggaatatagaggcaacagcagaggcgatgaatgaggccatttcaatgccagaacaggaaaaacagttgaggcatgagaaacattaccgttatgtcagccatgatgttgcttattggtcaaagagcttcatcctagacttggaaagggcttgtagggaccactttaagaggacatgttggggcatagggttgggttttggtttcagggtggtggccttggacgctcatttcagaaagcttaacatggattcaattgttaatgcttatgagatttcagggagcagggctatattgcttgattatgatggaacactggttcctcaaacttcaatcaacaaggaacctagtccagaggttttgaacatcatcaataccctttgctcagatagtagaaacatcgtttttcttgtcagtggtagagacaaagatatgttaggaaagtggttctcctcatgtccaaaattggggattgcagctgaacatggttacttcttgaggtggtctagcgaagaagagtggcaaacatgcactcaggccatggactttggatggatgcaaatggcaaagccagtgatgaatttgtatacagaagcaactgatggatcctacattgagacaaaagaaagtgccttggtgtggcaccatcaggatgctgacccaggctttggatcctcacaggcaaaggagctgcttgatcacctggaaagtgtactagcaaatgaaccagtctctgtcaagagtggccagttcatcgttgaagtcaaaccacagggagtaagcaagggaatagttgccgagaggatacttgcatcagtgaaggagaggggaaagcaggctgatttcgtattgtgcatcggcgatgataggtccgatgaggacatgtttgaaaatattgccgatatcattaagaggaatatggttgctccaagaacatcattgtttgcatgcactgtgggacaaaaaccaagcaaagccaaattctacctggacgatacatttgaagtggtcgctatgctgagcgcacttgcagatgccactggagctgaactggaatctgattcggctgatgaattggccgcatctatctcatcacttgatattggtgacgaacaatcagaaaccagtgatacaccaattggagggtcttagtcagttttctcttgaatttcagaatataatgattatttcaatagtcaattctacagaggggaagcttctcaatctgctgcactccaagtttctccagttgggcaagatagtagtctgttgctgcaaggcgtagatccatatgttcatagctgactcgccgacttggcatattctttgactttctcatttctggttgaagtaaaatgaaagcctcacagaaggaaagggaactgtgtggctgaagtaattggggggaagttataggagtggcaatttct

SEQ ID NO: 688 - DNA, 1758 bp, Zea mays
  Clone ID: 700086788_FLI
ccacctcctcgaagccgccgcgaccgatcgagcgaagcgtcccttcccgcgccgacgccgaaaccctagctcctcttacgccatggccaccgtgtcgctcactccgcaggcggtcttctccaccgagtccggcggcgccctggcttctgccaccatcctccgcttcccgccaaacttcgtacgccagctcagcaccaaggcacgacgcaactgcagcaacatcggcgtcgcgcagatcgtcgccgccgcgtggtccgactgcctcgctgctcgccgcctccgcggcggcggatgtcagcgcaattcctaacgctaaggttgcgcaaccgtccgccgtcgtattggccgagcgtaacctgctcggctccgacgccagcctcgccgtccacgcgggggagaggctgggaagaaggatagccacggatgctatcaccacgccggtagtgaacacgtcggcctactggttcaacaactcgcaagagctaatcgactttaaggaggggaggcatgctagcttcgagtatgggaggtatgggaacccgaccacggaggcattagagaagaagatgagcgcactggagaaagcagagtccaccgtgtttgtggcgtcagggatgtatgcagctgtggctatgctcagcgcacttgtccctgctggtgggcacattgtgaccaccacggattgctaccgcaagacaaggatttacatggaaaatgagctccctaagaggggaatttcgatgactgtcattaggcctgctgacatggatgctctccaaaatgcgttggacaacaataatgtatctcttttcttcacggagactcctacaaatccatttctcagatgcattgatattgaacatgtatcaaatatgtgccatagcaagggagcgttgctttgtattgacagtactttcgcgtcacctattaatcagaaggcattaactttaggtgctgacctagttattcattctgcaacgaagtacattgctggacacaatgatgttattggaggatgcgtcagtggcagagatgagttagtttccaaagttcgtatttaccaccatgtagttggtggtgttctaaacccgaatgctgcgtaccttatccttcgaggtatgaagacactgcatctccgtgtgcaatgtcagaacgacactgctcttcggatggcccagtttttagaggagcatccaaagattgctcgtgtctactatcctggcttgccaagtcaccctgaacatcacattgccaagagtcaaatgactggctttggcggtgttgttagttttgaggttgctggagactttgatgctacgaggaaattcattgattctgttaaaataccctatcatgcgccttcttttggaggctgtgagagcataattgatcagcctgccatcatgtcctactgggattcaaaggagcagcgggacatctacgggatcaaggacaacctgatcaggttcagcattggtgtggaggatttctaggatcttaagaacgatctcgtgcaggccctcgagaagatctaagcactctaatcagtttgtattgacaaaatcatgaggtgatggctgtcttggatcttgtcaagatctgtgacaatgatatatgagctgatgactgcgaataagttctcttttgcttattttattcgtcaaattcaataagctgtgattgctgcatgatctagtgttgggcttagttacacttgtcaagttaaattggtctggaaccatgtatacttgtagtttt

SEQ ID NO: 689 - DNA, 3524 bp, Zea mays
  Clone ID: 700086876_FLI
cagaaagcaccctcaagtgcttctcagagaacagcgagtacatttcgcagtgccaatacatattggacaatgcctcaactccatatgccctgatgctggcgagttcaagcttgctgaagcaagtttctgaccgcagtctttctttgatgctccgtctcgatatacggaattatgtcataaactatcttggcacaagggggcctaaattgcagaactttgtcattgtgtccttaattcagctggtctgtcgaattacaaaatttggatggtttgatgatgacagattcagagagactgtcaaggaagcgactgattttttaggtcttgcttcccaggatcattatttcataggcttgaagatactaaacaatctcgttacagaaatgaatcagccaaaccccgcgatgcctttgacgcttcataggaaaattgcgggttcattcaaggatcagtttcttctgcagatcttccaaatttcgttaacctcactaaaccaactgaagagtgaagctccggatgactttggacatattcctcttgaccttgccttgaagtgcttatcttttgactttgttggttctccggtggacgaaagctctgaagaatttggaacagtgcagcttcctgcatcttggaggcctcttcttcaagatccttccacactccaaatcttttttgattactacaaagtcaatgacatacgggtttcaaaagaggccttggagtgtctggttcgacttgcttctgtcaggcgcagtatttttgtggaggatcctgcaaggtcccagtttctttctcatctgatgctaggcaccaaggagatacttctaactggccaaggacttgctgatcatgacaattaccatgagttctgccgtctttgggacgtttcaaagtgaattaccagctggcagagcttttgaatgttgagttttatggtgagtggattggtctagtagctgaatttacaactagatccttgttgtcatggcagtgggccagcaacagtgtctactaccttctaagtctttggtcaaggctggtgacatccgtgccttacttgaaaggtgaaacaccaagtcttcttgatgaaactgttcccaagatcacagaaggttttatcacttccagaattaattctgttcaggccatccttgctgacaactcactggaaaatcctttggatagtgtggaagttctccaggaccagctggagtttcttcctttcctttgcagattccagtaccaaagtagtagtctgtacatcataaacatcatggaacctcttctgcaagcttatacggaaaggtccagattacccgctcctggtgatgctgatgagctgtctgtcattgaaggccaaattgcatggatggttcacataattgcggccattgtcaaagttaggcaggtaacaggtgttagtcaagaaacacaagagttgattgacgcagaactctctgcccgtgtactacagttgataagtgtgactgatacaggagcgcacacacagagatatcaagaattaagtaagcaaaggcttgaccgagctattctcatttttgtacaaagtttcagaaggtcatatgtaggagaccaagctatgcattcttcaaagttgtatggaagattgtctgagcttctaggacttaatgaccatttaattctactcaatgtgattgttggcaaaattgctacaaatatgaagtgctatgctgagagtgaggatgttattgatcatactctgtccctgttccttgacttggcaactggctatatgactggaaagctgctgcttaagctggagagtgtaaaattcatcattgcaaatcattctccagagaatttcccatttcttgcagaatacaaatgttcacgtagtagaactacgttctattacatccttggctccttagtcttcatggaagatagccctgtgaaattcaggactttcatggaaccacttcaacaggttgcattaaacctggaggcaactcctgatgctgcttttcggactgatgtcgctaagcgtgcatttgttggttggatgagagatctacgtggcatagctatggcaaccaacagccgcaagacatatggcctcctatttgactggttgtatccatctcgcatgccacttctgctgagagccatctcactttgcactgatgaaccagaggtcaccacacccttgctcaagttcacgtatgaatttgttttgaacaaagctcaaagactgacatttgattcatcatcaccaaatgggatccttttattccgagaggttagcaagataatcgtggcttacgggtcacgaattctattgcttcctaatggcacagacatttatggaagtaaatacaaaggcatatggatctcactgactgttctttcaagggctttgtgtgggaattatgtcaattttggcgtatttgagctctatggtgacagagcacttgctgatgcccttgatatatctctgaagatgaccctctcagttccattatctgatatattggcattcaaaaagctgtcgaaagcgtactttgggtatatggaagttctgttcaacaaccatatcaagtttgttctcaatttggacacaaacacattcatacatattgtcagctcactcgaatctggcttaaaaggtctagatgcagggatatcatcacagtgcgcttctgccatcgacaacctggcagccttttactttaataacattacatctggtgactcacctccatcaccagcttcagtaaatctcgcacgacatattggagagtgtcccaatttgtttcctcagatactgaagactctttttgagatcatgctctttgaggatgctggtaatcagtggagtctgagtcgaccaatactgagcctgataatgaccagtgaacagatgttcagtgaactcagagcgcacatattagcatcacagactgtggaccagcaacaacgcctttcacagtgcttcgataagctgatgacggatgtcaataggaacttggaacctaagaatcgtgacagattcactcaaaacctgacagcatttagacgtgattttcgactgaagtaacagctccttggtaccagctatcagtttgaaggtgttcctgcatgatgtaaatactccagttaccttcttttttggaaccacctttctgtgggttgagaaaagaagagcttgtccttaggtttgccttggattggctgaagatggtcttgttgatgcatgtggtagtgaaagcagctgtaaatttcatagcatgtcattttaatcagaatggtgaaaggtggagattgtttcttttgttttttattttatattgcatccctttagcatgtacagcaaaattggtgctagaacaggggtggctgtttgcccaatttgttaagtgggaggcagtcatctcagatataattcatttgttaagaagtcaacgaggtaaaggatgtaaatgattccgttggctttgctgaatatgaaagttgaacagtaagaaggatggctcagttgc

SEQ ID NO: 690 - DNA, 1049 bp, Zea mays
  Clone ID: 700087218_FLI
gggacccaaggccgaatccaccaagggctcccaagtctaatccttttggtgcctcctttggtacatctggcaataaaagttcaggcacaccatttactttgacaaccagtccaggacagcttttccggccagcgtcgctaagcattccttcagctcagccagcccaaccatctcaatcaactagttctagttctttttctaattcgttctcaagtgggcttactggatttggacagcctgcacaaattggatctggccagcagtcagcttttgggaagcctgcacagattggagctggccagcatgcaggatttgggcagactgcccaaattcaatctggttttggccagcctgcccaaattcaatctggttttggccagtcagcacaaatcggaactgggcaacagtcaggatttgggaagcctgcacaaattggggctgtccagtcaggatttgggcagcctgcacagtttgctgctcaacagacacttggatcagtgctgggttcttttggacaacctccccagttaggaggcataggttctggaggatttggtggattttcaagtgcttctacatctgctggttttagttctttatcttcaggtaatgctggatttgctggtgctgcatcaggtgggggcttttcagcaccaactgcttctgcaggtggtggttttgctgctgctgctactggtggaggttttgctgctcttgcttccaaaagtggtggttttgttggtgcagcttcatctggtggtggttttggaggtgcctcccagggaggtggctttggcagtggtggtggtggattcggatcctttggtggtaatcaaggagctgggttctcggcatttggagcaagtggggctggaagaccggcagctgatttcttgacgcagatgagaaagtaggctccaggcaaatccccagacaggtttacgcattagctatagcatacacatgaggcgagttacttttatgttccactcttaagcgttgtttcggcacaggagctgtagcataaacatgaccgcagtataccctgg

SEQ ID NO: 691 - DNA, 772 bp, Zea mays
  Clone ID: 700087221_FLI
cggaaagagccgaacgggaacgaggaaggaaggttccagcgatcgcggtcgtggagtaggactgtaggagaaagcgcgatggggaagaagcggcagcttatctgcctcgcagccgccgtcgccgccgcggccatcctcctgacagcgtcggccaagaagtccagcgacgtcaccgagcttcagatcggcgtcaagtacaaacctgagtcatgtatcctgcaagcacacaaaggagacaaaattaaggttcattatcgtggggcactcactgacggatcagtttttgattctagctatgacagaggtgacccgtttgaatttactcttggaaatggccaagtgataaaaggctgggaccaaggattgctaggtatgtgcgtcggtgaaaagcggaagctaaagatacctgcaaagatgggctatggcgagcgaggctccccaccgaagattccaggcggagcgactctggtcttcgacacggagcttatcgccgtcaacgggaagacatctggcggtgcaaatccagaaactgaaagtgagctctgatacgatgcatttggatggagagtttcagctcgagggagtagtagcagagtcacgtagttcatttggtgccgtgaaagggctgttgtcttgtttccttcatgcatggcaatttatgttttagagatgtcatactctggaaacagttccctttttttgatggtacgaaagctcgatttgtcaagctaccatggccttcaacattgaagcaggtctggactgttgttgc

SEQ ID NO: 692 - DNA, 2222 bp, Zea mays
  Clone ID: 700087238_FLI
tctaccgcatccttccacaaaaccctttcttccttccgccgtcgccgccgccgccgcgaccggctaaacccttcatttcgccgcagcgacgaccacccgccgcgggccaactatggcgcccgttgcggctcccatacgcgacctgcttacctctttcagcccgggcgcggacttcctcgcgctctcttctggggacggccgcatcaaggtatgggacgccgtgcggagccggctgcagaccgagtttgctgacatccctgcagtggaggcggtcgcggtcgctgagtcgaagcgcggccacctcgccctcgattacacctgcatgaagtgggtacagctttccagtaagaagaagaggaaggctgggagctcattgattgtgcttggtacaggcagtggagatgtgcttgcacttgatgttgccgcgggacattggaagtggaaggtcagcgattgccaccctgggggtgtgacagctgtagaatactcgaaacatgggcggaatgtgtacacggcaggtgctgatggcatggtctgtaggattgatgcctctaatggggctgttgttggaaaatttaaatcttcttcaaaggcaatatctgcattagctgtgtcatcagatggaaatatgttggcaacagcagctggccagttgaggacctttgacacttccagcaacaaaaaaattaaaaaattctctggacatccagttgctgtgaggagcatggtctttagcaatgatagccaatatgtattgtcatctggagttggtgaacgctatattgccatttggaagctgggcagtggtaaaacccagagctcaaactgtattctgtcgatggagcacccagcaatgtctgtggactgtaaatgttcggacaaaggagaaatatacattctggctatttctgagattggtgtctgctatttctggtctgcaaatgttgtggatgacctgcgtaataagaagcccaccaagatcatattatctgagtcatctgtgtcaacagctcatcaagcattatcgatatttgctgcaaaacttcaaggagtggatgggcctaattctgcccatgtcctactggcttatgggtctgtagtgaaaccatcttttgataaacttttggtttgttatggtacagatattagtttgggcatttctcaagatggagttctcttgccaaatactcaaaccaccatggcaaagaaaggccaatctgtgaaaaagcatgaaactgtctttgctctagaccgagccaatgctgaagatgccatccttcctcttccaaaactccatacacaggaaaagaaaaggaaacatggtgtaacaaaacccagtggcgatgttgagcctgagattcatagtgacctcaccactacaagatctattcataaaagagttcctgtgcaaagaattgaagatgacagcacatgcatcgaggatatgatgagggagtgtggcatcattgaaactagagtagatgagagcatgaagggccatgctggtataccctttaacattttgtctggtctttttggtgatggcagcataaaattcgatgccaatttacccagtaagaagattcgaggtcatctaagatcattaaaacctggagatgcttgcaaacttcttgataaattagtatctgcatggaaaacgagatctggtagcacggaacttgtattgcgttggatatactgcctgttagtcattcatggccgttttatctgctccgaggaatcgattaacaacctggagaagatgtgtgcagaaagatacacagttactgaagatttgctgaagctttctgggcggcttcggttaataacagcacaggtcgacaaggctgctagtaacatgtctgagccgacatcaggggagatgcaggatgctgctttccagtctgacgaagaggaggaagatgaagatgttgatgaaacagtattcggtcaagattcagattcgtcacagaatagcggcaccggcgacgatgcaaagtagactcactgctggtattcatcattatggtgattgtattgtttttaattaaattgccaagcttgatttttgtcaaggcgacgctggaaggttgcacagaattttgatagtgtctctggtttcattttgaaagcactcgaagttgtctcctcctttacccctttttttccttatatacgacggcaattggttaaagttacatacccgaaggttgtccttgcac

SEQ ID NO: 693 - DNA, 609 bp, Zea mays
  Clone ID: 700087254_FLI
aaaacctcgccgtcaatgtcagcgttcgttcccaagggcgctagggtttaaccccccaactgttcggtctctctctctccccgaatccaattcagcgtcatctagtccgggagcctgcgacatggggtacctccaggaggcccgggagaatcacgtcaagaagaaggtcgaggaagctctgaggagcaaaatgaaacaaaaggctcttcaggaatgtgatttctattgttcaaaatatgctgagtgtgcacgaggaagaacattttctgtggtatggcaatgccgcaaacaagcaaaagagttgaatgagtgccttcatcaatacacaaatgatgcaatcctggaagaaatgaagaaggcttatatgattgagcaaaagagcaaggagataaatcaataagcaaaaatccattgcacaatgtgcatcacgatcaccctgcttgtatgtatactgttgcctttgatagatactattcatgggtagtgttgcaaacattgttctccccacatgcataacctgatactagtattgggtggcaaactggcaatcttgctgtttctgtcgaacatgtgatataagttgttttcttctgttgcaattttcatccc

SEQ ID NO: 694 - DNA, 805 bp, Zea mays
  Clone ID: 700087344_FLI
ctgactactatctcaacccgtttcatgcctacgacgaagggaatctatcatggctggctgcaacagaggccgagcctgcaacaatgtcgatcgcaaagagggccatacctgaggctacatcaatcgaagaggccaaccaaatcgtccgcggcaactggctgaatgtaattgaggagcatcatctgaagtacttggggagctctcaggtaacctggacattggctgctctgttggagtaagcaccagatacctcgccgagaagttcccatcagctcaagctgttgggctcgacctatcaccgtactgtcttgctgtggcggcacaaaaggaagaaaaactgtcacggccaaagcctattcgctgggttcatgccaatggtgaagcgaccggcctgtcttcagattcatttgaccttgtctcccttgcttatgtgcacgagcgataaccggattggtgaaggaagcattcagggtccttcgcccaggaggaacaatcgccttaacagacaattcgccgaagtaaagtacttgaggaactatccccagttttgttcactctgatgaagagtaccgagccttttcctggacagttcctggaattcaacatgctgcaattcaacatgtattgtgagcttgttctctttttttgttctatatcttatgggctctaatttcattgatgctatttgtctggtttcttatctatactgcttgagttttgagtaaactgccggatgacccaaagtgaaaaccatttctgtaccctattactaaatacttgaaaacataaatgatacctttgacgt

SEQ ID NO: 695 - DNA, 550 bp, Zea mays
  Clone ID: 700087383_FLI
agagaccagagcaaggatgttcacaaacataagaacaagagtcactccaaggacagggaatccagacatcatagacaccattgtagctcttcggaagatgagcatgagcatgaacgttggagttccaaatcaaggcataggcatagagatgatcaccgctactctgacgaggaacactctgatgaggaacacaggaggtcacacaagcatcggagggagcatcactccagttctaaaaggaagcacgaggaagactgataccaggttcgccggaagtgtctgtctagatcaggtgccaagtttgaatcagacaagctgtctgatgacactgcacaaatcaactcagggaacaactgaagcgccgagtaaactgagagcaaaaatcagagcaacatactgtaatattttgtatcacagcagtaacattatgtccttaggcctctgttttgtagccaattgctctttcgatttctgtatttgtttcgaacgttctaactaggtgtctgtccatcttatttgaaatcagtgacctgctcgccaagttctaact

SEQ ID NO: 696 - DNA, 879 bp, Zea mays
  Clone ID: 700087386_FLI
ccaggaggaagtgacggcggcgccgcgaggaaggagggatcgatcgaggatggtggacgtctcgcgcgtgcagaaggagctcaccgagtgcaaccgcgaccgggaggtatcgggcgtctccatcgcgctccacgacggcgccaacatctcccacctcaccggcaccatcgccgggcccgccgacagcccctacgagggcggcacgttcgtcatcgatatccgcctgcccggtggatatccctttgagcctccgaagatgcagttcatcaccaaagtatggcaccctaacatcagcagccaaaatggagcaatttgcttggacattctgaaagatcagtggagcccagcccttaccttgaagactgcgctcctttcccttcaagctctgctttcttctcctgcacctgatgatcctcaggatgctgttgttgcacaacagtacctgcgtgactatccaacatttgccgctacggctcgctactggacagaggccttcgcgaagagtgcatcaacgggcatggaagagaaggtgcagaagctggttgagatgggcttcccagaggatcaggtgagaagtgccctgaagagcgtggatggcgacgagaacatggctctcgaaaagctctgctctggctctgggtgaaccattctcttggggccaatacatgagcagctgtacatttcacagtgcctgctaatgctcctgctcagccatttcatataggggccgtgccatggcccatgggactggagtgagactctcctaggacaacattcgtttctttaaactcttttgctgttgtgtctggtaggctgaatcgactctttgcccatggaaccctggtaatatctgatgcaaaggaaacatgaggttgacat

SEQ ID NO: 697 - DNA, 1029 bp, Zea mays
  Clone ID: 700087416_FLI
cgatgtcttctcgcttcatttctggtgccaagcatgaagctgggtacgatgcatacatgactggatgcatttttgcgcagttgtgtgcttatcttggcatacaatttgagcagttctcacctctggataacctagcaacgaacactaagctgcagaaacacatcaattttttgtcccctagctggaacagtggaacagtgcttgatttgagcactggcatggagacaccagatccaggttacacgagaaggtaccctgctgctgtgtatgataacattgttgtcatctggggattcctgtctaaggttagaccgaaggaaattaaggattgcatctgcaaagtatttggttcaggttcagttacaaccgtcttctccattgattccactgctgcccttgtgcagttcaagaaacaagagtctgtaaacgatttcttggatttgaaggctgttttggagagggcagatagtgctatctcaattctacaccccctgtcaactatattggaaggaggccaaacacgagctgcaaagtatgatacctacagagacatctgcggctcttctgaatcaatatatctctttgctgatcaagctgaagcagtctgtgcaacctcaaagaatcaactcatagaaaatgttgatggcaatcttatatctgatgttcttgatggagctgcactcgcctctgtaaccgaggaagatggaataataccgagttccaagaatcaaaacgttgctgaagttacatgttaggatatagcttagatgctctatacgatggcaaatcattgtttgtgcagacgaatgtgaagctaattactaccatcgacctttttcagcaggttattggcctggccttctatttgaggctcactgactaggccaatattttgatgggtattctttttaccagtatctttaggcacagtgccatctctagcatccgcacggtgcaagctctgaactacagagtaaatctatacttatgcagggaagcattcttcttgatgccatttactggatgatc

SEQ ID NO: 698 - DNA, 1005 bp, Zea mays
  Clone ID: 700087417_FLI
cacgagagtttacggcggcccaaaccccccaaatccagttccatcccaatcgccgagaaggggaagccaaatcgatggcggcggcggcggccggcggcgagaacagcggcgcgggcgcgggcgcgggcgagggcgagttctacctgcggtactacgtggggcacaagggcaagttcgggcacgagttcctcgagttcgagttccgccccgacggcaagctccgctacgccaacaactccaactacaagaacgacaccatgatccgcaaggaggtcttcgtctccccctccgtcctccgcgaggccaggaggatcatccaggagtccgatatcatgaaggaggacgacagcaactggcctgagcccgaccgcatcggccgacaggagctcgagatcgtcatgggcaacgaacacatttcattcaccacttccaagatcggctccctcgtcgatgtccagtccagcaaggacccggagggactccggatcttctactacctcgtccaggatctgaagtgcttcgtgttttcactcatcaacctccacttcaagatcaagccaatccagtcttgagctccatctcaagccttcatgcgactgttttggagtgttttaagagagaaccttgtaccatgttaagatgatgttgagcttgtgacgatgcgcacggtagaagtggaaccttttttttttttttgcggttggattgtgcaaactgcgagcagtagtgagtgtggtatatttgtgccttcagtttcctgttgggtggagtgttcttgtcgtttggcacggcacactagtattcttctctgttatcagcgctctgttgaaggatggaatggatatccagattgtctgggacttgtggtgatgcagatccagccagtaactagtatgaatttctctagtggggttgttgggctgctaaaaaccgccggactgagcaaaggaaccttgcgtctttgtgtaaagcagcagtcgaatctgtgtgtgtgtgtttgtgatt

SEQ ID NO: 699 - DNA, 560 bp, Zea mays
  Clone ID: 700087440_FLI
tcaagaaccaaatgcggaaactgtggcggagaaaactgagccaccagttgcttctagcactggcattcaagaggaggtgaaacggtcaagcatagaatactggaatgagagatttaatcggttacagacatatttggagaactgtgatcattcaacccaggagggttatttgcgaaagcttaggtccctttcggctgctgggagaaacatgcatgcaattgagctggagaaaagggcaatacatctcctaatggaggaagggaaagagctccagcgaatgaaggctttgaatgttcttgggaaggtttccccaaatgcttcgtcgaagctgacaccttcgcagcggtagtctctacaatgagatgactgtataacatcaagagggctgtaatactcaaatacattgcagaaaagacatgttgttcctgtgtaacacctttccttttatttcctttgatgccctgcccttttgatgtaagattgttgtaatgctatgtaaccagccgtacatataaacctgccattcttagtcctaaacctgactattatttgtttgttcc

SEQ ID NO: 700 - DNA, 762 bp, Zea mays
  Clone ID: 700087455_FLI
caccatcctctacaagctgaagctcggcgagatcgtcaccaccatccccaccatcggattcaatgttgaaactgtggagtacaagaacatcagcttcactgtctgggatgtcgggggccaggacaagatcaggccactgtggaggcattacttccagaacacgcagggtctcatctttgttgtggacagcaatgatagggaccgtgttgttgaagcaagggatgagctccaccgaatgctgaatgaggatgagttacgtgatgctgtgttgcttgtttttgctaacaagcaagatcttccaaatgctatgaatgccgctgagatcactgataagcttggactgcattcacttcgccaacgtcattggtacattcaaagcacttgtgctacaacgggtgagggattgtatgaaggcctggactggctgtccagcaacattgcaaccaagtcctaaattgtcaagcgaggtttggatcatctaggagcttttggatgatgatgatgatgatggtgctggatatttagggttgggttggtatttccgtatgtaagatgtatgcccctgagctcggcagtttttgagctctgcttaagattctcacagttaaattgttttatgtaatttgggccttgagatgtttctgaaccaaacagctaaaagagttcagttgagttaactggttgccattattacattatgagattctttgatgctccatatgttcaacaccacatcagaaagatgcctgtttttgtgccagg

SEQ ID NO: 701 - DNA, 1849 bp, Zea mays
  Clone ID: 700087470_FLI
ctctcacctggaaagggaagacaagtcgagattcgagaaggcaaatcgaattcgccatgggcatggctgctccgcgcgcgccgctgcctctcccccaactgctgctcctcctcgttgctgcgctcctcgccgccgctcccctccctagggcggccggggcggacgagttcgacgtccgccgccacctctccaccgtcaccaggtatgatgtggccagggagtccagtagtgtcatctccatgccgtcaatcccagacgggtgccgtgtcattcacctcaatctagtggcaagacatgggactcgtgctcctaccaagaagcgcatcaaggagctggatagattggcagttcgactggaagcccttctgaaagaggcaaatcaggtccttgatagtgattctctgaagaaaattccatcctggattaaaggctgggaatcacgctggaagggtaggactaaaggtggtgagctgattagtgaaggggaagaggagctgtacaatttagctaccagaatgagggagaggtttcaagatctatttgatgacgaatatcaccctgatgtatattcaataagagcaacccaggttcctcgagcatcagctagtgcagtggcatttgggttgggactactttctgggaaaggaaagcttggacaagggaagaaccgagccttttctgttctgagtgagagtcgtgcaagtgatatttgtctgagattctttgacagctgtgagacatacaaggcatacaggaaaaggaaggagcctgatgtagacaagcaaaaggaaccaattctagagcatgtcacagctgcacttgtcaatcgttatcacctaaaatttacaacttgcgatgtttcttccctctggtttctttgtaagcaggaagcatctttgttgaatacaacaaatcaagcttgtgggctttttaatgaagctgaggttcgttttctggagtggacagatgatttggagggttttgttctaaaaggctatggtgagtcaattaactacaggatgggactgccattgctcaaggatgttgtccagtcaatggaagaagcaatcatagctagagaagaaaaccgtgctgatggtacgtttgaaaaggcaaggctccgatttgcacatgcagaaactgttgttcctttcagctgccttcttggtctttttcttgaaggtccagaaattgagaagatacagagagaggaagcattggacctaccccctttgccgccacagggaagaaactggaagggcagtgttgttgcgccttttgctggtaacaatatgctggttttatatcaatgtccaagcaaaatttcggatggcagcacaatctctggaggccgaaacaactcttacttagttcaagttctacacaacgaagtcccagtttcaatgcctgggtgcggcaacaaagatttctgtccgttcgaggagttcaaggagaaaattgtgaaaccgcacctgaagcacgactacaacatgatatgcaaggtcaaatccccagcggcaagcgaggagcctgcctcgtacgcctacagggtgtccagtttcttcctaggactcctctcgcaaaaagggtaccgcggtgtgggcgccgagggcgtcaagactgagctgtaggcgtcaagacctagcttagcacggtgccgtctcttctcaccgtctgcgagcacgatcaaggaaccagactaacccatgcactaacccgcagtgtttttgtacggagcgagtcgaatgtgtgggacaccaccacaggaggcgccagttcggttggctccagggccagacgcctctgatactgtagtagcaataacataaataataaatgtgtttcgatt

SEQ ID NO: 702 - DNA, 1104 bp, Zea mays
  Clone ID: 700087503_FLI
gtcggcgcgcccattcccgtctcctccctcctccccaccccaccccaccccatcccacctcggatctgctgcctccaccgtttcaatccacatgcgagcggaaatcgagcgggcgaattgaatcccgtcccgttcgggctcggccagcgagcgagcggcgtccggccggctgggcattggttcgtgctcgctcgatcgatcagaaaatggcgcatcgtgtgaacaacgagtacgactacctcttcaagatcgtgctcatcggcgactccggcgtcggcaagtccaacatcctctcgcgattcacgcgcaacgagttctgcctcgagtccaagtccaccatcggcgtcgagttcgctacccgcaacctgcagatagacgggaagactgtcaaggcacagatatgggacacggcagggcaggagaggtaccgcgccatcaccagcgcctactacaggggcgcggtcggagcgcttctagtctacgacatcacaaagaagcaaagcttcgacagcgtccagaggtggctccgagagctccggggtcacgcagacgcgaacatcgtcgttatgatggtcggcaacaagtcggacctgaaccacctcagatcggtccccgaggaagacggccgtgcgttttcggagaaggaaggcctgtccttcctggagacctctgccctggaggcgataaacgtggagaaggcgttccacaccatcctgagcgagatccatcagacggtgagcaagaaggcgctcgccgcgcaagcgtccgcgtccaccaacgggcgctcgatgcaagggaccaccattaacgtcgctgagtcgtccaccgtcacgaaaggctcctgctgctctagctgaagagccgcttccgacaggcctcgtcggaagggttcgtttccgccgagctgcacatcgctgcgtgtaggttgtagatcgcttatttgcgttatctgcctgccttccaaagccattgattgactggtgattcgattctttgtcacatggaactccctctagcgtcatatactacatgtaacctgtcttcctgttgcatttgttgttcaacttacacctgtatacttggataaattgaagagcactttgt

SEQ ID NO: 703 - DNA, 1508 bp, Zea mays
  Clone ID: 700087532_FLI
gtgtctcagtgagaagaatgaaatggagctcaagctattgaattccagtgctttgcctaatcaacatgccccaacagaagaacagaagttgatcaagcttttgcaagaggagctccggaattatgaaaaagaagtgcatgaagctaaaaggttgaaatcttcccacatgaatgttgagttgctgaaagaaaaactattggaggagcaggggcgcagggaaagagcagaacttgaattatctaaactgcaggaaattggtgctagagcacataagctggagcttgaattagcatcttgtacagcactgctcagcaacatacctgatgtgtcttcttatgctgacataccccaaaagatcgcagatctgcaaaagcaagcattgacatatttgaacgaagttggtgaggtaacatcaaggttgaaagaattagaggttgcactagaatatgctgatctcagcaagcaacaagcagaaggtgaagctgctcttgctaaagagagggctgcaagtgctactagggaggtcaagcggcttgagcttatgcttactgcgatcagtgaagaaagagataagctgagaaaggaacatgctacggagtcggatcagtctgggatggaaaaaacgataagagagctggagagcattatacacgagctgaaagaattgattagtcacaaggacactgaactcaatataatgaatgaaagattaaaccttgaaacaaggaaagtgaagtctttggagcgagagggagatcagctacgctctcaggtggcattactagagtctaagttaggtcatggggattactctgcttcaagcacaaaagtactgcgcatgatgaatactcttggagtcgacaatgaagccaagcagacaatagaagtactgcaagctgagctaaagaaaacaaaagagaggctgcaagcagttgaagaactgaaaggacaaactgatcctggaaccgtggtagacgctaatattgctgaaaagttagcacaacttaagaatcaaattgcgacacttgaaaaacgtgaagaaagatacaaggcggtgtttgcagagaggatctcggtcttccggaaagcctgctgctcccttttcggttacaagatagtgatgaatgatcagcagcagtcaaatgggattcccgtaacacgctttattctgcagtcagtgtatgcccaaagcgatgatgaaaagcttgagtttgactatgaatcaggaagcactaatatcgtggtcaacgattacacatcccaacaagaaattgctcggcaggtcgacatctacataaggaggacgaactccataccagccttcactgccaacctgacaatggagtctttcaacaaaagaagtatatgctgaagacatgaaactagtgtcagggcacattgcttgatttctgtatgttatcattgacgaagagtatgtatatgagcactcacattggtgggtgaaaactgctcctgctaattgaagttgaggctggagctttgattct

SEQ ID NO: 704 - DNA, 1001 bp, Zea mays
  Clone ID: 700087534_FLI
ggggtactgagttgcgcacaagatcaagatattttagaaggcgaggtaaagtccgtcgtttgaagtacacctggaaatctgcaggttacaatttcaaaaggattaccgaaaggaaggatcagccttgtcgacaatataatccttgtggttgtcaatctacatgcggaaagcagtgtccatgtctttcaaatgggacatgttgtgagaaatactgtgggtgtccaaaaatttgcaagaatcgttttcgaggatgtcactgtgcaaagagccagtgtcgcagccgccaatgtccatgttttgcagctgacagggaatgcgatccggatgtttgcagaaactgttgggttgggtgtggtgatggtacattgggagttccaaaccagagaggagataattatgaatgccggaacatgaaactgcttcttaaacaacaacaaagggtcttacttggaagatcagatgtctctggctggggagcattcctcaagaatagtgttagcaaacatgaataccttggtgagtacactggggaactaatctcacacaaagaagcagataagcgtggaaagatatatgatcgtgagaactcatcgttccttttcaacctgaacaatgagtatgttcttgacgcatacagaatgggtgacaagctgaaatttgccaaccatgcccctgacccgaattgctatgccaaggttatcatggtaactggtgatcatagagtgggcatattcgccaaagaaagaatcctcgctggtgaagagttattctacgattaccgctatgagcctgacagagctcctgcttgggcccgtaagcctgaggcgtcgggagcaaaggatgatgggcaaccgttcaatgggcgtgcaaagaagctcgcccaaaacaaccgaggctgaatctgatttgattctttcattgttaggacaaatttggcagccattcaactaatacaaggaacctgtcattcataggccccaattgatttgaactcgcattgt

SEQ ID NO: 705 - DNA, 1489 bp, Zea mays
  Clone ID: 700087582_FLI
ccccgtttcgccgcccctagcccaaatcccccacctactcgccgccggcgccgtctcagcctcatccttctccgctagccatggccgccgcgggtcccgggctctactccgagatcgggaagaaggccagagatctcctatataaggactaccacacggaccagaagttcacgctcaccacctacgccgccaacggagctgtgagtttccactcgactctccggtatttgtttttgtgatgtcgccttgttactcttggccttgatttgacatgatgcataggtaggctttttttagtggcggtggagtttagatggctaaggactttgccggtggctcgattttttagttgtcaaggcaagatttgcttgtgcgtgtagttgggaacttgcggcagactttagctgtgctgcgtttgatattgatgctgcagttatatatatttttcgtcttgtttctacgtggatctttgtccaagtattaggcgtgatctggcagggcaggcggtgtcagcacccagcctgacagggagcacagggactcttccacggcagcggatacacctccgctgggagctccggtgttgggccggcgacggaagaagcccaatgccattactgctgcaagcacgaggaaagatgaagctatctttaatgaaatccagagccagctgaagcacaacaatgtgactgtggatgtgaaagcaacttcagaatcaaatgtgataactacaatcacagttcatgagctgggcacaccaggcttgaaggcaattttatgcgttcctttcccgtaccagaaatctgcaaaggctgaactccagtatttgcaccaccatgctggtgttgctgcaagtgttggcctaaatgcaaaccctgttgttaacctttctggtgtattcggaactaaagctattgctgttggcgctgatgctgcatttgatacttcttctggggacttaaccaaatacaatgctggactgagctacactacgcctgactttgttgctgcagcgactttgaacaacaaaggagacaacattgccgcttcctactaccactcggtgagtccaaccacagccgtcggaggagaactgagccacagcttctcgaccaacgggaacaccatcacctttgggacgcagcatgccctggaccctctgaccactgtgaaggcacgcttcaacaactacggcatggcaagtgcactgatccaacacgagtggaggcccaagtcattggtcaccatctccacggaggtggacaccaaggctatcgagaagagctctaaggttgggctctccctggtcctcaagccctgaggtcaccagcttctgcttttgggatgttataggtttatttttatttttatcagcagctgaagtccagtaaacaagcttggactaaacttgtcagctttggtgcccatcccacaaactcaattcgttgcctgttaccctatcctaaactacctgagaggtttatgttac

SEQ ID NO: 706 - DNA, 2023 bp, Zea mays
  Clone ID: 700087586_FLI
gctaaaaccaactggaatcgcgaaggtaagcgaacttcagtcatttattatatgcattagagacatgttttcctgtctgtgacatcatttttaacttgtactgtgttttttcggtcctcatggttgccaagattttacttagttcaatgtgggagcaaaaggatatgccaaattgaatgtagtttcatcagttatgctctattatggatgttcagaggcatccaatttcagtgtgtactgcaatacttgggtccacctgtacttggtagatgttctgcattttgttttcttataaattagatttggcttccattatgttgttctcttttggaacagagtcactctccgacagctcatcgccgcttggttctcccgccggtacacaaggtttaagaagcgctccgcggacttccacggccgcgctgccgatctcgtccacagcctccggggcacggcgatgcccaggagacaggccctcgaggaagagcaatgtagagaagagaaaggtatctcgactgttccaaagcacaagtatgcatccaaagcctgttccccaaaaggtgcgtgaactttgttcttgattttgtcagactaaatgtgggtgaactttgtactgcagtttttgtttaaataaactttggactgtttaaattactgatgcatccaaccactgtttttctttactgtttgttgatacacgaccagatgcccagttgagttcacccaaaaggtttattacaccacgaaaaaatctgagatgaaatgatttttatttaaatgaactttgtactgcagtatttacagacatattttggcacccgatcgattactgtttttgttttactaatagctgctgctattactatcttttgggtgaagtgaatcagatttttgtttaaatgaactttgtactgtttaaattattgatgcatagttttgaagacttaaacaatatgctgcatgaaaatctttactttattcacaacacacctgagatggactgggcttgggcagctaaccggttaattgagaaggttagccaactttgcgattctgctattttagttcttgtccatattggtccaagggatttatcttgatgctaaactaaattctggaataggatgaggcataaactccagacgatgctcctttaaattatttgccgcagaagaggctaattttgacaagccagttgatccagcaacttctccctgctataccagcgaccattttgagaggacaagctgtgtctacttacggaagtgcgacatacactctatcaatgttgacactaagggatgcatgcagcatggtagcatcattatcatcatcatataactcttgctcacctgtggaggatgaaaataacccatctgaacaaacaagtgctaagaaaatggaagacagagtatcaaaggttgtggaagtcttcgctggaagaatccagaagatggaaaatgactttataagtgattccctcacggttgtgtccttcacaaaggaaggatgtgaagccacactattatcaagcaacaaagccaaagttgtgtgacacaattataacaaaggaatcatcacccattagcacactaaaattggcgcatacagataacgcacctgcaaagtgggatcatttgaacatagttcagcaaagggccgacgcacttgagtcactcctcaagctctacgcaaagcttctggaggagaggctcgatgagctcgccgacgtttttcgaccatttggtgagagagctgtgtcatccggagagatgagcatacaatgatgtctgaccataagcctgatgactccaccgaagttttgagagtccccaacaatgcttttgtagcagcgattcgtttcaacatttttttgtttttcaaataccatttcgagagtgtaaataacttcaacggaattcaaaattgatgtacttaggtaggcctgagccctgtttatttttgatgtatatggtttgcatgtcaccaactgttgtgagcgatgattgattatttatcgtct

SEQ ID NO: 707 - DNA, 1735 bp, Zea mays
  Clone ID: 700087622_FLI
tcgtaccccgcaagggtggtgagcgggttcctctccaatgcggcttcggcggtggtgaagcggctgtggtcgctcaaatccaccaccaagatagcgagcgggggcaagtcgatggtgaagtacgagggcggctacaccgtggagacggtcttcgacggcagcaagctggggatcgagccctactccgtggaggtcacccagggtggcgagctactcgtaatggactccatgaacagcaacatctacaggatggcgctgccgctgtcccgatatagcaggccaaagcttgttgctggttctccagaaggatttcctggtcatgttgatgggaagctgcgagaggcgaggatgaaccatccaaagggatttacagtggatgacaggggtaacatctatgtggctgatgccatgaacatggccattagaaagatcagtgatacaggggttacaactattgctggggggaaatcaggcagaggagggcatgttgacggaccaagtgatgaggcaaaattttctactgattttgaagtccgttacattggcagtagctgctcccttctggtgattgacagaggaaaccaagcaattagagagattcagctccactttgatgactgtgtgtaccaatatgaagctggttttcctctaggagtcgcactacttctcgctgccgctttctttggctacatgcttgcactgctccaacgccgagttttagggatgtattcaaatggagatgaacaggaccacgagagcccagtaaaagcaaaattagccagcattccacctccataccagaagccactgaagccttatgttcaccccttgctaattccaaatgacgacgaacctgtgaaacaagaggaggaagaagggctctttacgtcaattggcaagcttgtgggtggagcaaaatcatcaattgcagagatcattggcgccgcattctccagaaagaagcgagtgaacgttcatcatcatcagctgggtaggccaacctcctggccagcacaagaaagctatgccatcccgcgggacgagaccccaccgccgctggacacaagggcgcccacccctcgcaaaaactacgccttcatgtccaaggagccggagaagatccaccacatccggcacggccggcctcagttacatggctggaccggagaggcacagcagccgccgcagccgcagcaggtgcgtcaccaacagtacgtgcaacaccacaggcagtactcggccgggccgcagaccttctacgagccgaactgcgatgcaactaaggagatcgtcttcggagccgtgcaggagggggataccagccgccgtcccgtggagatcaaggccgtgaaccatggggacgcggcgccgtacgagcagaacgggctgcgattccgcagcagttatagcgtgcgctacaatggcaactagtcgagtcgaggagcacttctgtagctgtaatgtaactgtaaggagaggagcgatagagagagcagtcgaggggagtatcaatctcctcattgacaagtgcaacagaaaagctggaattttggtagaagagcttggtgataatggtcattggactctttactggcggtgacatatataaatatagcgtgtatttttcttgttcttcttgggtctaattctatttttaataaatcaccttgcgtatagtcctatctttaataaacaaagtgtgtatttattattttatcaactgtttttcgttttg

SEQ ID NO: 708 - DNA, 1623 bp, Zea mays
  Clone ID: 700087636_FLI
cagacccaaaatcgatgggcaaaagcggaaagaaaccgagggaatcgcaccggcagggccgcggccggcgggcgtcgcacttctgcgacgaggacgactacgacttaccttcgtcagcctacgatgcgacgccgcgccaaaacgaggaatcctctgaagacaacgacgacaccagcgaagcaacagcggaggacgaaccagagagggatacggaagcaggcgagcaggaccaatggcaaggatcaatgccttccaagtttcacctataccagctctccgtgcagtcgccgaagggggacatcagctacttgcagaagttcttcctgatgtatgtcggcgggcgcgcccctctccacctgcaggaggatttctgtggcacggccctcctcagcaccgagtggatccgtactgatgcaagaaggacagcaattggcttagacttggatcttgagtcacttgagtggtgccttgaaaacaacctaagcaagattggagctgatgggtattcaagaatgttgcttttccatggaaatgttctacaaccaatggaatcccgtcttgtcaagcaaaagtttactaatcttgtgcatggtctagatttgaacagcaacaatggcacaggaagtaacagttgcaagcagatgggtcttgctgactcgaagtgcttagccaatctgaccatgtcagaggcagattttcctgcaagggatattatctgtgcattcaactacagctgctgttgcctgcatagtagaaaggacttggttttatatttcaggcatgtacgcagtgtgctctcggaaagaggtggtatatttgtaatggatgtatatggtggcatatcatctgaacgcaagttacgtctccagcggaaattccccagcttcacgtatttctgggagcaagatgagtttgatatcatcagtcgccaaacaaggatcagtctccactttcaaggcggaaagaaacagatgatgcgatatgctttcacataccattggcgcctatggtcgattccggagatcaaggactgcttggaggaggctggattcaagtgggtccacgtttggatgagggagatgccaaatacccagtcaggtggaaacgccaaggagtataacgccaaccgggacgtgaagtacgaagaatcgcagcatttcaaccaaggagatgcttggaacgcctatgtcgttggagtagcaaatgtctagccggtacgtgctgaattctgctacgaaaatgtgatggtggctctcagtttcccaggccaattaatgtttcgtggacgcttccgctttgatcacaacttctgcatcgcgttgctgcggaggaagtatgcagcaggctggctattaccggacccagagaacttttactccagaacacggcctcagtgatgtttctgttttcaaaatgaaatgctggcaacgtgacatgcctttgaatgtatttcttacggatacgatgtgtaggatatgatgggtgcttcgacggataccgatactacctttcatgatagcttcgtatgcattaggggttggtatgcgattcgtgtttgggcgattgatcgtccggttggcgatcggtcatacatctttctaccaaacggaactttcccgctat

SEQ ID NO: 709 - DNA, 1099 bp, Zea mays
  Clone ID: 700087641_FLI
ctttctcttctccccttgtgtcgcgctcgcgcatctgaagcaagggggggaagggccaagggggatcggtcttgttctcggagagggttgagctgcttgacggttttgactcggatcatggtgtgcagctctatcagatagagagctgacgtgaggtgtgagacgcggatcgtggagtactactcagtaggagaggtggggagggggaagaaggcgatagccggggaggatggtgcttgtgcttgcgctgggggatctgcacatcccgcaccgggcgcccgacctccccgccaaattcaagtccatgctcgtgcccggcaagatccaacacatcatctgcactggcaatctctgcatcaaggaagtccatgactacctgaaaagcctttgccctgatctccatattaccagaggtgaacatgatgaggatgctcgatacccagagactaagacacttacaattggtcagtttaagcttgggctgtgccatggccatcaggttgttccatggggcgacctggactccctggcgatgctccagcggcagctggacgtggacatcctggtgaccgggcacacgcaccagttcaaggcatataagcacgagggaggcgtggtgatcaaccctggctctgccacgggcgcctacagcagcatcacttacgacgtgaacccaagctttgtgctgatggacatcgacgggctccgtgtggtggtgtacgtctacgagctgattgacggcgaggtgaaggtggacaaaatcgacttcaagaagactgcgacgatgcacggctagccctatccttccactccgtgattgagtgcaagacatgtctagcttctgtttcttttctttcagcttcttgattcagagcctcctgaacacgctttctacctgttcatgcgcaaagaactttttaggtctggttgttaacaatgtttctcggagccatgaatttaaatactatactttttaattgtcatgataataacataactttggctagcttaaaacaccggctattgtttagataaagtattgtaaatgatgacatttgggcataagttaatcatactatgaaaaatttgggttggagtg

SEQ ID NO: 710 - DNA, 1182 bp, Zea mays
  Clone ID: 700087661_FLI
gcccaaccccagcaccgatccccgcccctccgacgcgccggcggccatggacatgtcgtcgatcgccgcgaacctcggtctctcggggtcccgccccgtcatccgcaaggccggcgagctccgccgcctctgcgacgtcaacttcgattcttctgtcctcggcatcggcgaggtctgcaaggccatcatctgcctggagatcgccgcgtccaagttacaggtgatatttgaccgggcggaggctgtgcgtatgagcgggatgtctgagaaggcgtacatcagatcattcaattcgctccaaaatggtcttggtgtcaagacgactttggatgtgcgtgaattgggcatccagtttggctgtgtcaggctgatacctttcgttcagaagggattgtcactctataaggagcgcttccttgctgcattgccaccttcacgccgggcaagcactgactttggtcggccagtgtttactgcagcagcattctacttatgtgcgaggaggcacaagctcaaagttgacaaactaaagctgatcgatctatgtggcacatcgagcgccgagtttacaacggtttcaacatcaatgacagacctctgctttgatgtttttgggatagccaaggagaagaaggatccaaagtccatcaaagggaacagagaactgctggatgttttgccaagcaaaaggaaacatgaagatgacagtgattcatctgcatccgatgaatcctcagacaacgatcaagacgagctagatttaccaactcacaagagacgcaagaagatggagagagaagcatacaacgactggaagtcgtccgttctctcctcgaacaagaaaaccaaaccagaccctgccaagcctaggaggcaagctcaactcaacttcaagaagccgtcagaagtaactcctgcagccaactagatgagtacgaaccctcttcgcaacaaatgcagtttgctgagactgaaagtggtgtatttgctccatcatcatctatgttccttctgaacgcataggggaaaaaaaagcccggacgcctttttgctccttgtttttgtttatctttgtgacgtaacgtaagttattcatgaaagtgctgttgtgcggcatattagtgtaaatgacatgtttatattctagtgttaaatagagagagagagaggtgttggaggatg

SEQ ID NO: 711 - DNA, 609 bp, Zea mays
  Clone ID: 700087703_FLI
cgaggacgaagaggaattaagccagcgatcgaggtcgtgtagtgtagcttccgagcgaagctcctaccgttgccgccggccggccggagatatgtcgtcgggcggccgacgtggcaggatcagcgacgacgagatcaacgagctgatctccaagctccaggcgctcctcccggaatcctcacgccgccggaacgcgagccggtcgtcggcgtcgaagcttctgaaggagacgtgcgcctacgtcaagagcctgcaccgggaggtggacgacctctcggagcggctgtcggggctcatggcgaccatggacaacgacagcccccaggccgagatcatccggagcctcctccggtgactccaggctccagctagccatgccgcttgccgccccggtcgtccgccggcgcgcgcggccctcttctgctgcctgccatctagctagctgccgcagccagcgcaggtgcactgaagaaggagaagacgacgacgtacggccgagcttgcttgttcgctcgtttatttgctacggcgacgaccttaattgtgttcctttgtttttaatttgttctcctccttcgggtgcgtgtttgtttccgtgttggattggtt

SEQ ID NO: 712 - DNA, 1141 bp, Zea mays
  Clone ID: 700087712_FLI
gcgccggcagagttccgccggacctacctcggcgtgaggtcggagaacttagtgacgccgtgctccgacctcacgccggcagagttccgccggacctacctcggcctccgcaagtcccggcgcgctctcctcagagaactcggggagtcggcgcacgaggcgcccgtgctccccaccgatggtctccccgacgatttcgactggagggaccacggcgccgtcggccccgtcaagaaccagggttcgtgcgggtcgtgctggtcgttcagcgcgtctggagcgctggagggtgcgcactacctcgcaactggcaagctggaggtgctttcggagcagcagttcgtcgactgtgaccacgagtgtgattcatcggagcctgattcatgtgattcgggttgcaatggtgggctaatgacgacggcattcagttatctccagaaggccggtggccttgagagtgagaaggattacccttacactgggagtgatggcaaatgcaagtttgacaagtccaagattgttgcttcagttcagaacttcagtgttgtgtctgtggacgaggctcaaatttctgctaacctcatcaaacatgggccattggcaatcggcatcaatgctgcctacatgcagacatacatcggaggcgtgtcatgcccatacatctgtggcaggcaccttgaccatggtgttctccttgttggatatggtgcttctggtttcgcccccattcgcctgaaggacaagccttactggatcatcaagaactcgtggggcgagaactggggggagaacggatactacaagatatgcaggggttccaacgttcgcaacaagtgcggcgtcgattccatggtctctaccgtgtccgcagtccacgcctcgaaggagtagactctggtcagcggtgataatcgtgattccatatattgtagaactataatccctgctagtaatccatttgtgctgtttatgtatcgaaggcagcaaagatgtgtgaagcggcaatgggatgcttgctgtaaggtaatatgtttggcttgctaggcatgctacacgctatttggatgtagcaacgttatcaccagctgtatacgctttttaatcgacaacatttgaataatatgtacataacattatgttg

SEQ ID NO: 713 - DNA, 672 bp, Zea mays
  Clone ID: 700087719_FLI
tccaaggagagcttcgtgttccggagctcgtgctgcgaggctgctgaaccggcgaagggcgccgacgacgacgacgacggtcgctgccagcggaggagggacgtcggcacggagacgacgccgctgggcagctcgtgtcacacgccgctcaagagcgcgtccccggcgcggcacaacacgccggcgagccggtcgtcgggcccgctggtgccgtacgccggcggcggcggcgggacggacatctcggagctggcgggattccgcctcgccaagctggacctgggcgcgcggttcggcgcccacgccacgctcgtcggctggagctccaaggaggaggaagaggacgacgaggacgtgtccaagagcctcaggcacttcgaggccaccgtcggcgggatagcctgcgatagacgcggcggcgactgccgttgggatgacgacgacagggccaagagctgtatcaggtatcagagggaagaggcgaagatccaggcctgggttaacctggagagcgccaaggctgaagcgcagtcaagaaagctggaggtgaagatccagaagatgcggtgcaacctagaggagaagctgatgcggcggatgacgacggtgcagcggcgcgcgggggagtggcgcgccacggcgctggcgcagcacctccagcagctgcggcgc

SEQ ID NO: 714 - DNA, 1189 bp, Zea mays
  Clone ID: 700087862_FLI
cgacatctccgccgactacatcgaccacttcaagtcccagttcgcggcggccacgggcgggggccgctgctcggccttcgaggtcctcatcgccaaggcgtggcagagccgcacccgcgccgcggggttcgaggaccccgacacccccgtgcagctctgcttcgccatgaacgcgcgcccgctcctcggcgcccgcctcccgcggggcggcgccggcttctacggcaactgctactacatcatgcgcgtggcgtccacggccgacaaggtgtcatcgtcgtccgtcaccgacgtggtgaagatcatcagggaggggaagaagcggctgccgttggagttcgcgcggtgggcggcgggggaggagggcgccgacggcgtggacccctaccagatcacctccgactaccggacgctgctggtgtcggattggacgcgcctcggcttcgcggaggtggactacgggtggggcccgccagcccacgtggtaccgctgacgaacctggactacatcgccacgtgcatcctcgtcaagccatgggcccacaagccaggggcgaggctcatcacgcagtgcgtgacgcccgaccgcgtctcgcgcttccacgacgccatggtggacatgaactagcgccccgcctcgtcctgcgttcaccacccgccgtcgtctccgccggcctcccgtttgttcatgggtttcttgttttttctcctctcagttactgtggtaattattagttggtattataattactaatcacattgcggccttaggacgagtggtgatctagaaaaaaaaacgcaagcaataaactactaatataaagaaagaaaaagataagaaagggaaaacatgataatgaagtggtgtacatactgcacaggcaggcaggcaggcagccagccagccagctagagccaggtgaggtgaagaacagaaggagaggtatgggcgggggacagatagacacagctagatagtagttggcaatagtgggattggtattggattccttatttccgttggatgccttgttctcttttgttggtgtcggggtgagtacactgcatttttcttttcttcttgcctgttgttctttgggggctttgatcggagaaaggatcaaaactggacttggtgggaagccaccaactagtctgcccctaaataccataataagattgtatttgt

SEQ ID NO: 715 - DNA, 1031 bp, Zea mays
  Clone ID: 700087870_FLI
ggacttcaagaccgatctccgcttccagtcctccgccgtcgccgcgctgcaggaggcctggaagcggagatcggtcttgaagtcctgcgcgatctcacggacgaggagaaagagagagagagacatagactcggactcggagagaaggagatgatgtcgagggagcgcaagaaggcggctgctcttcaggagaagctgaagatcctccgctccatcactcactcccacgctctgagcaacacgtcgataatcatggacgcgtcggcgtacatcaaggagctgaagcagaaggtggtgaggctgaaccaggagatcgcctgcgcgcaggacgcgctgagacacaagtcatcatcatcctatcccacggtgaccgtggaagccctaggagtgcaggggtcgtcgttcctggtgaacgtgttctccgacaagagctgcccggggctgctcgtcgccgtgctggaggccttcgacgagctggggctcagcgtgctccaggccaccgcgtcctgcgccgactccttccgcctcgaggccgtgggcggagagaacgtggcggacaacgtggacgagcacgtcgtgaagcaggcagtcctgcaggccgtcaggagctgctccgagggcggcagcgagcacgacgacgaggagtagtagctatagcaagaggctgagcgcgcgtaagcacacacgccttctgctacttgcatcggtcgatgtcgtccctgctgctggtgcatagctctggctggacaaccgcgcatgtactcgatcgatcgtcgaccggccggcgccctctctgtgtatggtagtagcagtagctccgtttctcagctagctccccctctcgatctttaattcgattttttttactcttctctgtttcctctatctatctatctatctatcggtggcaaagatgaaacagagccgctgctcctagctgctgatggtccggtgaattcgttcgtagcagcgccaccgtttcctgtgtaatagtattggccggagggcacgccgtgatttacatatttagt

SEQ ID NO: 716 - DNA, 2537 bp, Zea mays
  Clone ID: 700087883_FLI
caatggatcatgaaagagaacaattggagacatacaaattggagcttgaaaagatcaaatcagcattagaagctgagaaggaaaaaatatcagaagagcagaataatctgaaactcacagcgcaagagaggcaggagcatagcttgttgatagcaaaacttaagaaggagattgaggaatacagaatgcgaagcaactccctatctgaggaaatggaggatttaaggaagcaacggcagaaatttgaagaagagtgggaacaactagacgaaaagagagccctccttgtagaggaggacaaaaggttgaacattgagaggatgaatttagaacggtggcgtgacaacgaagaaaaaaggttaaatgatatgaaactcaaaatggatgaagaatacaagcagcagctggagagtcttgagcgcaaggaaaaggctttgagtgatgatatgaagcacaagcaaatggaaaatgatgaatttctgaagggagaacgtgctgatgttcaacgtaaattgcaactcaaacggcatgaattggagatggagatggagcaaaaacaagccacgaaggagaaggaactggaagaaaaggaaaatgagttaaataagaaaatagattttgtggaaaataaactccgacatgcaattgagttgaatgagtccaagattgagaagttattattggagaaaagggaggtgcagatggaaagagaattactgctggaggaaagaaagaaaacggagactgacaaggcagatattagaagggatattgagagtctgcactcattgagcaagagtttgaaggaacgtcgagaggcatataacagggacaggagcagactcatcgaactatttgaaaagtacaaggcgtgcaaaaactgtgggatttctatttttgagggattggattctctgctgcttaaagacagtgctgaaattgagcatccaagtttggctgttgagggagatgatcatgccttgaccaccgatacatcaggtccagatacaggaacccttgttaattcaggtggtcgtttttctttgttacagaagtgttcaaggcttttcaagttctcccctagaaaaaagggtgagcagtcatcagaacaaccatcagagaggaatatatcttttggtgcaagactcgaggaagcaacacagagcgatggagattatgtgccaactcctgtctatgagatagcccacgattctttcaatgcagaggatgagctcccttctgacggtgaaaccagggagaatgaagagtctgaaaggcatgacatagctgataatgcccagatggagtcttctgttggtgtagcagataacagtatagatattctcggtactaagtcatttgatggtgctaacgacatggcagttgaagcaactattgtctctgttgatcaaaatggcgaggactctgtagttcctgctgaagcaggtgtagagcctgaaacatcagagcaaggtcggcgccagcaaaaccagagaggcagaagaaaaggtggtatgaaaagaacacggtctgttaatgctgtagttgaagatgctaagatgatacttggcgaggtttttgaggagaagactgatgatcagggagatacagtcaaggtgggtgctacacgaaagcggcggtttgctggagctacaataagtgaacaagatgaagaagggagcgaagcacattcagaaagtgtttcacttggagggcagcgccgtaagaggcggcaaactgctggggcagtgacagatgccccaggagaaagacgttacaatttgagacacagtagagctgcaaatgctggcgctgcaacagcccaagcagacaaaaaaaaatcttcaaaagcaagaaataaacatacagtagaagcttctgctgatgacaccgaaggaacatcaaaggttgttgaggaacctgcccctgagagcaagagggtatctgaatctgcagactacgatgcatcccagttgcatgagttttcccaggttgaagttggtgatgcccatgctgtagacggtgagggtgctggtgaggaagatggtgatattttggatggccaagatgcactgcctgatgtgccaatgacaccttctggaagcgagtttggagcggaacaggaagatgaggacgatgatgattcagagaggcgaaaccaatcaatcagcaagaagctatggtcattcttcactacatgacttgctgaagaggtcgtcatgtaggttatttctagcttttgtggtttcgattcatgataccccattcttggaactgtaggtcgtgtgcttttggtgattatgtactagatttcccacttgattgtgcttctctcccgtgtaattgaaatatatttgtagtggacatagtttgatggcactcacagaagtagctgatgagatgtacaatggcgatgatggtatgccctgtaaggctgtaacaccagtagcttggtttgtaattgttcttttcccccggttcgtgttacttcgttgaccttattccggggaaatattttagtgctgtgatgatggtct

SEQ ID NO: 717 - DNA, 1773 bp, Zea mays
  Clone ID: 700087958_FLI
atgggatggcccaactgcagatctgttcctgggatactacacaatgactacattgcatactcggagctgctcgacaggagcgtcgtcggcggtgctgtaaacatctcctagagtcctcgggcacaagaaggtcaggcggtgatgccaatgcagatcatccaatcagatccagaatgcctgccactgtatacttggagctgctcgacaggagcgccgttggcggcattgcaaacatctcctatagtcctcgggcacaacaaggtcagccaatgacgccaacgcagatcatcccatcggatccggtattcttgacgaaaatccctgaagatgggaaacccacgctgctggtgcaaacaccgccggtgatgccagtttgtagcttggctcgaggcgggcatcagcgacgacaaacatcctgctcaatttgttgtatgataaatactgcgaaacaatgctggtgtttcataagatgaccgtgcagctcatgaaaatccagagggtggagtcgagcgagacgacgtggccggcgcggcgccaggtcgtggcgtgcgccgctgtttgctggtcgtggcgtgaggtcaccaaggaggtggtgaagacgctcaaggagtgcggcaggatcaccttccccatgtcccttaagcaggttggcactctctgccttttctctactttgatgatcaatcacatgtcttcacctttgcagaggcttatgattttgaagatctagaatctatggttgaagaaatagccaaagcattcaagacaaagataatgtttatatatgttgacactgctgaagaaaaccttgcaaaaaccattcctcactctttatggcattgaatcagaaaaggcctactggtccagttcttgaaagggtgggaatgtgtccaagaagacaaaggcatcgacccgccaattcttcgctacaaattaaaacagcactagggtgagatcagtgggcttgagagtagcatcatccttcaaacatgatgatgggtttctagctgatggtgtctctatagctcactggtatccttcaaaaagaaacttcctggaaaaaatgtcttttgaagctaatcttgctccatacagctaatcttcacatctttcaaagcatttgctagggcccttcggtgagcaatagaatacgacttgcgctaccaaagcgtccataggttgaggacctccatgacacctatgttggtgtgggttgtgccgccccatcgtgaccgtcatcgattgggcctccgagtccaggagaagacctccgatgaagaaagagacatgctgcacatgcacgagggtacttgcagatagatgtcggctctatggacgaacactcgaccaagtcagatgaggagtatgagggcctagccatgcgagacatgatggctaccggtccaacaatgagcagcaagctgtgagttaaagatgaactcacctgtcctggagagcaacatccataggagtgaggcaaaatggcgggtaccaccacaacatggacccgttcctgaagatgtccaaggaggtggtagccgacaccataatgtcttgcgcgtcattgtgtcaccggccggcaacacgctgcgctggtaccggcgggtgttatgtttcttaggcgtatgtttctgtgctttgagctgtgctatagactggttgtgccaactactgattttaaaagaaaaaggtgagctgaaaatcattgttgaaaacaaacatgtaacggttcgttctcatcagttgtgccaactaccaatcatttcattgatc

SEQ ID NO: 718 - DNA, 858 bp, Zea mays
  Clone ID: 700087978_FLI
tgctgcctcattttaactcttcttttactgaagctaatgaatgtgaactgaagattaaggatgaaccagttgcagctcctaggaagggaagagcacctgcacctcgttggtatatctcaaccgaggagcttgattcactctcatcgtacatgaggggaagactgactttggaaaaggttaatatcgcaataaatgaagtggcttcatatgcagatgccaatgctcatcttgttacatgccctaagaaaaagttgtcagaagatacatgggaaaaagctttggaactaagggatattgcagcaagtggtgcagtaaagggcaaccatttcttcctggaagcagatataaaaggacctgggttaaaacttgacaatactggcaaagctattcttaccgttcttcgccaccttgggcgcttccatgaagttcggattgggcaccatcgggtctttatactgtcaaagcaggcatgaagatatttcatttgatttgagttggtgcactgtaattcggcaaaatccggtagcctccaaaccgtgatattgcaaaatgtatttcacatgcacctacttattaagagatactccatccgttcataaatatatgacatcattgattttttttttaaactgaccactcgtcttattaaaaaaataatgagtcatttattttgttgtgaaatgttttatcatttaaggtagttttagtttgtgcttatttaaaattttatatttttgaataaatattttgaataagataatggtcaaagttttttgaaaagaatcaataatgccatatttttgtgaacggaggtggtacctgtgctttcatcagtgatatgcttggcggtgtgttttc

SEQ ID NO: 719 - DNA, 1902 bp, Zea mays
  Clone ID: 700087981_FLI
acacacaaacacaagtcgtcgtaggcagcgagcgtctctcctctcccacgcatcgcgccaaggaagagagagagatcgccgctccccttctcggcgtcggtggtgcgggtgccctccctcctcgagcgagatctgtctggtcacagatctatctgacaaaatggtgaagatctgctgcatcggtgctggctatgtcggtggcccaaccatggccgtcattgccctcaagtgcccagacattgaggtcgtcgtcgttgacatctccaagccccgcattgaggcctggaacagtgacaccctgccaatctacgagcctggtctcgatgatgttgtgaagcagtgcaggggcaggaacctcttcttcagcactgatgttgagaagcacgtcgctgaggctgacattatctttgtctcggtgaacacccccaccaagacccgtgggcttggagctggcaaggctgccgacctcacctactgggagagcgctgcccgcatgattgcggatgtctccaagtctgacaagattgttgttgagaagtccactgtccctgtcaagaccgctgaggctattgagaagatcttgacccacaacagcaagggcatcaactaccagatcctttccaacccagagttccttgcggagggcactgccattgaggacctgttcaagcctgacagagtgcttatcggtggccgggagacccctgagggcaggaaggccgtccaggctctcaaggatgtgtacgctcactgggttcccgaggacaggatcctcaccaccaacctgtggtctgctgagctctccaagctcgctgccaacgcgttcctggcacagaggatctcctctgtgaacgccatctccgccctctgcgaggccaccggcgcgaatgtgactgaggtggcttacgccgtgggcaaggacacgaggattggccccaagttcctgaacgccagtgttgggttcggtgggtcttgcttccagaaggacatcctgaacctggtgtacatctgcgagtgcaatggcctgcccgaggtggccaactactggaagcaggtgatcaagatcaacgactaccagaagagccggttcgtgaaccgcgtcgtgtcgtccatgttcaacaccgttgccggcaagaagatcgccgtcctcggcttcgccttcaagaaggacaccggcgacaccagggagaccccggccatcgatgtctgcaagggcctgctgggtgacaaggcccagatcagcatctacgacccccaggtgacggaggaccagatccagcgggacctagccatgaacaagttcgactgggaccacccgatgcacctgcagccgacgagcccgacggccgtgaagcaggtgagctgcgtgtgggacgcgtacgaggccaccaagggcgcccacgggctgtgcatcctgaccgagtgggacgagttcaagaccctggactaccagaagatcttcgacaacatgcagaagcccgccttcgtcttcgacggccgcaacatcgtcgactccgagaagctgagggagatcggcttcatcgtctactccatcggcaagccgctcgacgcctggctcaaggacatgcccgcggtcgcctaatcccacccccctcacccatggattggattccgggaaggaagaggagagaagctggttgaccgttctttattacagtttgtttttgcaggctacgctaccgattttctcttgtgtcaggcataaaaaaaggttggacgggctgctagtattccctgctgtttggtgttttcgtatcggaggacgtctgtagatgtacaattcctcaggccccttgtgttcggcttgaggaagtttccgttgtaccctggacctgctatagccggttgattcttcaattgtattcctaaaagttactacac

SEQ ID NO: 720 - DNA, 1020 bp, Zea mays
  Clone ID: 700088013_FLI
ctggtggggaagaaccctacctcacgtcccggatcccatccggcggccaaggggagttacacgctagccggcggtcggccagccgccgccaaccgcctcagccccaacagtcgcaccgccgccgccgaggcaaactcgaagccacccccgccgccgcagccacagccgcgccgagcttgagccgtcgttgctccgctgaatcgcccccatcgtctctcctgaagagagaggacatttattgagacagcatgcctaagataaagacaagtcgtgtcaagtatcctgaaggatgggagcttattgaaccaaccatccgtgagttggatgccaaaatgagagaagctgaaaatgatccacatgatggaaagagaaagtgcgaagctctctggcctatttttcgtatttctcatcaaaggagccgctacatatatgatctttactacagaaggaaggagatatcacgggagctttatgagttttgcctggaccagagctatgcagatcgtaacctgatcgcaaagtggaaaaagccaggatacgagcgcctttgctgccttcggtgcatacagacacgtgaccacaactttgcaacgacttgtgtctgccgagtccccaagcatctgagggaggagcaagtgatagaatgtgtccattgcggctgcaggggttgtgccagcggtgactaatcttgtcatcatgttgttgggctcacgactcatcaccatcctaaccacattagggcttgttcggttattcccaatacacatggattggatgggattggaaaaaattatgaagaagtttgacttgtttgggatttaaactcatccaatcctgctcaatccacatggattgagagctaaccgaacaagcccttagatgtctcgtgagcatggatcggctatggtgattagcatgaatgtgttgtggtaactagttggaagactaaatttcctgacgtttggatgtttgcaactgctatgtactataaagactcctcgtgccacagatgtttttgtt

SEQ ID NO: 721 - DNA, 450 bp, Zea mays
  Clone ID: 700088065_FLI
attggccctggtgtctacgacatccactctcctaggattccctccaccgaggagatcgcagaccgcgtcgagaagatgctcgccgtgctggacaccaacatcctctgggtgaaccctgactgtggtctcaagacacgcaagtacacggaggtcaagcccgccctgaccaacatggtctcggccaccaagctcatccgcacccagcttgccaacgcgaaatgagtcgtttgatagctccatggtttgatagcgcggaatgagccagttgttttgaataatttgggtgttaccccctgttccatggtgttagtgttaggttagcgtgtcattggtgggatacgccgttacaagatgtgttctaagtttggagtgtgtgttttcctttgggctatgtttctgggggtatgtgtgtgctttggttataaacagaaatgaaatatgcagtcttcc

SEQ ID NO: 722 - DNA, 789 bp, Zea mays
  Clone ID: 700088077_FLI
taatacccacaacccactcgatagaagcatcgccccttgaaccctagctcccgcaactgccgccgccactcccacgcccgcagccatgccgcccaagctcgacccgtcgcaggtggtggaggtgttcgtccgtgtgaccggcggcgaggtcggcgcagcgtcttcgctggcccccaagatcggcccgctcggtctttcccccaagaagatcggagaggacatcgccaaggagacggccaaggactggaagggcctccgcgtcaccgtcaagctcaccgtccagaaccggcaggccaaggtctccgtcgtcccctccgccgcggcgctcgtcatcaaggcgctcaaggagccagagagggaccgcaagaaggtcaagaacatcaagcacagcggcaacatcagcctcgacgacgtcatcgagatcgccaggaccatgaggcacaggtccatggccaaggaattggccggcaccgtcaaggagatcctcggtacctgcgtcagcgtcgggtgcaccgtcgacggcaaggaccccaaggacctgcagcaggagattgacgacggcgaggtggagatcccgtccgcttaagaaggattggtgtccaggactgtgttatctttgctgctgaagccattctctgcctagattttctcatatttatttgaggtgggggtggacgtggacgtggaactatggaagttatcacagcggagttttgcttagaaactttgtcatgctttaagtctgagacaatttctgtcaaattttatgaacattcctaggtacaatcg

SEQ ID NO: 723 - DNA, 683 bp, Zea mays
  Clone ID: 700088138_FLI
ctgagaccagaggaggagacgtcacgcctgcgcggctgcgcccaccatggacgaggatgagtttcggcgcatgctcgacctcttcccggtcgtccgctcccgagactactgctgctccgatcctggaacatccagcagaggaaccagacagcgatcacgagttcaggaggcaactacgggcgataataaggactcgtcctgtgcacaagatatgtttatgcagaaattgaagatggctgcggagaataagattggagcgacaaaggcagagttcttctgcaagacattcgaagaagttcatgagaaacttgttcacagagagctgaatttggatgctgctaagaagttcctgagcgcatatgagagctgatgatgaacaataggtagatgctgctaaagggtcggtagttgccaatgatctggaaatttgttgatgctgttgagattttgatcacaggcaaacttttaacaacaggtagatgctgttgagcgcatactgataccgcctgattggttcaccctcgcccgtagccagctcgtatgcagccaggctgtccggttatttgggccgtacaagtggatgcacccaaataacttatgttacgtttactcgtgcagccccacgtctttcacgtgcatgcaattaaacatatgctcaataaagtcaacagatgtgatggttc

SEQ ID NO: 724 - DNA, 1009 bp, Zea mays
  Clone ID: 700088167_FLI
tttgctgctctccgaccccgagctccgaaggccgcagcatcaggcgaggcccccctcgcgtgtgaccgagatggcgctgccgaatcaggggaccgttgattaccccagcttcaagctcgtcatcgtcggcgatggtggaactggtaaaactacatttgtgaagaggcatctcactggagagtttgagaagaaatatgaaccaaccattggtgtggaagttcatccgttggatttcaccactaactgtggtaagatcaggttctactgctgggataccgcagggcaagagaagtttggtggcctcagggatggatactatatccatggccagtgtgcgatcatcatgtttgatgtaacctcaaggcttacttacaagaatgttcctacgtggcatagggatctgtgcagggtctgtgaaaacatccccattgtcctctgcggtaataaggttgatgtgaagaacaggcaggtcaaagccaagcaggttactttccacaggaagaagaatctgcagtactatgaaatttctgccaagagcaactacaactttgagaaacctttcctgtaccttgcaaggaagctggctggtgatccgaaccttcactttgttgaagctgttgctcttaagcctccggaagttaccatcgacatggctatgcagcagcagcatgaagccgagcttgctgcagcagctgcacaacctcttcctgatgacgatgatgatctgattgagtagaaaggatcatgagtcttggacttgagcaggagttgtgccttgcacgatttaagttgttctagggtggactctctcttgagttatcattgtctggatcatctttttctccttggacttgttgcaacttttgagtgtggaaatggattggaatagtcgccatgaatttgctggctactttatacatgtctttgttcataaaccttgttttaagatgaagttgtggcaatcctcttagtgctaatataatgttctattgtcagctgtacaatgtag

SEQ ID NO: 725 - DNA, 1227 bp, Zea mays
  Clone ID: 700088173_FLI
ccgagtcgcacaagaggctgacctcccttcacccggagattgaggagctcctgtacagccaaaccgagaacacggagcacaagttcgttctgaacgacaggaacaagccaatcatcttctccatggctcgtctcgaccgtgtgaagaacttgactgggctggtggagctgtacggccggaacaagcggctgcaggagctggtgaacctcgtggtcgtctgcggcgaccatggcaacccttccaaggacaaggaggagcaggccgagttcaagaagatgtttgacctcatcgagcagtacaacctgaacgggcacatccgctggatctccgcccagatgaaccgcgtccgcaacggcgagctgtaccgctacatctgcgacaccaagggcgccttcgtgcagcctgctttctacgaggctttcgggctgacggtggttgaggccatgacctgcggcctgcccacgttcgccaccgcctacggcggtccggccgagatcatcgtgcacggcgtgtctggctaccacatcgacccttaccagggcgacaaggcgtcggccctgctcgtggacttcttcgacaagtgccaggcggagccgagccactggagcaagatctcccagggcgggctccagcgtatcgaggagaagtacacctggaagctgtactcggagaggctgatgaccctcaccggcgtgtacgggttctggaagtacgtgtccaacctggagaggcgcgagacccggcggtacctggagatgctgtacgcgctcaagtaccgcaccatggcgagcaccgtgccgctggccgtggagggagagccctccagcaagtgatgcgtgacggcggccacagacctgatcgatcgatgagcgagagggagcactcggagtgtcgtgtcttttcccttgccatttctttctttcttctttttccttcccggaggcgaaaaaaaaagagtctgcttttgctaggcggcgggcgttcgttgctgctctttgcttcaagagttaaatttacctaccttgtcaaggtcttgttccatcattgatccgggtgtcgcttttagtagtctgatggactgttagtagtttgcgttgcgtcggttgagagggaacggtggtggtggtggtgtgtgtgcagtcgggtgtggtgctccctttgtttcctggatgggatgttgctccttgaataataatcgtagtggccttggagcccttttcctgaaat

SEQ ID NO: 726 - DNA, 1277 bp, Zea mays
  Clone ID: 700088181_FLI
tcgccgcatataatgtagcctggccatggatactttccctcctcgcctccccctcttcgtcagccccgcatctggcccggattagccgcctccggctccctcccggatcgccccaccaacagccagcctcgccagctgatctaagccaggcgcaactgtgaaacaatggcgacatccaagaaggatccccccaatcctagcagaggcaggacgtcacccaacctcatgtcgtccagcagtgagtcctctgggcacggatatggtgctaggcgggctcggtctgtaccgagttccgcgcaccgcaaatttggctcatcgtcgccgtctgtgtctgcctctggctccacagacgtgcatcattcatcattgttcaacgctggtaggtccatctcatcacggaccatgggctcttccatccagggcaccaaggcccagccattcccatctgcagcctcaaaacctacactggcaaaggagaaatccgacaaggtcagcaccaccttgcagcggcctccagtgcttgctgtgccggcagctaaggcatcgccatccaccttgccgaggagaaacataaggacccatcaatgcagattaagggaactgagtgcataaacaccaccacgtctatagaagagcacttgcacaaggagctccccgacccagttgatctgaaatccatggagatgactgtacctgatcagcatgacccatctttcaatgaaccagaacatgtactcaaagacgatgagaaatccgagggtcatttctctgaagagaaagtagatgcaggagctaatgagattcataatggagggcaagatgacaatggtggtgtcaagactatatatgaatgtgggattgttgagaagaaggctgaccggagtgtggataagacagtgccgaagactgaagtggctcaggtatggaggaaggatgatccaaagggcaatgacgtgattgaggaaaccaaaagcaagctcctgctggagaggaagagccgggtgaaggccttggtgggggcctttgaaactgtattgtcgttcaaggagtagtcctcaatcttgtcttctggtctcttgtgcccatctcaatattgagtaatatatatgatgacttccttggctcgttgtactctatatcgtatttcctttttctgaatcatcgttgcattcgatgtggatttgtctatttgttgctctttattgatgtagaattaaattaaattccggtgcttatggcgagaacatttggattctgtgaggaatattcttacttgc

SEQ ID NO: 727 - DNA, 825 bp, Zea mays
  Clone ID: 700088188_FLI
ctgcaattgaacatgcacatatacgggatgtggattataaccccaagaagcaaaacattgttgcaacagcagaagaggaatttggaattcgcttgtgggatctcagaatgcttaagtatcctctaaaagatctccctgggcactcacattggacatgggctgttcggcacaatcctgcgtatgatgagctccttctgagtgctggaacagattcaactgtaaatttatggttggctaaagttagcagtgacgatcctgaatctgatagcccttctgctttatccaataggcaagaagtaccattactcaactcatatactgactatgaagacagcatctatggtattgcatggagctcccatgatccatcattattcgcttctttgtcatatgatggaagggttgtcttggaatcagtcaagccctacttgcagagaaaatgaaccttgtctggttttctaaattgtaaggtgcaaaatatggtttcttgtttcctttatcttgtccttattattactgaagttacctcatgtcctaataaactgttctcttcctgctacatgtgggcttgtttgttcatattggaagctgagtagctttgccttgccattctgtagcctcttaacaagcatttatgtgatgattcggtttactgttgtagcaatggcagaaaaatggataacaagattgttacagaaatcaatttttaggatgttgtatatttgaagtgtccatgaaaaggtcttgtgttatatgatgaggtggggttgaactcaatttgtaaaaccgttcagaatttcagattagtaggattagttttttttt

SEQ ID NO: 728 - DNA, 1452 bp, Zea mays
  Clone ID: 700088259_FLI
tggagctctacgagtggaccaaggtcgacatctctgatgaggcccagaaggagcgtgtcaatgccatgatcgaggaccaggaaccctttgagggcgaggccttgcttgacgcgaaatgcttcaagtgagtgtgctttatccagagctgtttagccctcgaattggatgtctatgttgatctggtatatcttgctatgaactggttaaggtttgtgctggtttgagaatttttgtttaccttctcatcatttaagtgtttcgccgtaacaattttggtcatgtttttgaaagcctgtttgtattcgcgtcgtagttggggctatttatgcagactatccgatttaagtagattcaagtggcattattctctcggacgcgtgggcgccgccgacgtccaccttggcaccaagaactgcgatttccagatggagcgctatgcctttaagcgccgcaccgacggcatctacatcatcaaccttggcaagacatgggagaaactgcagcttgcagcgagggttatcgttgccatcgagaacccgcaggacatcatcgtccagtccgcccgcccctatggccagcgtgctgtcctcaagttcgctcagtacactggcgctcatgccatcgctgggaggcacacccctggtaccttcactaaccagctccagacctccttcagcgagcctcggctgctcatccttaccgacccaaggactgaccatcagccaattaaggagtctgctctggggaacatccccaccattgccttctgtgatactgactctcccatgcggtatgtcgatatcggcatcccagcgaacaacaaggggaggaacagcattggatgcctgttctggcttttggccaggatggttctgcagatgaggggcactatcctccctgggcacaagtgggaggtcatggtggatttgttcttctacagggacccagaggaagcaaaggagcaggaggaggaagctgctgttgcccctgagtttgccgcaatcactgattaccaaggagctgatcagtggggtggtgaccagtggacctctgatgtgactgcgccgcctgttgctcctactggtgctgattggggtgctgctccagctccggttcctactggtgatggctgggatcaagctggggcccctgcacctgtggtggacggcactgtacctcctgtggttgctcctactggttgggaccaagcagccccgccaccgactgcccaaggctgggagtaggcgttgtccactctgagacctgtcttctgcggctgaagttcagtatttttctgtggtctgaatgtccaaaatctggtggcatcttctatagctctgctttgctttgaacacttatgttttagggctttctagctgaacccgttgtccaatattgctgacattgaatttttttggttaatcttaaaactggaaatgatgcttgcggttc

SEQ ID NO: 729 - DNA, 1150 bp, Zea mays
  Clone ID: 700088295_FLI
gccgggatgaacttcggcatcttgatagttgggtgaaggagaacaagctggaccagctacaatttgctcggcagaaactgacatattgctatctgtctgctgctgctaccgtattttcttctgaattgtctgacgctcgcatttcatgggccaaaaatggtgtcctcacaactgtggttgatgacttcttcgatgttggtggatcaaaagaagaattagaaaacctgatagcactagttgagaaatggcatgcgcaccatgcagttgagttctattcggaacaggtgaaaatagtattttctgctatttatacaacagtgaaccatcttggagcaatggcttctgcagcacaaggccgtgatcttacaaaccacctagtagaaatatggctggatttgttaagatctatgatggtcgaggcagaatggcagagatgccaatatgtaccaacagttgaagaatacatgacaaatgctgttgtctcatttgcactgggcccaattgtgctcccagcattgtattttgtagggcaagagctattagagcatgctgtcaaagatgaagagtacgataaattatttaggctagtgagcacttgcgggaggctcctcaatgactaccaaagtttagagagggaaggcaaccaggggaagctgaatagtgtttctctacttgtgctccacagtggtggttctatgtccatagaagccgctaaaaaggcaatgcagaagtccatagacgtgtctaggagagacttgctaagattggttctcaggaaagaaagtgctgttcctaggccatgcaaggagctcttctggaagatgtgtaagatacttcccctgttttactctcagaatgatggatttagctccccaaaggaaatggtcagtgcagtgaatgctgttatcaacgagccactcaaagtccaaaatagtactacgtttttgtctagttcatcaaggtagcgaggatatcatgtaatttatcctgttcatatggatcagaagcaacagcagcaagcttaagatatttgtaagtttgtgactgggctggtgtggatctgtgaagctacaactttgctgtatgtggatcaaggtattaggaagatctggttcacatattgataacataatggataaaccataacgtt

SEQ ID NO: 730 - DNA, 954 bp, Zea mays
  Clone ID: 700088359_FLI
gccttcctctccgccgccgcctcctcgacctccgggcgcgctcccaacgccgtgcccccgatggccaccgccgctgccacggctgatctctcggctgccgatgataagcagcgggactcggcgcttccggagctcacgacggaattcatggtggacatgaaatgtgagggatgtgtaacagctgtgaaaaacaagctgcaaactcttgaaggaataaaaaacattgaggtggacttgtctaaccaagtcgttagagttttggggtctcttccagtgaagacaatgttagatgcccttcatcaaacaggtcgagatgcacgactgattggccaagggaacccaaatgatttcttagtttctgctgctgtagctgagtttaaagggcctgttgtatttggtgttgttcgtctggcccaagtaaacatggagttggctagagttgaagccacgtttagtggtctatcacctggtaaacatggatggtcaataaatcagtttggggatttgacaagaggtgcagaaagcactggcaatgtctataatccgccagatcatttatctgataagccacttggtgacctgggaacactagaagctggagagaacggggaagcccatttctcaggaccgaaggagaaattgagagtggttgacttgatcggccgctctattgctttgtatgcaaccgaggacagatcagaccctggcattgccgcagccgtgattgcaagaagcgccggggtaggagagaactacaagaaactctgcacttgtgatggtgtcaccatttgggaatcaagctaaacctgctaccagcgaattttccatactatttacttccgtatgttgtacacacacattaacgtagaaacaatcaaagtggcaactgaacatttggaataagcttgaatacattgaggaataaaggctgttctcatgtggagcttggacagt

SEQ ID NO: 731 - DNA, 668 bp, Zea mays
  Clone ID: 700088394_FLI
ggcggtatgatctctcataagcatgaacgtgccctgcaacataacgtcgggaaatcggtatccagtgccggacaaatctgctcccgtttacataacggtcggtgatggaggcaaccaggaaggacttgcttcaaggttttataacccccagccggattactcagcgttcagggaggccagctatggtcactcagttttacagctgaaaaacaggacccatgctatctaccagtggaatagaaacgatgatgggaatcctgttccagcagacaccgtaatgttccataaccaatattggacgagcagcacgcgccgcaggaggctgaagaagaaccatctccatctcgaggaccttgaggatttgatctccctattatagaaaaccgggttcgcaggacgcatgaactgtgtgtgggggaataatcgcaggttagcactgttgctagtgtgcccgcctctcttggaatggaagcagcagagccagctatcagactggcagtgaccaccacctcctcagctacctggttgcatgccacagatctgaaattctgaaatgctgtgactgtgactgtgaggtatgaaaaaacagtgtaaataacgcggttgcctccgtacatgtgtgacattttatacacgtgcaagaaagcatcggtgtccaccgttgtccg

SEQ ID NO: 732 - DNA, 1303 bp, Zea mays
  Clone ID: 700088489_FLI
agaaaaagctctatgatgaagtgaaggctggtgagattatgaagcttgagtatcagaggaaggttgctttgttaaatagacaaaagaaacacaatgctgccattgaggttcttgagaaaacgaaagctgcggtaacccacttacatactagatacatagttgatatgcaatcaatggattcaactgtgtcagaaattcagtatctccgtgataaccaactgtacccaagactattggatcttactgaccggatggcaaaaatgtgggaggacatgaagatacatcacgcaaatcagctgaaaattgtcctaaatctgaagtctgttgatattcctgattccaatattgaaacaagtgattatcaccacagccacacacggcagctgcgtgatattgtagataagtggatcacaaattttactgacttcatgaactgtcaaaaggaatacataaatgctctctatggctggttgaagttgaaccttatacccatagagagcagcctgaaggagaaagtagcatcgccacctaggatgcagcaacctcctatcaaagcctttctttatgcctggcatgagcacctagccaagctgcctgatgatcttgccaagacagccattgtcacttttcgagcagtcttggataccatattgggtgttcaagatgaggagttgaaacagaaggagatctgtgagcagactcgtagggaatacatacgtaaggcccgggcttttgaggattggtgccacaagcatccacagcccagagcgatcgacgtcgatccagatagcggtgaggggacaggacataaggatgtagtcaccgagaagagattcgcagtggagagcttgaagagcaagcttgacgatgaaattgaatcccataataagctatcaaagcaggtcagggagaagtccctctcgatcctgaaggcacatctcccagagctgttccgtgctctgaccgacttctccgacgcctccttcgaaatgtactcgaagctgaggctgatgtcgttgatgcaggatcagggaaacaactagatggacagtatgttcagaagttaggatcagtaatatccctcccccaagtgttgtaatgcatgtgttctacccctttctgtggtatgtgtaaaaggctagtagctcattggatgaggattcttgtttaatttattggcttgatgaaaccatcgggtactttgtagtgtggacatatgctggatagttagcatgtgatgaactgattacaatctgtgggggtaaaagccgtcgtctatgtaaatgataaattttgttgagat

SEQ ID NO: 733 - DNA, 2177 bp, Zea mays
  Clone ID: 700088507_FLI
gagaactcgacgggggattccaccaatttaggacgttcaaagtgtgcctttgaaacattggcatctcccacaaagacaataaagaacatgctgactgttcctagttcccctttgtcaccagccaccggtggttcagtcaagattgtgcaaatgacaccagtaacttctgccatgacgacagctaagtggcttcgtgaggtgatatcttcattgccagataagccttcatctaagcttcagcagtttctgtcatcatgcgatagggatttgacaaatgctgtcacagaaagggtcagcatagttttggaagcaatttttccaaccaaatcttctgccaatcggggtgtatcattaggcctcaattgtgcaaatgcctttgacattccgtgggcagaagccagaaaagtggaggcttccaagttgtactatagggtattagaggcaatctgcagagcggagttacaaaacagcaatgtaaataatctaactccattgctgtcaaatgagcgtttccaccgatgtttgattgcatgttcagcggacctagtattggcgacacataagacagtcatcatgatgtttcctgctgttcttgagagtaccggtctaactgcatttgatttgagcaaaataattgagaactttgtgagacatgaagagaccctcccaagagaattgaaaaggcacctaaattccttagaagaacagcttttggaaagcatggcatgggagaaaggttcatcattgtataactcactgattgttgccaggccatctgttgcttcagaaataaaccgccttggtcttttggctgaaccaatgccatctcttgatgacttagtgtcaaggcagaatgttcgtatcgagggcttgcctgctacaccatctaaaaaacgtgctgctggtccagatgacaactctgatcctcgatcaccaaagagatcgtgcaatgaatttaggaacacagtagtagagcgcaatttgcagacacctccacccaagcaaagccacatggtgtcaactagtttgaaagcaaaatgccatccactccagtccacatttgcaagtccaactgtctgtaatcctgttggtgggaatgaaaaatgtgctgacgtgacaattcatatattcttttccaagattctgaagttggctgctattagaataagaaacttgtgcgaaagggttcaatgtgtggaacagacagagcgtgtctataatgtcttcaagcagattcttgagcaacagacaacattattttttaatagacacatcgatcaacttatcctttgctgtctttatggtgttgcaaaggtttgtcaattagaactcacattcagggagatactcaacaattacaaaagagaagcacaatgcaagccagaagttttttcaagtatctatattgggagtacgaaccgtaatggggtattagtatcgcgccatgttggtatcattactttttacaatgaggtatttgttccagcagcgaagcctttcctggtgtcactaatatcatctggtactcatccagaagacaagaagaatgctagtggccaaattcctggatcacccaagccatctcctttcccaaatttaccagatatgtccccgaagaaagtttcagcatctcataatgtatatgtgtctcctttgcggcaaaccaagttggatctactgctgtcaccaagttccaggagtttttatgcatgcattggtgaaggcacccatgcttatcagagcccatctaaggatttggctgctataaatagccgcctaaattataatggcaggaaagtaaacagtcgattaaatttcgacatggtgagtgactcagtggtagccggcagtctgggccagataaatgggggttctacctcggatcctgcagctgcatttagccccctttcaaagaagagagagacagatacttgatcaattataaatggtggcctctctcgtatatagctcacagatccgtgctccgtagcagtctattcttctgaataagtgggttaactgtagcgatttaactgtacatgtatgtgttagtgagaagcagcagtttttaggcagcaaactgtttcaagttagcttttgagctatcaccatttctctgctgattgaacatatccgctgtgtagagtgctaatgaatctttagttttcattgggctg

SEQ ID NO: 734 - DNA, 1062 bp, Zea mays
  Clone ID: 700089012_FLI
cacctccaaacctcctctctatttccaatttccacgccgccgccaacatgaccacctcagccgccgcctccgccaccgccgcgttgtccaccccatcctccgtcaatccccatcgatcgtcttctgcgctcaggctcccagcgtccctccgccgatcccatcccaacagattcttatcgtcgtcaccctcgcgctctccactcgtgccggtctccgccatggcctctcccgccgccgccggtgagacgtcctccaggaagaaactcatcatattcgatgcggaggacgacctcgcggcgtcactggccaagtacacgtctgagctgtcggcgaagttcgcggccgagaggggcgccttcaccgtcgtgctctccggcggctcccttgtcaaggccctcaggaaactagcggagccgccgtacctagaggcggtggattggagtaaatggcatgtgttctgggtggatgagagggtggtgcccaaggatcacgcggatagtaactacaggctcgcctcagatcagttcctctctaaggtgccaattcctgctgaccaagttcatgccatcaatgatgaactgtcatccgagggggctgcaggggactacgaaactcgtttaaagcaacttgttaagaacggtgtggtcaaaatgtcgccggtgtccgggttccccaagttcgaccttatgcttatggggatggggcctgatggccacgttgcctcactcttccctggccaccctgttgtcaatgaaaaccagaagtgggtcacctttgtcaaggactccccgaagccgccgccggagagaataacgttcactttcccagtgatcaactcgtctgcacacatcgcacttgtggtcaccggtgctggcaaagctggtgctgtgcataaagcactttcagaagggcaaagtacatcagatttgctgcctgtcgagatggtttctcttcagaacggggagctcgtttggttcactgacaagccagcggtgtcaatgttgtcgagcatctgaagcccacgattgtataaatttgaagcttcaatttgatgggattcat

SEQ ID NO: 735 - DNA, 1006 bp, Zea mays
  Clone ID: 700089014_FLI
gttgaactcagcaagcaacaccatgccagcgacttgcaagagaaaaatagactttcacggatgttggagcacaagaatgctttacaggagagaatcatccaagaacgtgcagctgagtttggccgtctgaagaaagagagagatgaacggatgaatcggttgatatcttcaagaaagcatgaaagggagacagtaaggaagttgatgttttatctgaacctggaggaacagcggattgaaatgcttcgtgaggaagaggaagctagaaaacgtgaagcggaagagaggaggaagagagaggaggctgaaaggaaagctaaacttgatgccatcgctgaaaagcagcgattgagagagatagagctggaggagaaggcaaaggcaacaagggagaagctcttaaagggatccgaggctgtgcgcgctccagattctgcacctgttgcacagccacctcgagagtcagcagcagcgcctgcagctgctgcggcggcggctgctcctgctcctgctcctagtaaatatattcccaagtttaaacgcggtggtgatagcagcagcatcccttctggcagccgcgatgaagatcgctggggttcacgtggtccgctcaggcaagatggtcctcctgcacgactggatgcaccctcatcacggcaagatactgatcgctggcgtggatcaagatttccctctaactcaacgtcctcttcatcaacctggagccgttcacggaactgatcctatgctgcaggacttttttctagcccatgtgtcgacctccgtgcacaatgtctaatcgtacctttccaggcactgcactccatgcatattgtcgctgttttgtacttttgtagtaatactctacaatccatgattattgtccctgtttgttagtaatgctgttttatctgtgcatgaaacactctatacctacatatagccaagaattgcaggactatgtatgcatgtaaaacttgcaagattatcaatttttatgagctat

SEQ ID NO: 736 - DNA, 1216 bp, Zea mays
  Clone ID: 700089067_FLI
cacacgaaggtggacgggcgcgggaggcgcatccggatgcctgcaatttgcgcggctcgggtgttccagctgacaagggagctggggcacaagacggacggcgagacgatcgagtggctgctgcagcaggcgaagcccgcggtggtggcggccacgggcacgggcaccatcccggccaacttcacctcgctcaacatctctctccgctcctcgggctcttccttctccatcccagcgcacctccgtgcggccggcccacgcttcggcggcgcgcggggggacccgtgggagcgcgtcgtgggagtgggactcgggttcggcgccgccgccgaggaccctccgtccgctacgtcctcggcgtcgtctcctctgctgctgagtttccactccggcagcgtcggtcttgacgtgtcgccgtcgccgtcgtctgccgccgccggctccgacctgtcgaagaaacggaggtgggagcaggaaatgcagcagcagcatcagcagcaataccaccagcagcagcagatggccgggtacacgacgcagagccaaatgccaggcgccgtgtggatggtgccgagcgcgagcagcaacgctcaagctgccgcagcggctggcggtggcggtggcggcagcaacgccaacgagtcgatctggacgttcccgcagccagcaagcggcggcggcggcgcggcgaccgtgtaccgcggcgtgccgagtgggctacatttcatgaacttccccgcggcgcccatggcgctggttcccggtggtgggcagcagctcgggctcggcggccccgtgcccgtgggcggcgccggcaacgacagtagtggcagtgccagcggcggcggcggcggcgagggccacatggggatcctcgccgcgctgaacgcgtaccgagcacatagtgccgtctcggacgctgcgccggagcagaacggagcggaaggcggctctcgtcagcaccagcagcacggcggcggcggtgagcgacaggagagcgtgagtcctcccagcgacggctcgtagcgtcttcggagttcggaggcgtgtgcgtgcactggtctgctatggcgtctctctctctttctctctctctcctgtgttaattagtctgtgcttctcgacttatcgtttgcggtttttgttaattggttgcactgttgtggcctcctctggctccttcacattcttgcaaggatcatacagagtttggttt

SEQ ID NO: 737 - DNA, 1317 bp, Zea mays
  Clone ID: 700089087_FLI
ctttgcgaccgcggcaccaatgccagggtccagaagggcttcgtcgtcaaagacgccggcggcgccggcatggttctcgccaacaccgccgccaacggcgaggagctcgtcgccgacgcgcacgttctcccgggctccggcgtgggggagcaagccggcaacgccatgagggactacgccatgtcggatccgaaggcgacggccaccatcgtgttcgccgggacgaaggtcggcgtcaagccgtctcccgtcgtcgcggcattctcctcccgtggccccaacactgtgacgtcgagcgtcctgaagccggacatcatcgcgcccggcgtgaacatcctggcggcgtggtcggggtccgtcggcccgtcggggctccccggcgacggccgccgcgtcggcttcaacatcatctccggcacgtccatgtcgtgcccgcacgtgagcgggctcgccgcgctgctccgcgcggcgcacccggagtggagcccggcagccatccggtcggcgctgatgacgacggcgtacaacgagtaccccggcggcaacggcatcctggacgtggccacggggcggccggccacgccgctggacgtgggcgccggccacgtcgaccccgccaaggccgtcgacccggggctggtgtacgacatcgccgcggcggactacgtcgacttcctctgcgccaacaactacgaggcggcgcagatcgcggcgctcaccaggcagcacgcgtccgaggggtgcagcgccaaccgcacctacgcggtgaccgcgctcaactacccgtccttctccgtggcgttcccggccgccggcggcacggcgaagcacacccgcacggtaaccaacgtcggcagcccgggacgtacaaggtgccgcgagcgccgccgccgccggcaccccggtgacggtgaccgtggagccgtcgacgtgagcttcagcagggccggcgagaagcagagctacacggtgagcttcacggtgggcgggatgccgtcgggcaccaacgggttcgggcggctcgtctggtccagcgaccaccacgtggtcgccagcccgatcgcggcgacgtggacctaatggctagcggcggccgtaccgtagcaatagcgagataaaatcccgattgggggacggcaatggcgagcgcgcgccattctcgaatgcgagagagatggcggatatcgtcgaggatgtgctgttgtattgtgtgcatgagtccgctccggtgtgtaagctgccggtgtagtgtaatctatctgtagctgacccgattgtagcgatgcagcaattaatctcaaaagggttgcagacttg

SEQ ID NO: 738 - DNA, 1324 bp, Zea mays
  Clone ID: 700089103_FLI
cgaccaatctaatagcgccgcaacgcgaagcgcgaagccgcgaagcctcacctacagttccttcgcgcaccggcaccgcggcggcagttcagcatggtggcagcatccgtagccgagcgggcctatgaggcggcgacgcggtccgcgctggtggcgctggagcgcaacctcatcccggacgcggtgacccggcgcctgacgcggctcctgctcgcgcagcgcctccgccagggctacctcccctccgcgccgctccagctgcagcagctcctccagttcgtccactctcttgaagagatgcccattgccattgaaacagacaaagctaaagcccaacactatgagttgccaactacatttttcaagctagtgctgggaaagaatctcaaatacagttcctgctatttccctggtgattcaagcaccctagaagatgctgaggttgcgatgatggatctgtattgtgagaggtcgaaactacaagatggccaaagtatcctagatgttggatgtggatggggatccctttcactgtacattgcaaagaaatataggaactgcagtgtaacagggatatgcaactctactacacagaaggcttttatagaagagcaatgtagggataacgagctgtcaaatattgagataattgtagccgacatcagcaagtttgagatggagcgctcttttgacaggatcgtatctatagagatgtttgagcacatgaaaaactacaagtcacttcttaagaagatatccaggtggatgaaagaggatggcctactattcgttcacctcttctgccacaaagcatttccatatcactttgaggataaaaacgatgatgactggatcacgaggtatttcttcactggaggaacaatgccatctgcaaacctacttctatactttcaggaggatgtatctgtggtagatcattggcttgtcagtggcacgcattatgctagaactagcgaggagtggctaaaacgtatggacaagagcatcacttcagtaaggctgatcttcgaggaaacttatgggaaggaatcgactaccaaatggatagcttattggcggacgttcttcatctcggtagctgaactttttggatacaacaatggagatgaatggatggttgcccattacttgttccgaaagaagtagaggctactgcttggaagtacccaatcaaaaatcaatgttttcagtaattttgtcatgtacactgacgaacaactccttttctggcacgtagttgtatctcgtaccgacttcgtagtggtttcaaaaacaaaatctggaatccctgttgtgaaatttc

SEQ ID NO: 739 - DNA, 885 bp, Zea mays
  Clone ID: 700089148_FLI
ctcgcggattcttagatcgagccttgccctccatgggtgctggcgttgcgatgcgcgtgtgactttgtggtgctggtgtttgttccaggcgcagctcgggccggccgcgtcggcgatgcaagggcacctccgtacctacatgaacgcggggattcccaagcggttcaaagaggatgaggagaaagaacagcttgcaaaagatctcgcaaaagattggaatgctgtgtttgaaaggagcatcaatacattgtttttgactgaaatggtccgtggcttgatgctaactctcaagtacttctttgatagaaatgtcacaattaactatccgtttgagaagggtcctctgagcccccgcttccgtggtgagcacgctctcagacgttatgaatctggggaagagcgctgcattgcttgtaaactatgcgaagctatatgcccagcgcaggcaattacaattgaggctgaagaacgtgaagatggcagtcgccgaaccacaagatatgatattgacatgaccaaatgcatttactgtgggttctgtcaagaggcttgcccagtcgatgctattgttgaggggcctaactttgagtttgccactgagacacacgaggaactactgtacgacaaggagaaattgcttgagaatggtgatcgctgggagactgagattgctgagaacttgagatctgagagcctctatcgctgaatctgtcttccattatggttgataaactgggttcttccattttccatattttgctcaactagctgatgaataagcaaacgatgtatcataacttaggtacgatgtttttgtaccttggcaccatctgtgtgttttgttcattgccttgctaaaggtggcaccagatgttctttgatggg

SEQ ID NO: 740 - DNA, 2275 bp, Zea mays
  Clone ID: 700089183_FLI
agcaaagcaaagcttgagaggcttttctcaaaaacgcgccgtcgccgtttcttccccctttttctttgagaaaattcgtccgcgagatctttagtttcagaccccgtgtggattagtcgctgtcacgatcgaggcggggcgccaattgcggtggccaccacctccaatccactccccgcggtggcctcgccgagctgttcttgctccgtcctccctccaactccaagatttgtttcgcacccgattcctgagcttccgcggcgcttcttgctgaaaagaaagctccgagttcttcagttctggatcgatagagaggcggttcctttgcgggctctgaggttcagctctcgctcttgatttgtctcatcgacgcatcagttgggctgcaggcttagagctggaaggaataatttgactagagaaatggggcagtgttgtagcagagctcccgccccggactctggacggggaggcaccaatggttatggctattctaaccaggcaaagccagcgcaaacaccttcgagttacaaccctcctcagcagccggccgaggtgaggtacacgccgccggcgacgaaccctccggtagtcccacctgtgcctgtgcctgtgccaccgaagcccacggcggacacgattcttggcaaacagtacgaggacgtacgctctgtctactccctcggaaaggagcttggccggggccagttcggggtgacatacctctgcacagaggttgcctctggtaagcagtacgcctgcaagtccatctccaagcgcaagcttaccagcaaggcagacagggaggacattcgaagagagatccagatcatgcagcatctgtctggacagccaaacattgttgagttccggggagcatacgaggacaagagcaatgtccatgtggtgatggagctctgcgcaggtggggagctcttcgatcgcatcattgccaaggggcactacacagagcgtgcagctgctacaatctgcagagcagttgtgaatgttgtcaacatttgccacttcatgggtgtgatgcaccgtgacctgaaaccggagaacttcttgcttgcgagcaaggaggagaatgcaatgctcaaggccactgattttgggctttccgtcttcatcgaagaaggaaagatgtacagggacatcgttggaagtgcttattatgttgcgcctgaagtccttaagcggagctatggaaaagagatagatgtttggagcgcaggtgttattttgtacattcttctcagtggtgtgcctccattttgggctgaaactgaaaaggggatatttgatgctattctgcatgaggagattgactttgaaagtcaaccttggccatcaatttctgagagtgctaaagacttggttagaaagatgttgacacgagatccaaagaaaagactgacttcagctcaagttcttcaacattcatggctcagagaaggtggaggtgcatctgataagcctatcgacagtgctgttctttctagaatgaagcagttcagagcaatgaataagctgaaaaagatggccctaaaggttattgcctcaaaccttaacgaggaagagatcaaggggctaaagcaaatgttcatgaacatggacacagacaatagtggcacaatcacgtatgaagaactcaaagcaggactagccaaacttggatcaaagctgtcggaagctgaagtaaagcagttgatggaggctgctgatgttgatgggaatggatccatcgactatgttgagttcatcactgccacaatgcatagacacaagctcgaaagagacgagtatttgtttaaggcattccagtacttcgataaagataacagcggtttcatcacaagagatgagctggagtctgctttgatcgagcatgagatgggtgacacgagtacaataaaggagatcatatcagaagtggacacagacaatgatgggaggattaactatgaggagttctgcgcaatgatgagaggagggatgcagcagccaatgaggctcaagtagcctgttcccttagtagaaatggtgtaccgttagttactgttcttcactctttttcccccttcgtatttggtactcttggtagccggattaagcttacaatgggcgtcgctcttttgcattgtcaagagatgattgtgtatatctttttcttttgctcgtgtttgttgcattgtagtatcctgaacgtcccttccttttgtaagtttgtttatacacaagcacatccaatagaaagtgcaatttgtgtctc

SEQ ID NO: 741 - DNA, 1262 bp, Zea mays
  Clone ID: 700089203_FLI
ggcagggcacgctggggccgcgacgcgctccagctctgggacaagatgagggagctaaagctacccgccgatagcatcctctgcaacacgctgctgagcatgtgcgcggacgtggggctcgtggccgaggccgagcagctcttcaacgagatgaaggatccggagtgccgcgacgtcccaaagccggacaagtggagctacacggccatgatcaatatctacgggagcaacggggacacagacagtgcgctccagctgttcgcggaaatgctgaagggcgggatagagcccaacataatgagctacaccattgtcatccaatgcctcgggaaggcgcataggatacagcaagcggtggaggtgcttgagtccgggctggagaagggtctcaagcccgacgatcggctctgtgggtgcttgctctctgtcatcgctctgagcagcggggaggagatggaaatggtgctttcctcactggaaaaggtcaaccagaacctggtcaagctgatcagagtgctcggcgacgcccaggtcggtggtgacgatatcacaaaggagctgaagagcgtgctgaacggcgcggcccctgaagtacgccgtccttactgcaactgtctgatcgatgtatgccgcaaccacggcttccctccacagagggcaagggaagtcttccaccttgcccagacctatggtttgtactccaagcttcagagcaggaaggacgaggagtggtcgctggacctgcggtcactctcggttggtgcagccaagacagcgtttgatgactggatgcagactgtctcggagcgctgggcgcagcagaaggacttgccagagtccttcagcgtgtacaccggatccagcacccacaagtttgcgcaggggctggcaagtgcttttgccgctcatctggaccaaatggcggtgccattccatgcgagcgaatctcaagccggcagcttcatcagttcaagagatgatctggtctcttggttgcagatgagcaggtcgtccgcagtcgttgccggatgaggcgcagtggttgtggctgcataatgctccaaattccaaaggaaagaagggctcagtgagcaaactgggtgatcatgcatttgttggcatgcagtttgtatgaagagaattggaagtctgaaacgcgtagattagacggtagcaccaagccgctcttgaaacattggctgattgtcagacttacactgctggttctgtttctgaaattcaaatgccacttcttaaattcc

SEQ ID NO: 742 - DNA, 322 bp, Zea mays
  Clone ID: 700089211_FLI
ggaggtcaagcccgccctgaccaacatggtctccgctgctaagctcattcgcacccagctcgccagcgccaagtgagcacctttttttgcctttttcgtttccgaggagggcgtcgtcgatgccaatttgtttccaataaacagggctccccccctgtgcccgccgttctgttgtgctccgtctgtggttaggttactagttttcttgatctcgcccccacgcggtacctgttttactatctgtttggtggtttctgaggcaagttgcccgtgtacttgtatcgtaaaaaccgagtgggacatctgcatcgtttcatctgtc

SEQ ID NO: 743 - DNA, 761 bp, Zea mays
  Clone ID: 700089244_FLI
ggatatgttttaccttgagcaagaacctgggcacctgggcgaccatgaaggtgctgctccggtagcagatagcagattcggtgttattgtgcaggagcagggtgttattgtgcatgagcagggtgaggccgtgggtactctcccaaatgggaacaatggaattggcaatgagatgaatgtggagtgtaaaatggtggtgccgtgcagcaacgagcatcgaatggcgaatgctgtcctagatgtgtttgaggaatgcctgagggaggcaaagagtaatggggttatcaatggtggcaatgtggacgggagtggtgaggaaagcgagctctccaagcggtggagagcgcagaggatggatgagcttgatgtcttaagccggaggctgaggttgctggttgagtatgctgcggcggctgggcagtgaagcagagattttggtggttttggtgatgttcctgccacccttttccccttttgtatagaagctaggttcctgtgctatgctttggaatgtattcctcagctggacccttgcctttagaaagcctactatatttaactatgtacccttgagtttaataactcgagcagcataataatctataattttaacgctgttatttgcatgggttcctgctgtttgatatagatgatagccttgttaatgtagcttcaggctttcaaatttcctctttttcaattagaagctgttgtacttgtaacttgtaagctgtgagagagtaatattatgtttccttgtt

SEQ ID NO: 744 - DNA, 924 bp, Zea mays
  Clone ID: 700089247_FLI
cctcctcccgctctccggctcctgtcctgctcgcgctcgtcgcccccctgccgctcggctccccttggcccctccaatgccgccacccatggcactgctgccgctctcctccgcatccgcgtccgccgcgctgccgcccttccgctcctgcccgcccgctgcgatgctgcttcgcctcccctcccccgccccctcccatttcgcccgcccccgcgcggtctccactgggtacgcggcgtccttctacggcggctcggcgatgtccgcggccggcggcgcggacgaggaggaggaggtcggctacgagtcggggttcggcccggggctagggctgggcggcggcggcctcgggatgtcggccgcggaagccgcgctggcgctggaggagcgcgagatgccgccctgcccacccggcctccgccagtacgagaccatggtcgtgctccgccccgacatgtccgaggaggagcgcctcgccttcatccagcgctacgaggagctgctcgtcgccggcggcgccatgtacgtggaggtcttcaaccgcggtgtcatcccgctggcatacagcatcaggaagaggaacagccgcaccgggctgccgtccacctactacgacggcatctacctcctcatcacctacttcaccaagccggagtccatggacgccctgcagcttaagctcaacgccgacgacgacgtcatccgctccaccagcttcaaggtccgccagcggaaggccgtctagttagacgggttgcctcctccgccttcaggccctgaacactgttttgttcacataccatactacaagaaatctgctgtacaagaatccacctttgccatgattgttgagttttttttttttgaatatgtttcttgtcttgtggttctcgaaaatggacgtccggccatcgttcgccagag

SEQ ID NO: 745 - DNA, 695 bp, Zea mays
  Clone ID: 700089310_FLI
gatccccgctcgggttgccatggcggaccagctcaccgacgaacagatcgccgagttcaaggaggccttcagcctcttcgacaaggacggcgacggctgcatcaccaccaaggaacttggcactgtgatgcgctcattggggcagaaccctactgaggctgagcttcaggacatgatcaatgaggttgatgctgatggcaatggaaccatcgactttcctgagtttctcaacctgatggcgcgcaagatgaaggacaccgactccgaggaggagctcaaggaggccttccgtgtgttcgacaaggaccagaacggcttcatctccgctgctgagcttcgccatgtcatgaccaacctaggcgagaagctgacggacgaggaggtggacgagatgatccgtgaagccgatgtggacggtgatggccagatcaactacgatgagttcgtgaaggtgatgatggccaagtgagatatgcccgccgtttttaagctagttcctctcctgatggtagtaactagtctagttttggagactgactgcttttggttgtgtcttacgcctatccttgcgtcaatggacatatccgtttgttttcaaccaagggattttaccatgtcggtaatttcgttcaaatttggttcttgttgtattacatttgtgttatcttggtacaatgataatgtctttctctttc

SEQ ID NO: 746 - DNA, 2657 bp, Zea mays
  Clone ID: 700089311_FLI
ggctggaacgatatggtgctgcatctaacgaccttcctgtcagttcaacgactgtcacaaccaatgaaataactgctatggtgccacctccatcaacatctgctgcggatcgcctaggatctattttacctgaacttttgaatactggggatgctttggagagataccaacaggttgcccaaaagctggaagccttgattgctaatgatggcaaagatgtggaaattcagtctgttattatggaagttcctgatatcttgcgtaggtgtgttagccgtgatgaggctgcattagcagtagcacaaaaggttttcaagagtttgtacgataacacatcaaataccacttatgtctcctggcttctagcaaccttagttgcaatacgagatgtctgcaagcttgttgtcaaagagttaacaagttgggtaatatattcagatgaagagaagaagtttaacattgatatcatttttggccttattcgttcggagttgctgaatattggggagtacaatgttcatttggcaaagttaattgatgggggaagaaataaggttgcaacggagtttgcaatgtcccttgtccaagcattgtttgctcatgatcctgttggcttcacagagtttcagaatgttcttgatgcactatcgaagcatacaaagagaccaggttcacctgaatcgttgcaacaattgattgaaatcgcaaggaataatgtgagcaccactactggttttgttgctgtgaaggatgaaaaggtcaaactgccgaaggataaaaaggttttagctacccgggcaaacaaggaggaaaacactgctaatgaaattacactagttgatccaaatcaggtggcagtcctattttctgaatggtgtcagatgtgtaatcatgtaagtgctagtgatgcggcatacactcgttttgtcacacagttgcagcaagatggtctgctgaagggggatgatatctctgaacgcttcttccgtattctcacggaacttgctgttacacactctctagtctccgagcaaatcgttgctcctggtggatcatctcagcaatcaccacagcaacctcacatttcatatttctccattgattcatatgcaaagcttgtggttatggttctcaagtactcagtggagataacaccaaataaagccagtatactttccaagatcctatctgttacagtgaggtccattcagaaagatgctgaggaaaagaaagcttcatttaatcctcgaccatacttccgattgtttataaattggctctatgatcttactactaccgatggtcaccatgatagttctaattttcaggttttgactgcatttgcaaatgcattccacatgctacaacccttgagagttcctgcctggagctttgcttggcttgagctggtgagtcacaggagcttcatgccaaaactgctgatgtgcaattcacagaaaggttggccattttttcagcgactgcttgttgctcttctcaagttcatggaaccatatctgagaaatgctgaactcccagaggcgatggaccttttatacaagggaactatgcgagttctgcttgtactactgcatgactttcctgaatttctttgtgattatcacttcagtttctgcgatgtgattccttcaagttgcattcaaatgcgcaatgtcattcttagtgcttttccacgtaacatgagactgccagacccttctacccctaatctaaagattgatttgttggctgaaatttcaatagcaccacgaatcatgtcggatgttgatggtgcccttaaatcaaagcagttgaagactgaggttgatgaatatctcaagaggccggaaggctcttcctttttaagtgacctgaaccaaaaattgctgctgcctcagaatgaagcaagtgttgctgggacacgctacaacgtgcctctgatcaattcacttgttttttatgttggcatccaagctgtgcaacaactgcaactgaacaaggctaatccgtctgcatcagtacagcagattaaccatatatctccgatggacattttccagattggaacagctaccgatatattcaggagtcttataacaagtttggatacagagggccgctaccttctgttgaatgcaatcgctaaccaactgcgctatccaaatagccatacacactactactccttcatcactctgtatctattttccgaggctacccaggaaattacccaggagcaaatcacaagggttcttctggagcgtctcatagtgaaccgcccccatccttgggggttacttattactttcattgaattgataaagaatccgcgttacaacttttggagccggtcttttacacactgtgcacctgagatcgagaaactgttcgagtcggtggcaaggtcatgtggcgcaaaagttgtggacgaaggaatcagcgtgcaggatggcagccactaaagccatctgctttgttcaagtgttgtttttgtgctatttcttctctggcactggaaattttctgtgcttgtacagatcgtctgtatagtaaagctgttagtcacacgtgtcggtgcactgccaaaccttagcaggtgcctgggagaatgcttttgtttgtatgaattttagtcagcaatatggatggtttgcaat

SEQ ID NO: 747 - DNA, 1567 bp, Zea mays
  Clone ID: 700089312_FLI
gtagaaactaccgaaacgagtctagcaaacaaaccgcagcctgagcacccgaggagactccgtgcgaccgaagccagagccagcggaaccgaacggaagcgagacccccggcggctagcgagatggacggcggcgccggcgaggaggggaagcaggagcggcacctggtgctggcccacaagctcttccttctatcccacccctccgttgatgacctctccaaggtcgccctccgcgccgaagtcctcgacaccgtgaaatccgatgatatggcgacgctgtttgagtcgctggtcgccgggggtgtgctggagggggacgccgcgctgctggccgagatgcgtgggaggattgacgaggagatccgcaagcttgatgagaaaattgctgatgcggaggagaacttgggtgagagcgaagtccgtgaagcacatcttgccaaatctttgtactttataagggtcggtgagaaggaaaaggccctggaacagcttaaagtcactgaaggaaaaactgtagctgttggccaaaagatggatcttgtgttccacactttgcagattggttttttctacatggattttgatctgatatcaaaatccatcgataaggcaaagaacttgtttgaggaaggaggcgattgggagaggaagaacagattgaaagtatatgaaggcttgtactgcatggcaaccagaaacttcaagaaagctgccagcttatttttagactcgatttcgactttcacaacttatgagatattcccatatgatacgttcatcttctatacagtcctcacaagtgtcatcacattggatcgtgtatctctgaaacaaaaggtggtagatgcaccagaaatcctggctgtaattggcaaagtacctcacctctccgagtttctcaactccctgtacaactgccagtataagtcgttcttcgttgcattttctggtctgacagagcaaatcaagttagaccgttatcttcagcctcatttccgctactacatgagggaagtgcgcaccgtggtatactcacagttcttagagtcatacaagagtgtgacaatggaagcaatggccactgcgttcggtgtaactgttgatttcattgaccaggaactgtcacggttcattgcagctgggaagctgcactgcaagattgataaggttgctggcgttctggagactaaccgacctgatgagaggaatgctttctaccaggcgaccatcaagcaaggggacttcttgctgaaccgcatccagaagctttcacgggtcattgacctgtaaggactgtttgtgttggagctattcctgcaatcggcgcctgcaaatgtttaccaccctacgtcttccacaagacatctctgcttgagtggggattggggaacaagccctaagaacatctgtgttttaagtgcagaatatttgtgttttaatcagtaaacgctgtcctgtcatttcaagtttcctatctgtggctctgtctgtgattttcttccttaagttgttagcttgacaatctggtgcccttttgacctacatacatagcccctgtttgtttc

SEQ ID NO: 748 - DNA, 2550 bp, Zea mays
  Clone ID: 700089329_FLI
caattgctctagaccctaattatgcccggaactatagaagatttgctactggtggtttagcaggccaagtacttgtgctgacaaagaagtcttggggaggttaccacaagaaggttttgcgtgatggtgaagggccaatccattcgatgaagtggagggcggatcttcttgcttgggctaatgatgcaggggtcaaagtgcatgatatgagaacagacaaagggatcgcattcatagagagaccaaaaggcattcctcgaccagagttcttgcttccccacctagtctggcaggatgatacagtcttagttgttggatggggaacaagtgtcaagattgcagcgatccgaacagatctatctcagggactcaatggcctacaaagaactatcaccacagctagttctgagaagtatgtggacattgtgggctcattccaaacaggctatcacatatctggggttgctccatttggtgaccttttagtcgtacttgcctatattcctgatgaggatgaaaaagagaaaacatttagtacttctgttacttcacgacagggaactgcacagcgtccagaaatacatcttgtatcatggaaaaatgatgagcttactacagatgctctgcctattcatggttatgagcattacaaggcaaaggactatgctcttgcgcatgcgcctttctcaggaagtagcaatgcaggtggacagtgggctgctggtgatgaacctttgtattacattgtgtctcctaaggacatagtcgttgcaaagccaagagatgctgaagatcatattgcttggcttcttcaacatggttgccatgaaaaagcattggctgcagttgaggcagggcaaggacgcactgagcttcttgatgaggtgggctcaagataccttgatcacttgataattgaaagaaaatatgctgaagctgctcagcgctgcccaaagttgttgcgaggatccccttcagcatgggagagatgggtcttccactttgctcatctccgccaacttcctgttttggtcccttatattcctacagaaaatcctcagctgagtgatactgcatatgaggttgcccttgttgctctaactaccaatccttctttccatgaacttctcttgactactataaaaaattggccaccgacattatactcagcctcaccggtcatatctgccattgagccacagctaaactcctcatcgatggctgattcattgaaagagtcattagctgaattgtatgtgatcaatggtcaatacgaaaaggcactttctctttatgctgaactcctgaagccagaagtattcgagtttattgagaaatacaacttgcatgatgccattcatgataagattgtcaatcttatgatagtggacaataaaagaacagttcacctactgatccaacatcgtgatatcattcccccatatgaagttgtggagcagctgttgcataccagtaaaaaatgtgacaagagatatttgttacacctgtatttgcatgctttatttgagatagatatacacgctggaaaggattttcatgatatgcaggtggagctttatgcagactacgagacaaggatgctactacccttccttcgaaccagtcagcattacaggcttgacaaggcatatgaaatctttgcacaaaaagaacttgtaagggagcaagtttttgtccttggtcgaatgggcaatgctaaggaagctctgtcgacaattataaacaaactggaagacatgcaggaggctgttgaatttgttacagaacagcatgatgatgaactgtgggaggaactgattagacaatgcctccagaagcctgaaatggtagggaatctattggaacatacagttggcaatcttgatcctctgtacattgtcagtttggttcctgatggcttagaaatacctcggttgcgggatcgtcttgtgaaaattgtgacggattaccggacagaaacttcattgcgaaatggatgcaacgatatacttaaggctgactgtgttaaccttttggttaaatactaccacgaggctcggcgtggggtatacatggtaagcatggacgaggaggtacacggaaacagagctgacgatggatcatcgcggggacacgagagatcatctagcgtccgggctctagatatcaagtccagaacaagatgtggtgcccggtgttgtttgtgcttcgatcctttgcctatccaggacatatctgtcatcgtgttctactgctgccatgcgtatcatctgtcttgccttgaaggtggcttagactcgatgagatcaaacagtggtcaggatagtgatggaggcatggacgatgaggatggttccccatcaggccagtctcgcatgcgctgtgtcttgtgcactactgctgcttcataattttataccgtgttgggtagtacacactaccttgtgttgtgttgtaagttttgagccatgtaattattgtgttcttttcgcgtgttacacatgcttacaatagcgtaattcttttgagggaggccatgtcctcggcaag

SEQ ID NO: 749 - DNA, 360 bp, Zea mays
  Clone ID: 700089369_FLI
acagttggtcttacaggttttggagctcagggttttgggacaccgtcgtttggagcaggtgccgctttcccaaatgcagcaggtgttcaagcagcagcagctgcatatcaaggaagtggagctcctcctggctttcaagggccacctgggtttcaggttggccaggcaactacccagacaagcactgcagcggcagcggctgccgcagctgccactgctgctggttatcaggctggggcatctgggcagggccaggtgcctggttctcaggtcggaggcactggttttcagggtggatattgacagaactaggtatatcaactctcaacattgttttatgaaccacctttggtactaaac

SEQ ID NO: 750 - DNA, 1043 bp, Zea mays
  Clone ID: 700089425_FLI
ggttaaaaaataatatggctgacatatccccaaatggtcgcttcatagctgctgcggcttttactgctgatgtcaaggtgtgggagatagtttactcgaaggatggttcagtgaaggaggttaataaagttatgcaactcaagggtcataagagtgctgttacttgcttgtgctttgctcccaattctgagcaaattattactgcatccaaagatggttccattcgagtatggaacattaatgtaagataccaccttgatgaggatccaaaaaccttgagagttatgccaattccacttcatgactctaaaggttctgtttgccagtatgatcacatgacagtctctcctgatggtaaaattctggctgtaacaagtggatcaacgttgcaatggttacttgtggaaactggtgcagttttggatacagctgacaaagcacatgaaggtgatataactggcattgcttgggctccacggacaattcccaatggtggcgtgcatgtttttattttggcgactgctggtgtggacaaaaaggtgaaactttggacagctccagatgttggttcaacatgagtggtcgaggattgaatctgcataagacagctttgccaagggcacagaattgaaggtgagacaatagatggatgcaggcttgatgtagcccagaacagtaggtgctccactgataatattgcactgaaccgaggcagacattgttagttttgttgcgtagagtttgagaggaggaagggaagggaggcctggctgttactgatgagaccccaatgcatcacgcaggcggcagccttggggctgtagtttcgctaccttttatacaataaactgaatgttgtctgcatttgtatttttttttctttccttcctttttactgttggaatgatctggctgtgtgatcaacataatttaagctgctgctgcttggaatagacgtcattttatttgtcaagcaaatgtgctgctttgcgcattgtttgacattatattgtttgataaagtgtgctaagtatgaaaatgcc

SEQ ID NO: 751 - DNA, 1327 bp, Zea mays
  Clone ID: 700089457_FLI
acaagcaaggaatcccccgatggctcatcgcgttctcctcctcctctctctcgcgtcggccgccgcggttgccgccgccgtcgacgcggaggacccgctgatccggcaggtggttcccggtggagatgacaacgatctggagctgaacgcggagtcccacttcctgagcttcgtgcagcggttcggcaagtcctacaaggacgccgacgagcacgcgtaccggctgtccgttttcaaggccaacctgcgccgcgcgcgccggcaccagctgctggacccgtcggcggagcacggcgtcactaagttctccgacctcacgccggcagagttccgccggacctacctcggcctccgcaagtcccggcgcgctctcctcagagaactcggggagtcggcgcacgaggcgcccgtgctccccaccgatggtctccccgacgatttcgactggagggaccacggcgccgtcggccccgtcaagaaccagggttcgtgcgggtcgtgctggtcgttcagcgcgtctggagcgctggagggtgcgcactacctcgcaactggcaagctggaggtgctttcggagcagcagttcgtcgactgtgaccacgagtgtgattcatcggagcctgattcatgtgattcgggttgcaatggtgggctaatgacgacggcattcagttatctccagaaggccggtggccttgagagtgagaaggattacccttacactgggagtgatggcaaatgcaagtttgacaagtccaagattgttgcttcagttcagaacttcagtgttgtgtctgtggacgaggctcaaatttctgctaacctcatcaaacatgggccattggcaatcggcatcaatgctgcctacatgcagacatacatcggaggcgtgtcatgcccatacatctgtggcaggcaccttgaccatggtgttctccttgttggatatggtgcttctggtttcgcccccattcgcctgaaggacaagccttactggatcatcaagaactcgtggggcgagaactggggggagaacggatactacaagatatgcaggggttccaacgttcgcaacaagtgcggcgtcgattccatggtctctaccgtgtccgcagtccacgcctcgaaggagtagactctggtcagcggtgataatcgtgattccatatattgtagaactataatccctgctagtaatccatttgtgctgtttatgtatcgaaggcagcaaagatgtgtgaagcggcaatgggatgcttgctgtaaggtaatatgtttggcttgctaggcatgctacacgctatttggatgtagcaacgttatcacc

SEQ ID NO: 752 - DNA, 1284 bp, Zea mays
  Clone ID: 700089471_FLI
gggggccggcaggtgcagatgtccgaggccgagatccgccagctctgcgtcgaggccaaacaggtgctgctttcgcagcccaacctcctccgcatccacgcgcccgtcaagatctgcggtgatatccatggacaatttgttgatctcttgaggctctttgatttgggtggttatcctccaacttcaacttatattttccttggagactatgtggatagaggcaaacaaagcttagaaaccatgtctgcttctggcatacaagttgaagtaccctgataatatataccttttaaggggaaaccatgaagatgcaaaaattaacagagtttatggtttctatgatgaatgtaaaaggagattcaatgttcgactatggaagatattctgtgattgcttcaactgcttgcctatggcagcacttattgatgacaaaatattatgcatgcatggtggcctctcacctgaattgactagcttggatcaaataaaagatattgagaggcctaccgaaattccagactatggtcttctgtgcgatctcctttggtctgatcccagtcatgatacagaaggttggggggagagtgatagaggtgtttcttgcacttttggcgcagataagcttgttgaatttttggagaagaatgatcttgaccttgtgtgcagagctcatcaggtggtagaagatggctacgagttctttgcagagagaagactagtgaccatcttttcagctccaaactactgtggcgaatttgataatgcaggtgctctattgagcatagatgaaagcttgatgtgttcttttcagatcttgaaaccaaatgaaacaggtgcaccacattcaaggaaacctcttccaagcaaggcaccaaaaggagagaacgtctaatttgtatccagtgacctaatcacaatcgatgtcagctcgaagggggcgatctcgttgtctcggatccaccagggcatggcattagcgttctacacttgctgaatttgtgtggactcaatcggcagcgcttacattcttctgtacagcagcagtgtttctaacttggcatatcgtccgttctgatagtgacattgccacagctgcaatattttagtcgggtggacaaggcattttgttgggtacagtagctgttgttttgttagcctttttttggtaatgtttgtttggttgattgaacgctgtgagttttgtttgccgcgtatcttcgtcaggctcgggtatttacatcctgcaactgtgtaaatgattttgtctaacgaatgtctgttgac

SEQ ID NO: 753 - DNA, 921 bp, Zea mays
  Clone ID: 700089476_FLI
gataatgggagccgaaggtatgaagagcatgatgtggaggcatatcatgacgctaaatttgtagaagatgaagattgtgcagaaaatcacatcaatcatcattgtgatgatggtgagcaacaccatcaaaacagtcctgttggtgcagccccgacagtgcaacgccatcaaaatagtcctgttggtgcagccccgatagtgcaacgccatcaaaacaatcatgttagggcagccccaacaattcaacgccatcaaaatagtcctattggtgcagtcccaccaaagcagcctcgacggtgcatcactacaagtttagcccacccagtcccaccagggaatgaggccccctctcgcattcaacatgatgaacttgttggaaaggatgtaatattatatgccattattggacctgagcaacctgtggctaagggaacaattgtttcaactaatcctaacaccttgctgggaggtgtgcctcttgggaaagaatattgtgaagttattgtgaacactgtattgaaaagggatgccattttgccttgtccttatggttatgtagagacgatggctgatgctcatcaaatgtcagttgcttggctttataagaggatgaagattagcaaggcatcaggatcaccccaaggtattggaggtggctggcactagaggcaagctgcagggttggagaaacaagagaccgacagggcattttgtagacaatgagtcctaatttgtagttaaatatgtaatggcatgtcaagctatatgtgggattttttgtttgaaactcagagatgaatcattttgtagactgagtcctgattttggtgtagctaaaacatgtaatttctgctaccatgaatcctattttttggtgtagctaaacatatataatggctgctataatataatggctgctat

SEQ ID NO: 754 - DNA, 2276 bp, Zea mays
  Clone ID: 700089501_FLI
tctggttccagaaccggaggtgccgcgataagcagcggaaggagtcttcgcggcttcaggctgtgaacagaaagttgacggcaatgaacaagcttctcatggaagagaatgagcggcttcagaagcaagtctctcagttggttcatgaaaacgcgcacatgcggcagcagctgcagaatacttcattggccaatgacacaagctgtgaatcaaatgtcactacccctccaaaccctataagggacgcaagtaacccttctggactccttgcgattgcagaggagaccttcacagagttcctctcaaaggctactgggacagctattgattgggtccagatgcctgggatgaagcctggtccggattcagttggtatcgtggccatttcgcatggttgccgtggcgttgctgcccgcgcctgtggtttggtgaatctagaaccaacaaaaggcatagagatcttgaaagatcgtccctcttggttccgtgattgccgaagtcttgaagtgtttacaaggtttccagctggaaatgggggaacaattgaacttatttacatgcagatgtatgccccaacaactttagtccctgcacgtgatttttggacactacgatacacgacaacaatggaagatggcagccttgtggtctgtgagagatccttgagtggttctggtggtggtccaaatgcagcctctacacaacaatttgttagggctgagatgcttccaagtgggtatttagttcgcccatgcgaaggtggaggatcaattgtgcatatagtggaccatctagatctcgaagcatggagtgttcctgaagtgcttcgaccactgtatgagtcttctagagttgttgctcagaaaatgactactgtggcactgcgccaccttagacaaattgctcaagaaacaagtggagaagtagtgtacgccttgggaaggcaacctgcagtcctacggacctttagtcaaagactaagcagggggtttaatgatgccattagcggtttcaatgatgatggctggtctgtaatggggggagatggcattgaagacgttgttattgcttgcaactcaaccaagaaaattaggaataccagcaatgctgggattacatttggagccccaggaggcattatttgtgcgaaggcatccatgttactgcagagcgtcccaccggcagtactggtacgatttctgagggagcatagatctgaatgggctgattacaatattgatgcgtatttggcttcatcattgaagaccagtgcgtgctcacttcctgggttgcgacccatgagattttctgaggggcagatgatcatgccacttgctcacacagttgagaacgaggagattcttgaagttgtccgccttgaaggtcagcctcttactcatgatgaagctcttctttcaagggacatccaccttctccagctttgcactggaatagatgagaaatctgtgggttcctccttccagcttgtgtttgcaccaattgatgagcatttcccagatgatgctccattgatttcttctggctttcgtgtcataccacttgatgtgaaaacagatggtgtatcctctggtaggacgctagatttggcatctagtcttgatgtgggctctgctgcaccccaagcctcaggggatgcatctccagatgactgcaatttgagatctgtgctgacaatcgcctttcaattcccgtatgagatgcaccttcaggacagcgttgcagcaatggcccgtcaatatgttcgtagtgtcatttctgctgtgcaaagagtgtcgatggctatatctccctcccaatctggtctaaatgctgggcataggatgctttctggcttccctgaagctgccacacttgctagatgggtttgccagagttatcagtaatttccttcccgtgctgtttctgatacctcacctaaatggtttggttcttttttattgtaatctcatagctattcttttgggccccaatacagctaccatctaggtatggaattacttaatcaatcagatggagctggtgaagcattgttgaaaatgctctggcatcatccagatgctgttctgtgctgctcctttaaggtatcagaagagttttactcaagtctgcaatattccaatcttctaaagtagaggcagacccctccacccatgttttaatgctttcacaacgaaattttcgtgctgccttttgtacctaataatagatatctatatatggattatgcatgggagcagatgagcctgcacccttct

SEQ ID NO: 755 - DNA, 1006 bp, Zea mays
  Clone ID: 700089527_FLI
acgcgccggcgctctccgcaccgcacccacccatcgaaattccacttcgcctaattccaaatcgccaaggccgagcagcagcaagcaaagccgcgccggtgaggctggctgttggagaggcatgccgcctaaatccgatagcgttgaaggaatcgtcctgggtttcgtcaatgagcaaaacaggccattgaattcacagaatgcagctgatgcactgcagaagtttaatcttaagaagactgcggtgcaaaaggcactggatgcattggctgacagtggacagatttccttcaaggagtatggcaagcagaaaatttacattgctcggcaagatcaatttgacattccaaatggtgaggaacttgaggagatgaagaaaacaaatgccaagttacaggaagaacttgcggatcaaaagaaagcaattagtgaggttgaatctgaggtacgaggtctgcagtcaaacttgacactcacagagatcacgtcaaagaagagtgaattgcaaagcgaagtccaagaaatggaagagaaactaaataagttgcggagtggtgttaccttggtgaaacctgaggacaagaagatcattgagaattcctttgctgaaaaagtgagccaatggaaaaggcggaagaggatgttcaaggagctctgggataatattactgagcacagcccaaaagatcagaaggaatttaaggaagaacttggtatcgagtacgacgaagatgttgatgtgaacgtgcagtcttactctgacatgctagcaagtctcaacaaaaggcgaaaaatttcccgctgatgatgtagcataagagcgtcttaagttgaaagtaggctacaaccgttacatgccagcagctatgcattcatggttctaccggttcttaaggttctgtagagattagtttaccctgacagcattgaggccccgtttgtttcaactttttttcagcttctgaccaccagaagctgctgcagactaccaaatgctcatattttc

SEQ ID NO: 756 - DNA, 649 bp, Zea mays
  Clone ID: 700089539_FLI
gtcgaggctggcgtcgagcagcacgttggaggccttgacgtcgccgtggaccaccgccgggggccgcggcggcgtccagggcgtcgtcggcacgcgcacgccccgaccccgtcgtgggctccccgggctacgtcgacccactcttcctccgctccggcgtcgccaccaggaagagcgacgtgtacagcttcggcgtgctgctgctcgagctcctcacggggcgggaggccatatgcgccgacacggggtgccgcctcgccgccgcggtgggtcctacgctcagcgaaggagaagtggccgacgtggtggaccggaggctcggagacgagtacgatgcccatgaggccgcgaccgtggcggcgcttgcgctgcggtgcgtcagcgagggctccgggatgcgcccctccatgacggaggtggttcgcgtgctccaggagaagacgaccgcgctgatctcagccgcggggtgcaggccagccggcaagatggattcttgagctgtattgttacttgttagacgaagactgtaaatactagctttgtttagagagagtataaggtgaagataatggctcttttcttttttactcaaagtggattagtagttgttgaattggattacgttgaaaaattgatgtcagagttcgtt

SEQ ID NO: 757 - DNA, 911 bp, Zea mays
  Clone ID: 700089549_FLI
cgcgcagccagggaaggaaacaacacgtaagcagcgacgacagcgatgccgacgctgcggcggcgcaacccggaactgcacgtgaaggcgctggagggaatcgtgtcggccaacaccttcttcacggtggcggtgttcatcgggatcacgggcaccatcacgccgtcctcgtccgtgccgcccgcctgcgtcgcgcgggacgacatcgcgcgcaacttcttcctcttcgagatcctctccttcggcctctacctgctgtccagcctcgtggcgcaggggatgaagctcgccgtcacgctcctggccaccgacgacttctacggcgacgccgaccagaagcccccgccgtccgacgactgcgaggagatgccggcatggcgcgccgccgggccgagggagaggcgccgcgccgtgctcaggttcgcgcagcccatgatgctgctcgccgccgggtgctccaccatgggcaccttcttcctgctgctctccatggtcgacgccatccagctcaagttcggcatcctctcctgcggcatcccgctcgccgtcgccgccaccttcgccctctccgcgctcgtcgtcggtggcctcatcttctacggagcgaccgtcgcatacgccctcacgcattatctgccctgaatacaaatccaatataatataatataatacttttctcttaggccccgtttgtttcatttcatttcgaagaattggaatcttactaatgcaataggctatttttttagaatatgacattccaccactttccaaagttattatataagcctatctcaaattcatgaggtgagagatggaaattgattctatatatttacatgttatttttccgatgtacaacttatagcacattattctacttgtgcctctataacataaatgtagtatat

SEQ ID NO: 758 - DNA, 1646 bp, Zea mays
  Clone ID: 700089621_FLI
gcactcggccgcatccattctgcgcaacgcgagcacgatcggtgacagcgtgctgctcatagtagccctttgcttccactccgtcttcgagggcatcgccatcgggatcgccggtaaggctaagccagatagagatagggatatatggatgcgttgttttgttcccttccaacttgcagatgacgcgtagaaattcctttatgtgcattccgggtctactcttatcagcagatgtcgccatcatgtcacgggctaaactgacgaacttagcttcgtctgagtacggagtagaggattagatgcccagctttaggtataaatgagatgttatggcatgtaggtatgacatatatacctgcaagtctgaagtctcaactgaacaccggttacgttagttcttagctcgattccagtgacagatgtcgtggtcgtgactaagaccaagtggaatctgaacctgctctttttgtcaaagctgcactagtgtctcgctgttcggtcagagcgaaaggagcctacagactcagcacagccagaataataggctgatcattcatcattccaacccttctttgctgacctttcctgatattttttttccgcgcaacggttcagtccagtcgttgccatgcatacttttctacttgttctgatcttaggtttaaatgtctatccggacgctctgaagttctttctcttcctgatatatggccttcaagttctcttcgaatgcatacttttttacttgttccgaatgtcaagattaccatttcacttgaattctgaaggcatttcaagtgctattcgttagcatttcggaacccattttaattaatcaatttaaacggagaggctgagtttctcgtaaacatagcgtctccaattcttggtcgaggttaacagctgcagagcatcgctaagcgctagcagctctctgagactctgtctggccttattacctaactactactaattatcgaacctgcagagaccaaggccgacgcatggaaggcgctgtggaccataagcctgcacaagatcttcgcggccatcgccatgggcatcgcgctgctccggatgctgcccaaccggcccctcctctcctgcttcgcctacgccttcgcgttcgccatctccagccccgtcggcgtcggcatcggcatcattatcgacgccaccacgcagggccgggtggccgactggatcttcgccgtctccatgggcctcgccacgggcatcttcgtctacgtctccatcaaccacctcctctccaaagggtaccggccccagaggcccgtcgccgtcgacacgccggtcggtaggtggctcgccgtcgtgttcggcgtggctgtcatcgccgtcgtcatgatatgggacacctgacctggtgagagacacgtagggctgcattgttgggaacttccgggggttgcttattgcacgagatcgaatatggtgtagcagactctttttagcatttttttagcttattacgatcgtacatgtgcgttgctattgcaaaaaaattataacacgataattaaagtttagatatgtattctatgaaaaaacatttttttagtgtgatgtgtgtaacattcggtttgtaaccaatcatcattattatattgttagcaaaattggct

SEQ ID NO: 759 - DNA, 1975 bp, Zea mays
  Clone ID: 700089683_FLI
atcacatgtagagaaactgaattcagggcctgttactaaagattatggaactactggctatgtgcatggaactgataaggttgctccaaatcctcaggatctgttgcatataaagtcttctgaagcttttatcacgcaaagatcaatgggcaatggagaatctggtgtatatcagaatgataatttgcacaagtcatcagtgctacatactgggctgattgatactgatccaagtgtgaacttgcacgacaatggtggcctctctgtgtcttcgtctcaaaatccagttgtggactgtgtttctaggagagaggatccccttcgtgattggggcaatatcgcctgcagtgaaggaataattggatgtgaccataccaccaccgataatgaacacataaagctagcacacaggctgcacgataatgttcaaatgaatgtacctgtcatagttgaggacgtgactgataatgtgccttcaggcattccatcatcgagaccagttgttcctcaggttgtaatggcagctgaagaacaccaagaggtgattctttcatcacagaaggatgacgatagtaggaccaacaggccagagttagctaatgaggatcatgatggagttgccgatggatccattagcgatgctgtagttgctgaacttgaagccagcatgtatggattacagatcattaaaaatggtgacctcgaggaactacgtgaactgggatccggaacatttggaactgtatactatggaaagtggcgaggaactgatgttgctatcaagcgcatcaagaaaagctgttttgctggaagatcatctgaacaagagaaacttaccaatgacttttggagggaagcaaagattctttcgaagttacatcatccaaatgttgtcgctttctatggtgtggtccctgatggaactggaggaacactagccactgtgactgaattcatggtgaatggctcactaaggaatgttcttttaaggaaagacagaatgcttgatcgccggagaaaacttacaattgctatggaagcggcgtttgggatggaatacctgcactccaaaagcatagtgcattttgatctgaaatgcgacaacttacttgttaacttgagagatcctcagaggccaatttgcaaggttggagactttgggttatcaaggatcaagcgcaacactctggtttctgggggtgtccgcggcactcttccatggatggcaccagagctactgaatggcagcagcagcaaagtctctgagaaagtggatgtgttctcttttgggatagttttatgggagatcttgactggtgaggaaccgtatgcaaatatgcattgtggtgctatcatagggggtatcgtcaataacacactccggcctccaatacctgagaagtgtgacccggactggcaaaagctgatggagcaatgttggtcggcgaaccctgacgcccgcccctcattcaccgaggtcaccgacaggctccgagccatgccgccggtgattcaggcgagagggggacaggctccggcaaccagatgatgaggtgttataaacatcagccagcagattatttttagctgcaatcagcttctgcactgaccccgcgagtctcctatgtgtgcatagagtatatatatacatgtactggtcacggtgtgtattctatcctgacgtaaatatgcttcttgtgtacatccttttttgcaccccatgttgagggcttctggtgtaattacatgtatctgagtgaaaaaaaaaagagtagcacaggcgggttgctgtggccacacgtcaacaatttttctgtgtaggttgtgagggtctgccagatagatgtatggtagaccactcaagctttttggtgggccgtgggttgtaaaaatatgagcttggaacctgtaattatgtgcaacagatgctggaatgctggctatgctgatataaacttcgtttggtttttgtatc

SEQ ID NO: 760 - DNA, 2172 bp, Zea mays
  Clone ID: 700089702_FLI
ttcctcccctcactccatcactcccatgtcaagctccaggaaacccaagactcccatcctcctcttcttcctcttccttctcgccagcctcgccttctcccaagagttcacctacaagggcttcagcgccagtggccgcggcgggagcccgaacctgaacctgaacggcacgtcggcaaccgagatcttgcccagcggcatcctccgcctcaccaacgagacgtcccggctcttcggacacgccttctacccgaccccgctgcgcttcctggaccagaagaacggcaccgccgtgtccttctccacgcagttcgcctttaccgtggtgcccgagttcccgacgctcggcggccacggcttcgcgttcgtcgtcgcgcccgacccgcgcatgtccggtgcgctgcccagccagtacctgggcctactcagcgccgccgacgtcggcaacgccaccaaccacctcttcgccatcgagttcgacaccgtgcaggacttcgagttcgacgacgtcaacggcaaccacgtcggcgtcgacctcaacagcctcatctccaacgcgtccgccaaggccgaccctttgaacctcaagtccggggacaccaccgcctgggtcgactacgacggcgccgccaggttgcttaacgtctccatcgccaacggcacgttggggaagcccaccacgccgctcatctccttccgcgtcgacctctctgggatcttccgcgagcagatgtacgtcggcttctcggcgtccacgggagtcctcgcgagctcgcactacctcaggggttggagctttcgcctcggcgccggcgccgcgccggcgctggatctctcgtccctgccgtcgctgccccagctcaagagctccaagaaccggacctcgctcatcctcgccgtcgcgttctcggcgttcgtggcgctcgtcgtgctcgccggcgccggcgcgtacggtgcgtaccggtacaagaaccgcgacatcatcgagccgtgggagctggactacggcccgcatcggttcaagtacgccgaactccgccgcgcgacgcgcgggttccgcgagcgcgaggtgctcggatccggcggtttcggcaaggtgtaccgcggcgtgctccggaaatccggcgagaccgtggccgtgaagcgcgtgaaccacgagtcccggcagggcctccgcgagttcgtggcggagatcgcgtctatcggccggctccgccaccgcaacctggtccagctccagggctggtgccgccgccgcggcgaccttctcctcgtctacgactacatgcccaacggcagcctggaccgccacctcttcggcgaccacctcaaagcgtcgcgcctgacctggccggtccgctaccgcatcctccgcgacgtcgcgtcggcgctgctgtacctgcacgagggatgggagagcgtcgtcctctaccgcgacgtcaaggccagcaacgtgctcctcgacgccgacatgtcggcgcggctcggcgacttcggtctcgccaagctccactagcgcgggaccaacccgagcacgacgcgcgtggtgggcaccctggggtacctggctcccgagctgacgcggacggggaaggccacgacggctgccgacgtgttcgcgttcggtgccctggtgctggaggtggtggccgggcggcatcccatagagccccgcgcgccgcccgaggagctggtgctggccgagtgggcgtgggagcggtacgcggcgggggaggtggagaaggtggtggacgcccggctcgccggcgcgtacgacttcgcggaggccgccgcggccgtgaaggtggggctgtggtgctcgcacccggcgccggcgacgcggcccaccatgcgggaggtggcgaggtaccttgacggcggggatgccagcgaggtgccggagcctcctcccccgcctcccatgccgccggcatactctggcgaggtcgggttcgacgatttcgtgcactcgtacccgtcgtcgtcgttcgagcgcgccgccgcagctggcggcggctgggacggcgggacccagatgtcggtcgccacgttccccttctcgtctctgtccatgcggtcatctcacgtcagcacgtgatgcatcgaaattcctgggcccgcttgccagtaagatgacgacttcgtcaaacataatagtgtgaccttggagct

SEQ ID NO: 761 - DNA, 2033 bp, Zea mays
  Clone ID: 700089712_FLI
gctgcaagaatggcgggagcaggcgggcctgccgctcggctcctggtggctgcacctgctgctgctgttcgcggcgcgcggcctcacctaccagttctggttcagctacggcaacatgctcttcttcacccgccgccgccgcgtcgtcgccgacggcgtcgacttccgccagatcgacgccgagtgggactgggacaactttctcgtgctgcaaacgctgattggggccacggtggtcaacagcccactgctcccgggcctgcggcagctctgcctgtgggacccgcgcgggtgggccgtcgccctgctgctgcatgtgggcttctcagagccggtcttctacctggcccaccgggccctccacagggccccgctcttcgcccgctaccacgccgcgcaccactcctcgggcgtcacccagccgctgacagccgggttcgggacgccgctggaggtcctgctgctgactctggtgatgggggccccgctggcaggggccttcctggtgggggccggctccataggcctggtctacgtgcacgccctcgccttcgactacctgcgcgccatgggttacagcaacgtggaggtcgtgtcgcccagggtcttcgaggcgttcccgctgctcagatacatcctctacacgccttcgtacctgagcctgcaccaccgcgagcggtgtcgcaacttctgcctgttcatgccggcgctggacctggcgggcgggacgctggacgagcgggcgtgggcgctgcagcgcgcggcgtacgacggggggccgggcggcggcgcgctggggacgccggagttcgtgttcctggcgcacgtggtggacatgatgtcgtcgatgcacgtgccgttcgcgctccggtcgctcagctccaccccgttcgccaaccacttcatcctgctcccgttctggcccgtcgccttcggcttcatgctgctcatgtggtgctgctccaagaccttcgtcgtcagcttctactacctccgcggccacctccaccagacctggtccgtgccccgctacggcttccagtacttcctgccggcggcgaagaagggcatcaaccagcagatcgagctggccatcctgcgggccgacaggatgggcgtcaaggtgctcagcctcgccgcgctcaacaagaacgaggctctgaacggaggcggcaccctgttcgtgaacaagcacccagacctgcgtgtgagggtggtgcacggcaacacgctgacggcggccgtgatccttaacgagatccccagcaacgtgagagaggtgttcctgaccggcgccacctccaagctcggcagggccatcgcgctctacctctgcaggaagaagatcagagtcctgatgttcacggtgtcgtcggagaggttcgtgaagatccagagggaggcgccgccggagtaccagcagtacctcgtgcaggtgaccaagtaccaggccgcacagaactgcaagacttggatcgtgggcaagtggctgtcgccgcgtgagcagcggtgggcgccgtccgggacgcacttccaccagttcgtggtgccgcccatcatcggcttccggcgggactgcacctacggcaagctggccgccatgaggctgcccaaggacgtgcagggcctcagctcctgcgagtacacgatggagcgcggggtggtgcacgcgtgccacgccggcggcgtggtgcacttcctggaaggctggggccaccacgaggtgggcgccatcgacgtcgaccggatcgacgtcgtctggaaggcggcgctcaagcacgggctggcgccggtgtgatcatatcgcatcgtcgagccgcaccgcgcgcgcggtttgttttgcagcggctacctacctagctgcatatgcttgccaggccggggtccagccgccgcggttctgtgtgcatgcatgcaacagcccagcagaccacgggctaccgtgcgtggctaattcttgtactagtactactcctgctgtatgtaccgtgccgatggggcgatgggttaattaaagtcctctcgactacgct

SEQ ID NO: 762 - DNA, 882 bp, Zea mays
  Clone ID: 700089767_FLI
cgggggaatgacctttttaaggcaggcaagtttgctgaggcgtcgctagcctatggtgaagggctgaaatatgagccttctaatccagtgctatactgcaaccgggcagcttgctggttaaagctgggtcggtgggcaaaagctgttgaggactgcagcgaggccctaagagtccagcctaactacacaaaggctctgctaaggcgtgcggcgtcatatgcaaagcttgagcgctgggcggactgtgtgcgggactacgaggtgcttcgcaaggatcttcctggtgacactgaggttgcagagtccttgttccatgcccaagttgcattaaagacagcccgtggagaggtggtatctaatatgaagtttggaggggtagttgaagaaattatcagcttagagcaactccaagatgttatccgttcacctggtgtatccgttctttacttcatggctacaatgaacaagcaatgtgcacaaattaccccgtctgtggactccctttgctccgagtgccctgcattgaatttcctgaaggtaaacgttgacgagcgccctctggtagcaagcgcggagaacgtgcgagtagtcccaagcttcaagatttacaaggacggcacgagagtgaaggagatggtctgccctagcttgcaggtcttgcgctattccgtgaggcactatgctgtctccagctcttgaggtccggcactcagttcgctggccctgttagtgtcaccacatgccaacatttcaccaacaaatctgtccctctatagtatcacagcatttcccccttcccatcgcgtcacttaggctcctcctaccgcaacatctctagaaccatttgatccaagcttaagcaattctcatgcctcgctttcc

SEQ ID NO: 763 - DNA, 1532 bp, Zea mays
  Clone ID: 700089781_FLI
cacttagctgctgctggtggtggtggtggcctgggcctggctgctgtgtctgtatcgatgtgtccgtattttctccatctcgtctgcatacgctgcaattggtaaggagctagctggcctttcatgtcttccatgctgccatagccatacggccggccggaaggcaggataccccatcgctcgctgcacatgcatgtatgccgcatggggatacatgttcatcatcagcagcacagtggctctgtatcccccatcccaatccgatcttatataggaggaggaggaggagcagcagcagcagcagccaggcgcggccggcggccggagtagtatccgaatccgctcaacacccaccggggggtggtctctagctttcctatcgatcaatggctttcaaaggactcccgcgtgattcccgagggtccctcgaagtcttcaatccagacgcccctgtttcagatcgtgcaaccacctccccgttcctcctccctcctgcggtcgcgtcccatcccagcctcctcgccgccggagatggcggcgatgctgacgtgggtcgggcgacacagagggccgccgagtggggcctcgtcctccagaccgacgagcacaccggccgcccccagggtgtcgtcgcccgcccctccggttccaaccgcaccagcgagagtggcaactccatcgacgagagggccgccgccgccggtgctggtagagctctcccccgggtgtcggaggagcttcgcgccgcgctctcagcgttccagcagaccttcgtcgtgtccgatgccacccgccctgaccaccccatcctctacgccagcgctggattcttcaacatgacgggctactcctccaatgaggtcgtcggaaggaactgccgcttccttcaaggttctgggaccgaccccgtagagatttccaagatcagacaggctctcgcagctgggtcaaattactgtggccgtatcctcaactacaagaaggatggtacaccattctggaacctcctaaccgttgcccccataaaggatgaggatggcagggtcctcaagttcattgggatgcaagtggaagtaagtaagtacacggaaggtaacaaagatactgctcttcgtccaaatggattgccagagtcactcatcaaatatgatgcaaggcagaaggatcatgctcgtagctcagtctcggagctcctacttgccctgaaggatccacggtcactgtcagaatcaagaaacaataccttaaaaaggaaatcacaggaatcagcaggttcagctctagttcccggcaagagaagctccgaaactggatcccgtcgtaactcacatagtggaatcagaaactctctacaaaaaatcagtgaagtacctgaaggagggaataagaccaggaaatctggtttgcgttcttttatgggccttattggtatgggacatgggaatgtagagaagaacattctaaaaccaagggaagatcccctacttgatagcgatgatgagagaccagatagcttcgatgacgatttcagg

SEQ ID NO: 764 - DNA, 807 bp, Zea mays
  Clone ID: 700089787_FLI
gaaaattctctcagataagttgaataggatcgaaaaccctaatccgtctccctcctatcgcactcgcgtctctttcctattcgcgccgccgccgctgctgcaagcgccagctcgccgtcgtccgaatagtacactctaacgccgccatggggcgtatgcacagccgcgggaagggtatctcgtcgtcggcgctgccgtacaagaggacgcctcctacctggctgaagaccgccgcctccgacgtggaggagatgatcacaaaggcagcgaagaagggacagatgccgtcgcagatcggcgtcctgctccgtgaccagcacggtatcccccttgtcaagagtgtcaccggcagcaaaatcctccgcatcctcaaggcccatgggctggcacccgaaatcccggaggacctgtacttcctcatcaagaaggcggtggcgataaggaagcaccttgagaggaacaggaaggacaaagactctaaattcaggctcattcttgtcgagagcaggatccaccgccttgcccgctactacaagcgcacaaagaagcttccacccacgtggaagtacgagtcaaccactgcaagcactctggtggcctaagcaaggagctcagcgtcgggcgcttgaagccgagggcattgttggaaatcatttttatgtaccgttttaagagtttggagtgaactagagatggtgaatgtccctcctctggaggatgccatggaccctttttgtttacatagaactgccctgctgttaaacttttgctacttggcgaccagattttttcagctattttttttct

SEQ ID NO: 765 - DNA, 615 bp, Zea mays
  Clone ID: 700090056_FLI
gcttccagagccccccgccgccgctgcgccctcctctcggtcctgccgtccgtcgaggtaaaaggacagcatggtgagggtcagcgtgctcaatgatgctctcaagtccatgtacaatgctgaaaagatagggaaacgtcaggtcatgatcaggccgtcatccaaggtgatcatcaagttcctgacggtcatgcagcgccatggttacattggcgagttcgagtacgtggatgaccacagagctgggaagatcgtggtggagctgaatggaagactgaataaatgtggtgttattagcccacgttttgatgtaggtgttaaggagatcgagggatggacggcgaggcttcttccatctcgccagtttggctacatcgtcctaacaacttctgctggaattatggaccatgaggaggcccgccgtaagaatgttggtggcaaggttctaggtttcttttattgaaaatgtgtttttttgagccacagatgcgtccaagaactcgtctgatgttttgaggtttgttaagactgggtgtccgagcctttgtggtttgttaagacagcgatgtgtcatgtatttcagaaattgggatttttatgagatgtacctgcgag

SEQ ID NO: 766 - DNA, 1311 bp, Zea mays
  Clone ID: 700090275_FLI
cttcgtgttcggtgactccctcgtggacaacggcaacaacaactacctgatgacgacggcgcgcgccgacgcgccgccctacgggatcgacttccccacgcacatggccacggggaggttctccaacgggctgaacatcccggacatcatcagcgagcacctcggctcccagcccgcgctgccgtacctgagccccgacctccgcggcgcccagctcctggtcggcgccaacttcgcgtccgccggcgtcggcatcctcaacgacaccggcatacagttcgtgaacatcatcaggatcggacagcagctgcgcaacttccaggagtaccagcagaggctggcggcgttcgtcggcgaggacgcggcgcggcaggccgtcaacgacgcgctcgtgctcatcacgctcggcggcaacgacttcgtcaacaactactacctggtgcccttctccgtccgctctcgccagtttgccatccaggactacgtcccctacctcatctccgagtacaggaagatcctcacgcggctgtacgagctcggggcccggcgcgtggtggtgacgggcaccgggatgatcgggtgcgtgccggcggagctcgccatgcacagcgtcgacggcgagtgcgcgcgcgacctcacggaggcggccgacctcttcaacccgcagctggtgcagatgctctccgagctcaacgccgacatcggcgccgacgtcttcatcgccgccaacaccaaccgggtcagcttcgacttcatgttcaacccgcaggactacgggttcgtgacgtccaaggtggcatgctgcgggcagggcccctacaacgggatcgggctgtgcacgccggcgtccaacgtgtgccccaaccgggacgtgtacgcgtactgggacgcgttccaccccacggagcgcgccaaccggatcatcgtcggccagttcatgcacggatccaccgaccacatcagccccatgaacatcagcaccatcctcgccatggacaacaggaactaggccctgcgcgtggcgtgcctcgacctcgatccatccatctctagccggctgggattgagatgccaatctgcactgccatggatccgtcccgacactggcagctataatactacgagacgacacacatagctactgcatgcatgcgtaatactactagtataagttcgtgtcattggtaattggttatgttcatgaagcttcttttttgtggtttagattgacgtgaattgatggtgagaaattaatcctttattagagatgcatgggttcaatataatacagctgtatgtcaagtttctttg

SEQ ID NO: 767 - DNA, 785 bp, Zea mays
  Clone ID: 700090280_FLI
ctccactccattttgtttctctctccctctagatgaagggggactctataccaagctgcttgttgcctacccttccacgcttacgctcctggcattctccggaagcctctaagaccactgcttcggccttcaaagggatggtggtggtggtgacctactcgacgtcacacaacctttctcctcatcggctgacgactgatggcaaccgagatccagtccatagacctagattaatctcccccatcctggttgctcgaccgagttgctcagatccatcgacgaagggagcgactacatcaccgccactgtcacttatccctatccacagacgcttcgtctcccaagcagtgtaggaaggggatatgtccatccgcaccgggatctctcgtaccctgttcgtctcccttcaatctgtaactcttgaggattacaacaccaaccagacgtttgaggactggtggaggaaggccaacaagagtacaatgaaggataagagaaaatgggttaactatgtcatcattttgggggattggtgcctctagatgcatagaaacagaatgttccttgatgggattagtccatccattcagagattgcagcagtatttcagtgatgagttctcctgttggctcatggcgggcgccaggagtttgggttagcttggtttccctagttccatgaggattatcggatccattccttttgatcctttgtaacctttttttgtttctgttttcttgcttggcttttgattattttctgatgttgtcttggttgtaagccct

SEQ ID NO: 768 - DNA, 1714 bp, Zea mays
  Clone ID: 700090328_FLI
cagatcttccctcgagtctaacaggaataattcatctttggagtcagtagactcattgatgttggccaagtctgccacaagaattgctattctaggaatttcaacctccaatttaaatgatgcaagacgtatcaatgtttcagtgatgcaacaacgaggggaccctttgcttatagtaggatctccatttggcctcatgccacccttccatttcttcaacagtgtatcagttggtgctgttgcaaattgccttcctccatgcactgcaaggagctcattactgatggctgacatgcactgtctccctggcatggaaggcgctccagtgtttgaccaaaattcttgcctcgtggggctgctgatgaacccattaacacagaaaggcagcaatatagaagtccagctcgtgattacatgggatgcaatatgcacggaatggaacagcaaaaaactggaggaaattgaacgacccccaagaaaactacctaatgacaaaaatacagatagtaaatctatggaattacggcatgtatataactatgtgagggttttctcttctacggacaacaaaactaatcagcattgcatatcaccccgttcgctcagagaggctatatctgcagttgttcttgtcacggttggtgatacgtcttgggcttcaggtattgttctgaacaaaaggggtttagttctgacaaatgctcatctcttggaaccttggagatttggaagaacttcaccttcagatttacaagcctcgttcgctggagaacatctcaatgctggagaaaacaaatcattgcaaccacaacaaggcaaaatttccaatgaagatgctgtcaagcataaggtttcgtcatttaacttgggtttcaaaagagggaagagaatatctgttcgtttggaccatgaagagagacagatatggtgcaatgctagtgtggttttcatctcaaagggtccacttgatgttgcattgcttcaaatagaaaaggttccagttgaattaaatacaatcagaccagaatttgtttgtccaacagcagggtcgcctgtttatgttgttgggcatggcctttttggaccccgatcaggcctacactcttctctatactcgggggttgtgtcaaaggttgtccaaatcccagcaaatcaactttctcatctggcccgtgctgaggctgacaatatggacataccagtaatgcttcagacaacagcagcagttcatccaggagccagtggcggcgttcttgttaatacacatgggctaatggttgggataataacaagtaatgctaagcatggtggtggaagcacaatacctcatctgaatttcagcatcccctgcaaattactggttgcagtcttcgagtattcagcaaatggaaacctcgtggttttggagcagttggacaaaccaaatgaagtgctctcatcagtttgggcattggcaccatcatcatccccatttgtcaggagctccccagaaaaaggcaaagaggaaaaggtcttggagttctctaagtttcttagtgacaagcaacaagctctgaaatctaacgtagatctgaaggaactatttaggtacaagactcccagcaaaatatagagtgcgtccactagaattcatacaaggaaaatgtttgttcccagaattttgtatgagacgtttgatcccagaaatccccagtacaaaatgagttatcagagc

SEQ ID NO: 769 - DNA, 1485 bp, Zea mays
  Clone ID: 700091411_FLI
ctcccgcccccgccgaagcgccaccactctatgcccgaaaacctgttcctcctccaaaaccaactccagccgccgccgccgccgccgcagggtctacgattcccaccactgcataccaccgcgcccttccagctccaaccatcgctgcaaccaccgcgaggttcgatgaaaacaaccccggcggcgcagcaacatcaacagcttctggatgagcttgcggcggcggcaaaagcggctgaggtcggcaactccatcggcgggcgcgagatattggcgcggctcaatcagcagcttccccctatcgggaagcctttcctccgctccgcttcctacctcaaggaggccctcctcctcgcgctcaccgacggccaccaaggctccactcacctatcctcccctctcgacgtcgccctcaagctcggtgcatacaagtccttctccgacctctcgcctgtgctccagttcgccaatttcacggccactcaggcgctcctcgacgagatcgcctcaacaacttcatcttgtatccacattattgatttcgaccttggtgttggcggccagtgggcttccttcttgcaggagtttgcacaccgccgtggaactgggaacgcccccctgccaatgttgaagctcacagccttcgtctcaagtgcttcccaccatccccttgagctgcatcttactcgggagaacctcacgcaatttgctgtggaccttggcattccatttgagttcactgacatcaatcttgatgcgtttgatccggcagaattcattgctcctagccccaatgaggttgtggctgtttgcatccctgttggttgctctgcacgcacgccaccgctccctatgttgcttcagttggtgaaacagcttgcgcctaagattgctgtggctattgaccatggcagtgaccggggtgacctcccattttcacagcacttcatgaactgcttccagtcttgtatgttccttctcgactcacttgatgctgctggcactaacgcggatgctgccagtaagattgagaggtttctgattcaaccgagagtagaggatgcagtacttggccggcggaaagctgaaaacgcaatggcttggcgggcagtgtttacatcggccgggtttgctccggtaccgctcagcaacctcgcagaagcacaagctgactgcctgttgaagcgcgtgcaggtccgaggattccatgtggagaagtgtggaatgggtctagcactctactggcagagcggcgagctcgtgtctgtctcggcatggcggtgctgatcatacggaccccatccatcaaccatcatgacacctacaccaatttgcaggcatgtttaaccctggtaatgtgcattttgtcttgcaatttcaaacatcgtgaagaaaactattgtatttgttgttacacgcctctgattgctttgctgatgttggagtaccgcctctctaaaatgtaacatgttggtctagggtctc

SEQ ID NO: 770 - DNA, 1054 bp, Zea mays
  Clone ID: 700091915_FLI
gacctgatataacatgcaatgacccagaagatatatctcaggacggtagcaggctttgggctattgacaaacccaatattgcacaaccccctcatggatgggaaaggcagattaggataagaggtgaagggggtaccaaatttgctgatgtatactatacctctcctactggaaggaaacttaggtctctggttgaagtcgataggttcctccaagagaatccagagcatgttgcacagggtgtaactttagctcagttttcgttccagatacctagacctctgcggcaggactatgtcaaaaagaaaccgaagttgataaatgcaagtgatgaagcaagtacaattacctctaagtcttatgaaccagaagaagtgaaccctatagcctgggcagttcctacaaaacatgagggtgatgccagtgaagaagcttcttttgccgatgagacacttgcatcagaagtagtgctaacccggaagaggaaaataggaagctctttgtcagtagagccaaaccatctctctgatgaacttgaaccaaagttggaggatgcttagaacggggagacttctaactgaaaagtaaaagtgggcagcgtcgtgatgccaacttacccccctgccatggttttattggtcctctgcttgtttctcgttttccttgggagtcagcttctctgttttatgtggtcgcacacggccttatttgtagtattacaccacagaagctggctgacccaaaaaccgacattttgggggcagcaacttaacgaaatgtttgcacgagagtttagagccctatggaacttgtttggataaatatgtttattacgttgtagtacttagctaggaacctgcttatgtaagatgatctttctttaagtaagattaagaactgtcagcggcctagttctgctgcacctcggatctaatctcatgttctttgttagacggaccagcagccaaggttctgaaatgtcgtaaagtttatatgctagtactgcgctattgctattgtaattctctgtgcacgtttttgatttgatattgtg

SEQ ID NO: 771 - DNA, 554 bp, Zea mays
  Clone ID: 700092088_FLI
ggctctggtgtgctcgctgtcctgcggcctcgcgcagggccgcgtggcgaggaagagcctcggcatcggcctgggcggcggcggtggcggcggaggcgacgggctgggcctcgggcttggactgggcctcggcgtcggcgcaggtaccggaggagtgtcggtgtctgggtctggctctgggtctgggtcggcgcctgtggtgggatctacctcagggtctaggtctgggtctatatccgttggaggggccagctcgtccgccggatcgagtgccggatcgtccgcgggctccactgggtcggcggccggctcttctgcgggctctggcggcgggcaagggtacgggcagggcggtgggagcgggtcgggatctgtgtatggggagggtagtgggtcgggcaatgggttggtgggtatagggactggccaggggtatggtcatggttctaacttcggtggaaatccttgaagtcataaaatgtttgtattgtatggcgcggtgtggtgtattttgttctataacagtggaatatactatcttttcttttggttct

SEQ ID NO: 772 - DNA, 1533 bp, Zea mays
  Clone ID: 700092132_FLI
tccatctcctagccgccgccgccgccgccgccgccgctgcccaaaaccctacctaccctcttctccccctcactctcctttcatctccattctaatggcggcccaacccgtccggcgaagctgctagtgcttgtatctactatcttcatcaggtacttcgcgatcctactgaagtattccccgccgccgctgccatggccaccctcaaccctttcgaactcctcggcgccgacgacaacgacgacccgacgcagctgattgcggcggcggcggctgctgctcagaaagccgaggcgaagaagtccgccgtggcgcctgctgggaaggctgcccagcctgcggcgaccaccaagttcccgaccaagcccgctcctccctcgcagacggttcgggatgcacgcggcggtggctcatcagctcgtggaggctttggccgtggtgaacgtggccgtggcagaggtggacggggatatggccagaaccgtggcttcagtggtgacaatggcagtgacttccagggaggttatggtggcggaggctatggggatggtgctgtaactggtggatctgaaggagaaagggagagagacactcgtcccccgtaccgtggcggaggcagacgtggtggttacaggaatgttgagtttgctgatgactctgagaggccaccacggagaaactatgagcgccacagcgggactggccatggctatgagatgaagcgtgatggcgcagggcgtgggaactggggcactgccactgatgaacttattgcccaggatgcagaggactccccgaagatggaggaggctgctcctgttgctgagaaacaaggtgagcagaatgatgccccagcagcagatgagaacaaagataacaaggatgctactgcaaatgaggaggaagaaaaggaagaggacaaggagatgactctggaggaatttgagaaaataagagaggagaagaggaaagcactacttgcattgaaggctgaggagaggaaagttgaagttgacaaggatttgcagtctctgcagccactttcaaacaagaaagaaaatgatgaagttttcattaagctgggttctgacaaggataagaagaaggaaaatgctgagcgtgatgagcgtgccaagaagtcggtgagcatcaacgagttcctgaaacctgctgaaggagaaaggtactacggcggccgtggccgtggaaggggccgtggggatcgtggtggttttagaggcggatacggagggggatacagtcgtggcccagctgctgctgctccatccattgaagatcaagctcagttcccaagcctcggtgggaagtgaagggcgcccagctgctgctgtcaccgagcgttgtgttgtctgctgttgtcatatttaaattttgtccgacgttaaatttctgtgccacggtttaaacggaacaaataatgatgttgcatgtggctatctttagttatgtggtacttgacgttgaataccggagttgttgtttatcagaattaacctccaatttttgtaggcc

SEQ ID NO: 773 - DNA, 1426 bp, Zea mays
  Clone ID: 700092738_FLI
cacactcactcgcggccattgtcctgctcgtgcgtgctctgccttttcaggcgatcgaccaaccaacttctcgtcactgccatggctctgctctccgacctcatcaacctcgacctctcggaccgcaccgggaagatcatcgccgagtacatctgggttggcggttccgggatggacgtcaggagcaaagccaggacgctgtccggacctgttgatgaccccagcaagcttccgaagtggaacttcgacggctccagcaccggccaagctccgggcgacgacagcgaagtcatcctttgccctcgggccatcttcagggacccgttcaggaaggggcagaacatactggtcatgtgcgactgctacgagccgaacggggagccgatcccgagcaacaagcggcatggggccgcgaagatctttagccaccctgacgtcaaggctgaggaaccatggttcgggattgagcaggagtacacccttctccagaaggacaccaagtggcctctcggttggccgctgggcggctaccctggccctcagggaccttactactgcgccgtcggagcggacaagtcctacgggcgggacatcgtggacgcgcactacaaggcctgcctctacgccggcatcgacatcagtggcatcaacggggaggtcatgccggggcagtgggagttccaggtcggccctgccgtcggcgtctcggccggcgaccagctctgggtggctcgctacattcttgagaggatcaccgagatcgccggcgtggttgtctccttcgaccccaagccaattccgggggactggaatggcgctggtgcacacaccaactacagcaccaagtcgatgaggagtgacggcgggtacgaggtgatcaagaaggcgatcggcaagctgggcctccggcaccgggagcacatcgccgcgtacggggacggcaacgagcgccgcctcaccggccgccacgagaccgccgacatcaacaccttcgtctggggcgtcgcgaaccgcggggcgtcggtgcgggtgggccgcgacaccgagaaggaaggcaaaggctacttcgaggaccggaggccggcgtccaacatggacccgtacgtggtgacctcgctgatcgcggagacaaccatgctgtgggagcccagccactccaacggcgacggcaagggcgccgcggctccttgatttgattctgcggagactgagctctgtgtgtgagccggcctgcgtagatggcaaatgggactgaccctgtcagaaacttgagatgaccataataatagctgcagtgtgctcgttctggggttggataagacccaagaactttttttagctttcttcgaacaagtaatcatggtgctgaaccaacacagatgtgctactaaacacatctaacgagtcaaacgccgaagcatatccc

SEQ ID NO: 774 - DNA, 997 bp, Zea mays
  Clone ID: 700092747_FLI
cacaacacctcgcctcgtcagatcgaccgggaagaagggagcagaagccaaccggctcgtccgcccgttgcctgtcgtcgctatggccgccgtggaggtgtgcgtgaaggccgccgcggggaaccccgacacgctcggcgattgcccgttctcgcagagggtgctgctcacgctggaggagaagaaggtcccgtacgaggtgaagctcgtcgacctcggcaacaagcccgaatggtttctgaacatcagcccagagggtaaggtgcctgtgttcaacggtggagatggcaaatgcattgctgattctgatgtaatcatccaagtcattgaggagaagttcccgactccttctctggtcacccctccagaatatgcatcagtgggatcaaagattttcccagcctttgtcaagttcttgaagagcaaggatggtagtgatgggtcagagaaggcgcttctggatgagctgcaggcactggatgatcatctcaaagctcatggcccctacataaatggggagaacgtgtcagcgactgatcttagcctggggccaaagcttttccacctacagatcgcactggagcatttcaaaggctggaagatcccagaaaacctaaccaatgtccatgcctacaccaaggctcttttcagccgtgaatcttttgtcaagactaagccatccgaggagcacgtgattgcgggatgggcgcccaaggtgaatgcataagagccttgtgctttggtgctacctggtggactccatccatttatcttatcagtctttgtcagtggtgtggataggtgtcaagtctgtagcctagatgcatgattcagttggaattatgcagtgccgtgtctcgagtactcagttctggctgttgcggttgtgcatcttaccttctgttgctggttttgtttgaggccatgggcatctcttggtcctatgctgtgagagcgctgtaatgtgggtaccaaataatggagctgcttttatgct

SEQ ID NO: 775 - DNA, 1058 bp, Zea mays
  Clone ID: 700092786_FLI
cgcgagccccaaagatccccaaaccctacacccgcccgccggcgcactcggggaccgtcgaatcgagcaggttgacggaggagaggaagcctcgaagatgttccggaaccagtacgacaccgacgtgacgacatggagcccccaggggcggctgttccaggtggagtacgccatggaggccgtcaagcagggctcagcctgcgtcgggctccggtccagcacccacgccgtcctcgccgccgtcaacaagcccgcctccgagctctcctcctaccagcggaaggtgttccgcgtcgctgaccacgccggggtcgcgctcgccggcctcaccgccgacggccgcgttctctcgcgcttcctccgcaacgagtgcatcaaccactccttcgtctacgaggcgccgctccccgtctccaggctcgcgctcaagctcgccgacaaggcgcaggtttgcacacagcggtcatggaagaggccctatggtgttggcctcctagttgctggactggacgagtcaggggctcatctgtactacaactgccccagcgggaactactttgagtaccaggcattcgccatcggttctcgttcccaagccgccaagactttcctggagcgcaggttccagggctacaatgactacaccccggagcagctcatcaaggacgccctctccgccataaaggagacactgcagggtgagaagctgtccagctccaactgcacggtggccatcgtaggcaggaaggaggacggcaccatcgagccgttcgagatgattggcgccgcaaggatccaggaacttatcgactccatggaggtcgccgaggaggcgcccgcggaggaggccagctccatgcaggaggaggagaggggcccagaagatgctgctgctgctgcacctgcacccatggacatctagaagccccatatgaacccaccaacctcacgctgcattctgagttcccaaaatactagactgcttctttagaaaattgttgtgagttgtgactcttgtgtactctttgcttccgaagaacttctctatggtctctccg

SEQ ID NO: 776 - DNA, 1070 bp, Zea mays
  Clone ID: 700092795_FLI
gccagcctcacccgcctccacttccacgactgcttcgtccagggctgcgatggctcggtgctcctggacgccgttccgggggtggccaactccactgagaagctggcgccggccaacaacaactcggcgcgggggttcccggtggtggacaaagtgaaggcggcgctggaggacgcctgccccggcgtcgtctcctgcgccgacatcctcgccctcgccgcagagatctcggtcgagctgtccggaggaccaaagtgggcagtgcttcttgggaggctagacagcaagaaggccgacttcaagagcgcggagaacctgccgtcgccgttcgacaacctgacggtgctggagcagaagttcgcggccgtgggcctccacaccgtggacctggtggccctctcgggggctcacacgttcgggcgggtccagtgccagttcgtcacggggcggctgtacaacttcagcggcacgaaccggccggaccccacgctcaactccggctaccgggcgttcctggcccagaggtgcccccagaacggcagcccctcggccctcaacgacctggaccccacgacgccgaacctgttcgacaaccactactacaccaacctggaggtgaaccggggcttcctcggctcggaccaggagctcaagtcggcgccgcaggcgcagggcgtcaccgcgcccgtcgtcgaccagttcgccaccagccaggccgccttcttcagcagcttcgcgcagtccatgatcaacatgggcaacatccagccgctcaccgacccggccaagggagaggtccgctgcgactgccgggtggctaatgatgattaatccacgacgacgacgtgtgtagttagaaacggacgtgaatgcatgtgcatgtgcccggccgggtcgttagtacaccgacaagcaagagtgcactagcgctatggatcggactatatggtgcacaactgcacatgcatgcatataatatcagggcctcgtcgtttcgaattgtttgctgtcgacttcaattaatagtttctcataaatgtgcaataaagaggaacccaatttctcctgtt

SEQ ID NO: 777 - DNA, 2274 bp, Zea mays
  Clone ID: 700092907_FLI
ccctcttcgatacccccgataaaacccccgacccgccccgtctccagctggccaccccatcctcgtcttctccaattccaaagtaagaaagccacacgcgaggccgaccgaggaagtccaatctcatggcgctctcctgcatgaggtgccccgcgggcgccggcgccgcttccgcccgacgcgccgcagcgcagccgttggccgcggaggctgcggtctccttcgccagatgccgcggcttcgggaggtccgccaccgctgcgacttccgcctggttttggcgcaaccatgccgttgcctcacagggagtgaaagctcccatggatgctgatgtcaagaatgctgtcatacctcctacctcaccaaaggtggaaagtggctctccttcagaaatcactctggatgaatttgaagacttgagcgctctatgcaagaatgatgattctactgttagcatcacagtagttggagcatctggtgaccttgccaagaagaagatatttcctgccctttttgctctctactatgaagattgccttcccaagcatttcaccatctttggctatgcacggagcaagatgacagatgctgaactgaggaacatggttagcaaaacactgacttgcagaatagataaaagggaaaattgtagcgagaaaatggaagagttcctcaaaagatgcttctatcattcaggccaatatgattcagaagagcatttcatagatctagacaagaagctaaagcaacatgagggttccagagtttctaaccgccttttctacttgtcaatacctcctaatatatttttggatgttgtaaaatgtgcaagcaaatcagcatcttcggtgaatggttggacacgagtaattgttgagaagcccttcggccgagactcagaatcctctgctgcattaacaagcggtctgaagcagtaccttgtagaggaccaaattttcaggattgaccattatttgggaaaagaactggtggagaatttgtctgtcctgcgcttctcaaatctcgtttttgagcctctctggtcaagacaatatataagaaatgtgcaacttatattctcagaagactttggtactgaaggacgtggaggatactttgatggctacggtattattcgagacataatgcagaatcatctcattcagatactagctttatttgctatggaaactcctattagtttggaagcagaggatataagaaatgagaaggttaaagttcttcgttccatgaagccgttgcagctggaagatgtggtcgtaggacagtataaaagtcacacaaaaggtggtaccacataccctgggtatactgatgataagacagtgcccaaggatagtgtgactccaacgtttgctgctgcggcgcttttcataaataatgccagatgggatggagttccctttcttatgaaagctgggaaagctttgcacacaaaacgagctgagattagggtacagttccgacatgttcctggaaatctctacaaggggagttttggcacagatcttgatagggccactaatgagcttgtgatacgtgtgcaaccggatgaagcaatttacctaaagattaacaacaagattcctggtctcggtatgcgactagataggagtaacttgaatctccattatgccgcaaggtactcaaaggagatacctgatgcttacgagagactcctgcttgatgccatcgaaggagagcgcaggcttttcatccgctcagatgagttggatgctgcatggtcactcttcacacccctcctgaaggagctggaagagaagcggatagctcctgagctctacccatatggaagccgtggacctgtcggggcccactatctcgccgccaagtacaacgtaagatggggtgacttgagtgcggagcactacaaggcatgaaacgaagatggccatatctttgtgatattcttgcttttccatttctataagtttgcacgccctggcagtgagatagatttaagagaaaaaaagatgagaataaggcgggcagttaactaggttggaaggcatgtatccattactagactgaatagctttgttggcataattgcagctgttagggctagtttgcaaccccgtgtttccaaagaattttcattttcccaaagaaaattagtttattttccctttggaaaatgagaatctcttgggaaaattgagttgccaaacgcccttaaaaatatgtttctaggaatcagtttatttttcacaggaacaataaaggaaacgg

SEQ ID NO: 778 - DNA, 622 bp, Zea mays
  Clone ID: 700093009_FLI
gccatcctcatgaagtggatcctccacgactggagcgacgcgcactgcgccacgctgctcaagaactgctacgacgcgctgccggaaaatggcaaggtcatcgtcgtcgagtgcgtgctgccggtcaacacggaggccacccccaaggcgcagggcgtcttccacgtcgacatgatcatgctcgcgcacaaccccggcggcaaggagcggtacgagcgcgagttccgcgagctcgcaaagggcgccggcttctccgggttcaaggccacctacatctacgccaacgcctgggccatcgagttcatcaagtgaaccaccgtcgccgcgatgagatggcatggctgccacatgctttgcttgcttggtcctcgtatcgtacgtcgccgtcgtcgtcttcttctggttattgcgctgctacctcgctgctctcgcgtatgcatgtacttttgcttaattttctttcttcatatcatgcactctggctggcctagactgcccccgatccatggtggccggtacgtcttgtcgagctcttgcatgtcgtggattctaaattcttcttctgcgtcgaattgtctctgccatgtgcgagtaataacaatcaaggttatacttacgatac

SEQ ID NO: 779 - DNA, 994 bp, Zea mays
  Clone ID: 700093019_FLI
ccagtattgacaattgctgctgctctcgcatatcgaaatccatttgtgctcccaatagatagaaaagaagaagctgatgctgtcaaaagatcatttgctggtgactcgtgcagtgatcacattgctcttgttaaggcgtttgtagcatggaaggatgctaaaaggagtggtagagaacgcactttcttgttgggaaagttttctgtcccctatgaccctgaagatgatggacgacatgcgaaatcaattttttgatctactatctgatattgggtttgttagcaagacagcaggagtgaaggcatataaccgctatggtaatgatctggagatggtttgcgctgtcttgtgcgctgggctgtacccaaatgttgtgcaatgcaaaaggcgaggcaagaggactgctttctacaccaaagatgtgggaaaagtggacattcatccatcatcagtcaatgcattcgtaaaccaattcccgttacctttcttggtttacagtgagaaggtgaagactgctagcatttatgtaagggactcgacaaatatatcagactatgcccttctactctttggtggttcgcttagtccgagcaaaactggagaaggcattgagatgcttgggggttatcttcatttctcggctccaaagcgtaccatagagttgattcagaaattaagaggtgaattggacaaactccttcagaaaaagattgaggaacctggactcgacatcttttcgcaaggaaagggtgttgtggcggcagctgtagaactgctacacagtcaaaatttcgaccattagatgccaaatattacatgttatcaggacaagtttcacactagacgaaagcaaaatcagcgtattcttttgtaaatctcacctctgcgtgttagcatatttctgttgctttttttagaaaccagaatttgagcccagcaacaaccacaacgatatcgttgcggagaaaggacttatacaaggtgattctctgtc

SEQ ID NO: 780 - DNA, 1644 bp, Zea mays
  Clone ID: 700093022_FLI
ggcctctgtcccttgcaagttcaatctcacctccaaccatgggtaaagagaagtcccacatcaacattgtggttattggccacgttgactctggcaagtcgaccaccacaggacacctgatctacaagcttggaggcattgacaagcgtgtgatcgagaggtttgagaaggaggctgctgaaatgaacaagcggtccttcaagtacgcatgggtgctcgacaagctcaaggctgagcgtgagagaggtatcaccattgatatcgctctgtggaagtttgagaccaccaagtactactgcacggtcattgatgcccctggacaccgtgacttcatcaagaacatgatcactggtacctcccaggctgactgtgctgtccttatcattgactccaccactggtggttttgaggctggtatctccaaggatggccagacccgtgaacatgctctccttgcgttcacccttggagtgaagcagatgatttgctgctgcaacaagatggatgcaaccactccaaaatactccaaggcacgttatgatgagattgtgaaggaagtctcatcctacctcaagaaagttgggtacaaccctgataagattgccttcgttcccatttctggttttgagggcgacaacatgattgagaggtccaccaaccttgactggtacaaaggcccaaccctgcttgaggctcttgaccagatcaccgagcccaagaggccttcggacaagcccctgcgtctgcccctccaggatgtgtacaagattggtggtattggaactgtaccggttggtcgtgtggagactggtgtcatcaagcctggtatggtagtcacctttggtccaactggcctgactactgaggtgaagtctgttgagatgcaccatgaggcgcttcaggaggctcttccgggcgacaatgttggcttcaacgtgaagaacgttgctgtcaaggatctcaagcgtgggttcgtggcctccaactccaaggatgaccctgccaaggaggctgccagcttcacctcccaggtcatcatcatgaaccaccctgggcagattggcaacggctatgccccagtgctggactgccacacctcccacatcgccgtcaagtttgctgagctcattaccaagatcgacaggcgatctggcaaggagctcgagaaggagcccaagttcctgaagaacggtgatgctggtatggtgaagatgattcccaccaagcctatggtggtggagacattctccgcgtatcctcccctgggtaggtttgccgtccgcgacatgaggcagacggttgctgttggagtcatcaagagtgtggagaagaaggacccaaccggcgccaaggtgaccaaggcggccgccaagaagaaatgatgcgatcccgtgtctgcttttgcagtgcctggataacttgccactaaagttgtgtatgcggttgttgctgttattgcgtggactgtttgctgcggtgtctcctgtttgtttgggtagcgcagcgtcggcctcttcaggtgtctgttgtctgttgtctttactatcagtaatgctcctgagacttgtatttctccttttggcgccgctaaatggaattttcgaacaatgattttcgtgttattattttacaaccttttcgaac

SEQ ID NO: 781 - DNA, 967 bp, Zea mays
  Clone ID: 700093042_FLI
gcccgcccggaggcgtcgcacctgcacgctgcggcagcgggcagccgccaagcctctctcgtgcggcaagcaccacacagacacccgatggcgctgctgctgctgcgcggctgcgccgcgccgccagccgtccacgcggccccggcggggtcccggctgctccctccggcgctgccgcggcggcggctcgtggccgtcgcctcttcggcctcctccgcgccgtccggcgaggtggcgtcgtcgtcccaggacggccgcggctacgggatcgtgggcgggcccaacggccacgccatcgctcccgccacagacaccaagtccaccgccgtcgagaccaccgtcgagagggtgatcttcgacttccggttcctggcactcctcgccgtcgccgggtcgctcgccggctccgtcctgtgcttcctcaatggctgtgtcttcatcaaagaggcgtaccaggtttactggtcgagctgtgtcaagggggttcatacggggcagatggtcctcaaggtcgtcgaggccatcgatgtgtatcttgctggaacagtcatgctgatatttgggatgggtctctacggcctcttcatcagcaacgctcccgccggtgttcctcctgaatccgaccgtgccctcagcggctcgtcgctgttcggaatgttcgctttgaaggaacgcccgaagtggatgaacatcacctcgcttgacgagctcaagacaaaagtggggcacgtcatcgtgatgattctacttgtgaagatgttcgagaagagcaagatggtgacgatagccacggggctggacctcctcagctactcgatctgcatcttcttgtcatcagcttctctctacatcctgcacaatcttcacaagggcgaccatgaggagtgacgagagtgaaatgccgaatttgtagcctattcgagagagagagttgacggtcttgtccaataatcaatactggattttt

SEQ ID NO: 782 - DNA, 1271 bp, Zea mays
  Clone ID: 700093085_FLI
caccggtatctattggggagtgaacaagtttgttattgataactcatctgtgcccgtggttgagcggaaaaagaaggttggacctggcagattttctattgttcttcttcttgtgtttatggatctctccttaacggttctgcgaacataacctttcaggacaagccaaagctcagcatgggtgagagcatgaaggttctgttgtcatctcggtatgtgagggatcttgctacattggttgttgcttatggaataagcattaaccttgtcgaggtgacatggaaatcaaaactgaaagcacagttcccaagcccgaatgaatattcttcattcatgggcgatttctcaactgccaccggcatagctacatttacaatgatgttgttaggaagagtgatcctcagaaagtttgggtggggagttgcagctacaatcacgcctgcagtgttactcctcacaggagttgggttcttctcactgattttgtttggtgagccattgactcctcttatgaccaagtttgggatgacacctttgcttgcggcagtctatgttggagcaatgcagaacattttcagtaagagtgcaaaatacagtctgtttgatccttgcaaagagatggcatacattcctttggatgaggatatgaaggtgaaaggtaaagcggctattgatgttgtgtgcaaccccttggggaaatctggaggtgctctgatccagcagttcatgatcctgtcattcggatctctcgcgaactcgacaccctaccttggcggaatactcctggtgatcgtccttgcatggctgggtgctgtaaggtccctcgacctgcagttctcttccctggcgaagcaagagctcggcagagagaagctgctgaaaacgcaggccgtcgaaacggtcgccgaagtagtcggcactggaaacggttctctccaagaaactctagctagtgagccgtctgcaaatggcgcggccaccaaacagtcgcaagaacctgagagcacagcccctgagaaatcaggccagcagtctcaataagttctccccccaagaaatttagctagcacgagccttttggaggaaccggaagtttcttatctggagctactgaagaaggcaggaatcatgccagaaataagaagggcctgttcttcttgtgttgttgtagcgtttttgtttttaaacttcgccgtatctgtagctgtttgtttcattccataggtatgaactgtttatgttcgttattaaaattttgggaggtctgcttc

SEQ ID NO: 783 - DNA, 1985 bp, Zea mays
  Clone ID: 700093091_FLI
gctggccgcgatagccggcgccgcgccgccgccgaagctggaggacttcctcggcggaggcgtcgccagcggtggtccggaggcggtggcgcccgcggagatgtacgactcggacctcaagttcatagccgccgccgggttccttggcggctcggcggcgtcggcggcggcgtcgccgctgtcctcactcgaccaggccggtcccaagctggccttgcctgcggcggcggctgctccggcgccggagcagaggaaggccgtcgactcctttgggcagcgcacgtccatctaccgcggcgtcacacggcaccggtggactggcaggtacgaggcacatctgtgggacaacagctgccgacgcgaagggcagagccgcaagggccgccaagtatatttgggtggctatgataaggaggagaaggctgccagggcgtatgatcttgcagcattgaagtactggggttctagcaccaccaccaactttccggttgctgagtatgagaaggaggtcgaggagatgaagaacatgacgcgacaagagttcgttgcttcccttcgaaggaagagcagtggattctctcggggtgcttccatctaccgaggtgtaaccagacatcaccagcatggacggtggcaggcgaggatcggaagggtggccggtaacaaggacctctaccttgggacgttcagcaccgaggaggaagctgcagaggcctacgacatagcggccatcaagttcagaggcctgaacgccgtcacaaacttcgagatcagccggtacaacgtcgagaccataatgagcagcaaccttccagtcgcgagcatgtcgtcgtcggcggcggcggcggcgggtggccggagcagcaaggcgctggagtcccctccgtccggctcgcttgacggcggcggcggcatgccagtcgtcgaaggcagcacggcaccgccgctgttcattccggtgaagtacgaccagcagcagcaggagtacctgtcgatgctcgcgttgcagcagcaccaccaccagcaacaagcagggaacctgttgcaggggccgctagtagggttcggcggcctctactcctccggggtgaacctggatttcgccaactcccacggcacggcggctccgtcgtcgatggcccaccactgctacgccaatggtaccgcctccgcctcgcatgagcaccagcagcaccagatgcagcagggcggcgagaacgagacgcagccgcagcagagctccagcagctgctcctccctgccattcgccaccccggtcgctttcaatgggtcctatgaaagctccatcacggcggctggcccctttggatactcctacccaaatgtggcagcctttcagacgccgatctatggaatggaatgattcgggccgcccggtcgtggctgctggtcggcctccgctcgccgctggcgtctcgcatgtgcgaaaagggtggggagaagccatgagaacacgagactgacatgggcgctctcgcacaaaagacataaagcggggggactgaaagatcagaggtaccagtagacagtagtagtatgatggaagagacagtaagcagcgagtagtgtgctgcaggatacactgaccatcgatctgctaacaacaaaatgatcgttgcagctagctatagcatatttgcctttgcccttttgtagctttggtctggtctctctctctctctctctcttttttcagctttgttgctccccagcgtcctgcactgcatgccagctgctttgaagctttctctttctactgacatggttctgcaagtgccatcatagctttagtcagccctgtacaatggatgcaggaacgtcgtctttgaattggatctctgtagctcatctctccccctagctcccccactttgttttcttttttgtgctttcctttctgctgcctctgctagcgttatgtgtactgaacaagttcatcaaacagatatagcacccttgcaact

SEQ ID NO: 784 - DNA, 1768 bp, Zea mays
  Clone ID: 700093116_FLI
tcgacctcgaagaagcagcgcatcgccacccacactcacatcaagggcctcggcctcgacgccaatggaatgtcgatgccgttggcggcggggttcgtgggccaggcggcggcgcgcgaggcggccgggctggcggtcgacatgatccgccagaagaagatggccggtcgcgcgctgctccttgcgggcccgcccgccacgggcaaaacggcgctagcgctcggcatagcgcaggagctcggcagcaaggtcccattctgtcctatggtaggatcagaagtgtactcctcagaggtcaagaaaactgaggtgctgatggaaaattttcgtagagctataggtttgcgtataaaggaaaacaaagaggtttatgaaggagaggttattgaactttccccagaagaggctgagagcacaactggtggatatgcgaaaagcattagccacgtaatcattggcttaaagactgtcaaagggactaagcaattgaaattagacccttcaatttatgatgctttgatcaaggaaaaggtggcagtgggtgatgttatatacattgaagcaaatagtggagcagtgaaaagagttggtagatgtgattcttttgctacagaatatgatcttgaagctgaagagtatgttcctatccccaaaggtgaagtccataagaaaaaggaaatagtgcaggatgtcacactccatgaccttgatgcagcaaatgctcagccacaaggtggccaagatattttgtcccttatgggccagatgatgaagccacggaagactgaaatcaccgaaaagctacgccaagaaatcaataaggtggtaaacagatatatcgacgaaggaatcgcagagcttgtacctggtgttttgttcattgatgaggtccacatgttggatattgaatgcttttcttatcttaaccgtgcattggagagcccattatcaccaattgtgatactcgctacgaatagaggaatatgtaatgtgagaggaactgatatgacgagtccacatggtataccagtggaccttctagataggttggtgattattcggacagaaacatatggccctactgagatgatacagatattggctatccgagcacaagtggaagagattgatatcgatgaagaaagtcttgcttatttaggcgagatcggacagcagacatctttgagacatgctattcagttgctatcacctgccagcgtggtcgcaaagaccaacgggagagaaaagatgtgcaaggctgacctcgaggaagtcagcgggctctatttggatgccaaatcctcggctcgcctgctccaggagcaacaagaaagatacatcacctagatttgcatctcctgctgtggggaaggaaaagcctcgaagagaatgcattctgcaaagtgcgtcgatctgcttcagtatgtcgtagtctacaagtcttggagagagcacgtttctgcgggggaggaaaactgtttgaattttgtagtgcctgttttttgttagcctccagcgaagacttgattccggcatattgcttgttcacgcacagttaacaccgattaagattggcccgtccgtgcaggaattgccgggtgtgttttcacccctcgctaatcgatgtccagaatctgtgtgcccacgggtgttgtattgaccctagctttgtaaccatgcacatgatttcttttttaacgctgatgaatggcacctggatctctgtccatggccatcgtaatcccactgtctggagcagggtttcatg

SEQ ID NO: 785 - DNA, 1075 bp, Zea mays
  Clone ID: 700093121_FLI
gctcgtccgcgttcagctcagctactccaatttcgcaacaagttgcaagcaataaccgaccaaggacgacgaacgggtcgatggccacgctctcctcctgcagccgcctgagtagcggcaccggcgccgcggccatccaccggcagccggcccgtgctggagccgtcctcgtcgtcacctgcaggcggagctcctccgcgaccgtccgcgccgcagccgctgccacggcggcggcgccggctgccgtagagctgcagaacaagggggtgtcgctgccgacgtgggcggagttcgagctcgggcgggcgccggtctactggaagaccagcagcggcctcccgccctcgccgggcgaggggctgaccctgttctacaacccggcggcgacgaagatggccccgaacgaggtgttcggcgtggcgttcaacggcggcttcaaccagcccatcatgtgcggcggggagccgaggcagatgacgctgcaggagcggggcaaagccgacccgcccatctacaccatcaggatacgcgtgccgcagcacgccgtaagcttgatcttctccttcaccaacggggccgagtgggacgggccgtacacgctcaagttcagggtccccaagccatggcagaacaagccgctgagcttcttcaacgagggcctggcggacgagctcaacagggagggcgcctgcgacctggccatctacccggacgagaacatcgccatcaccagctgcgccatggacggctacctcgaggaggggggggatcggtgcaagctggacattgtgagcggatgcacggaccccagctccgacatgttcgacccgctagccaccgtcgacgacggctcctgccccctcgagtctgattccgaggaatgatggtggagcttcatctcaatccgagggagggaggcagcagcagcaaacgtgatccacacatacatcatatacagatgtctgtcaagtttgtcatcatgtgatacatgaagcatacctgtatttagccagaataccacagtaaaaacgcattaatgagcaagatggtctggatacttggtatccatctttgc

SEQ ID NO: 786 - DNA, 1099 bp, Zea mays
  Clone ID: 700093324_FLI
ctaccaagcaggcaagcaccagcccgccacccgcccaccccaccactccaccgggcaggcatccagcgacggaccgggcaggcagagaaaagcagaccagacgagacgtcgtgcgtcgcgtcctccctgccgttccccttcttcagttctcccgctgctgctgccgccgccgctctccgtccgcgtccagatcccgccaccccaaccgatctgccggcctccagcatggcggcgggggcgggggcgagggcgaaggcagcgggagccctggcgctggcgctcgtgctcgcgctagcgggggccaactccgagggcgacgcgctctcggcgctgcgccgcagcctcagggaccccggcggcgtgctgcagagctgggaccccacgctcgtcaacccctgcacctggttccacgtcacctgcgaccgcgacaaccgcgtcacccgcctagatcttggtaatttgaacttatctggtcatctggtgcctgagcttgggaaattggagcatctgcagtacctggaactttacaagaacagcattcaaggaacaatcccttctgagcttggtaatttgaagaatctaataagcttggacttgtacaagaacaacatttcggggacaatacctccttcccttggaaagttgaaatcccttgtattcctgcggctcaatggcaatcatttgactgggccgatcccaagggaactttctggaatatctagtctcaaagttgtcgatgtttcaagcaatgatttatgtgggacgattcccacatctggaccatttgagcacattcctctgagcaactttgagaagaacccacgcttggaaggtccagagctacaaggcctggccatatatgacaccaactgctagaaggggcaccacgaacaaaagaatcgctagaaagtaatgggcgaacaaggttaccatatattaggtctggttctgctgccactctgtaatcccccctgcatagctcttatttgtaacttgctgtctgcacgaaagttggtggatgttttagcagaatgctttctgcccgtgaaagtaaacttgaaactgcttattatgagtgaaatgatgatgttatttccct

SEQ ID NO: 787 - DNA, 1800 bp, Zea mays
  Clone ID: 700093329_FLI
cgacaatggcactccaggcagcctacgagtacctgcagcaggccgtcggccatggcgcgtggtcgtccacgcagacgctgacgctgctgctcatcgccgtacccaccgtactactgctgctagcgtccctcgccaagagcacgtcgtcgtccggtaggggcaagccgccgctccctccctcgccgccgggcaccctccccatcgtggggcacctacaccacatcgggccccagacccacatctcgctccaggagctggtggccaagtacgggcacaacgggttcctgttcctccgcgccggcgccgtgcccaccctgatcgtgtcgtcgcccagcgccgccgaggccgtgatgcgcacccacgaccacatcttcgcgtcccggccgtggtccatggcctcccacatcctccgctacaacacctgcgacgtggccttctcgccgctcggcgaatactggcagcagaccaggaagctgatgaacacgcacctgctcagcaacaagaaggtctactccttccgccatggccgcgaggaagaggtgtgcctcgtcgtggacaacctccgcgaggcggccgccaagtcgccgtcgacggccgtggacatgagcgaggtgctggcggcgtacaccaacgacgtggtgagccggtcggtgctgggctcgacgcaccggaagaaaggccggaacacgctgttcagggagatgaccatgaccaacgtggacctcctggtggggttcaacctggagtactacatcccgcggtggccgctgacggacctgctcttcaggctcgtgtgctggaaggtcacgcgccacctcaagcgctgggacgccctgctggaggaggtgatccacgagcacgtggagatgaggaagctgtccggcgacaaggagaaggagtcggacgacttcatcgacatcttcctctccagatacgaggagtacggcttcaccatggataacgtcaagtccctcctcatgaacgtgttcgaggcagccatcgagacctcatatctggtgctggagtccgccatggccgagctcatgaaccacaggcgcgtcatgaagaagctgcaagcggaggtacgggcgtacggagcggagaagaagctggacatgatcagggaggacgacctgagcagcctgccgtacctaaaggcgtccatgaaggaagcgctgcggctgcacccaccggggcccctgctgctgccgcactactccaccgccgactgccagatcgacgggtaccacatccccgccaacacgcgcgtcctcgtgaacggctgggccatcggcagagacccggcggtctgggagaagcccgaggagttcatgccggagaggttcatgcgggacggctgggacaagtccaacagctacagcggccaggacttcaggtacctgccgttcgggtctgggcgccggatctgccccggggccaacttcgcgctcgcgaccatggagatcatgctcgccaacctcatgtaccatttcgactgggaggtccccaatgagaaggaagacggtggcgggaaggtgagcatggacgagacgttcgggctgatgcttcgcaggaacgagccgctctaccttgttcctagggccgtctagctagctagttactgtgccgccgccgcctcctatccaagaatgcatgagtcttagacgtgtggcagtaataattgcgtggggtgtagtaaaataataagcacgtttgttgagttgtaatggattcacattatgtgcattcgagacaggtccaaggaattgtatctctaaagtgaaaatttcctttttcacc

SEQ ID NO: 788 - DNA, 1240 bp, Zea mays
  Clone ID: 700093371_FLI
gcggcagctttccctctgtcacgctcacacgcctgcaggccggccagctccattgccaaccatcgtcgagcttgcagctcgctggtcgcatcgtcccgtccaacgccacctatggcccgccgctcctcctgcccggcaccggcacgcgctgcttatttttgttgttgttactgcagctgcagcaggagcagacgcgcagcatccgccgtcgccggggttctacccgagcaagcgttaccgcgcgcgtcccttctcccgcgacttccgcaccctgtggggggcgcagcaccagtcggtgtccggcggcggcggcggcgtgaccatctggctggactcgacgtccgggagcgggttcaagtcgcggcgggcgttccggtcgggctacttcggcgcgtcggtgaagctgcaggccgggtacacggccggtgtcatcacggccttctacctgtcgaacgcggacgcgcacccgggattccacgacgaggtggacatggagttcctgggcaccacgccggggcagccgtacacgctgcagaccaacgtgtacgtcctcggctccggcgacggcgggcctggcagggtcgtcgggcgggaggtcaagttccgcctggactggttcgacccacaccgccgacttccaccaactacgccatcctctggagccccacgcacatcatcttctacgtggacgacgtgccgatccggcggtacccgcggcggagcgagacgttcccgcggcggccgatgtgggtgtacggctccatctgggacgcctcctcctgggccaccgacgacggcaggtacaaggccgactaccgctacagccccttcgtagcgcgcttctcgggctgctcctccgcgcctgctcgccgcgcgcgccgccaaggtgccgcgcgccaagcggcggcccgaccggcggcggcggcggcgatgcgcttagcccgcagcaggaggccgccatgcggtgggtgcagcgcaaccacatggtctacaactactgcctcgaccccaagcgagaccacagcctcaccccagagtgcattattcaccacgcagcagctggcgatacctactagctagctaattacataattagatatatacatattcatcagcttatgtatgtgtctacgtaccatatgtcctatcgctatatatctctagttttgttgtaatattaaagagatgacatttgcttcagcagattctgagaaacacatgcatctgtatcccattattt

SEQ ID NO: 789 - DNA, 1016 bp, Zea mays
  Clone ID: 700093406_FLI
accatacccaaactgccatgcatgagaatagatagacagaaagaacaggaaccaaccaacacaagacacaacaagctgcagcagcggcaggcatggggcaccgcgccactgacaccgggccccaccaccattaccacccgacgcacactttatttagcccacgtcactcgcagcccgcaccggacacgtccacgcgacagtcactgctagctacgtaccgggctacgtacgagacacacacacacacagagagagacgccagtaataaccgtagcgtactgaacagcaaaatcccgtgtcatactgccatgtacgcgcgcgagcgactaccccgccacgcgcgcacgccgatcccctgggccctggccgccgccgctgcgtgcgcacggcctcactcgctggccttctcgggctcctcaggagcagcaacctcctccgcctcggcggccggctcctggggaccagcaggagcaggagcctccggctcgtccgcggcgagctcctcgggagcagcagcctctgcctcggcgaccggctcggccgcggcgggctcctcggcaccagcaggaggagcagcagcagcctcctcctcggcggctgcctcctgctcggccgcgggagtctcctcgggaccagcaggagcagcagcctcagcctcggcggccggatcggccgccgcgggctcctcggcaccagcaggagcagcggcctcgggctcggcggctgcctgctgctcggccgcgggaagctcctcgggatcagcaggagcagcagcctcagcctcggcctcggcctcggcctcggcgggggcagactcctcgggcacgacggccggcggcggggtctccaccacgggcgcttcctcggccgccacgacggtcggggtctggacctcggcagtggccattggtggcgatgagaaggctgatggctacacgaaggagtggcgcggctagctagagcctagagctaagagcctaagactgagtgaagggtggagctgcaagagtgagcga

SEQ ID NO: 790 - DNA, 280 bp, Zea mays
  Clone ID: 700093477_FLI
acccagtagagagagatatttctgcctccctatcgtgggtcgtccccaatggcctttggtcgcagaccatctttgctgcttgtctatgctgagaataaatgtgaacggtgcccctggacgctggatccatgctggttttggacacgttgtctttttgtgtttaacttatctgctaccgtcctgtaacgaattcactaagttctagttcttttgtgctttgttaagaatataaacaatgaggtttcaattttggtggcgccatccggtctgattgcgtact

SEQ ID NO: 791 - DNA, 2481 bp, Zea mays
  Clone ID: 700093518_FLI
ctccgcctgcggcctctgtatcccgcaaccaaaaactacccccaaaaaaagaagaaaaccccaaatcctcgagatctatcagtatcgagcgacttaccaatccgattgctagggtttagtttcgaaaaaatctgaaaaaaaattctggtcgaggggaggaggcgatgtcggcgcaagtggcggtggtgcctaatgggggcccgggcgctgtccccgcggtggtgtcgccgggagctgtcggcgtggctcagcctctcccgaccacgtcgctctacgtgggcgacctggagggggccgtctcggactcgcagctgtacgaactcttcagccaggcggggcaggtggtgtcggtgcgcgtctgcagggatgtcacctcgcgccgctcgctcggatacgcctacgtcaactacagcaatcccttggatgctgcgagagcattggaagtgctgaactttgctgctcttaacaacaagcctatccgggtgatgtattcaaaccgtgatccaagcagccgcaggagtggatctgctaacattttcataaaaaatcttgacaagacaatagacaataaaacccttcatgagaccttttcttcatttggtaccattctctcgtgtaaggtagctgtggatgaagcaggccaatccaaaggctttggttttgttcagtatgacaaagaagaagctgcgcagaacgctataaaaagtcttaacgggatgcttataaatgataagcctgtttttgttggaccttttgttcgcaagcaagaaagagatcattcttttgacaagacaaaatttaacaatgtctttgtgaaaaatttgtctgagtctaccacaaaggaagatttactcaaaatctttggtgaatatggggatattacaagtgctgttgtgatgattggtatggatggtaaatcaaggtgttttggtttcatcaattttgagaatccagatgcagcttcccatgctgttcaggaacttaatggtaagaagataaatgacaaagagtggtatgttggaagagctcagaagaagtcagaaagagagatggaactaaaaaggagatttgagcaaagcttgaaagatgctgctgacaaatatcaaggactgaacttatacctcaagaacttggatgatagcattggagatgatcaactttgtgaattgttctctaactttggcaaaattacttcgtacaaggtgatgcgtgaccaaaatggtcttagcaaaggctctggatttgttgctttctcaactcgtgaggaagcatctcaggctttaactgaaatgaatggcaaaatgatatctggaaaaccattgtatgttgcatttgcacagcgcaaagaagatagaaaagcgatgttgcaggcacagttttctcagatgcgccctgctgtaccaatgacacccactctagccccacgccttccaatgtactctccgatggctcctcagcaactcttctatggacaagcgccaccagctatgatgccccctcagccaggatttgctttccagcaacagcttgttccaggcatgaggcctgggggtcctcatatgccaaactattatgttccggttgtccaacagggccaacagggtccacgcccaggtattaggcgtggagctggagcccagggccagcaacctgtgccaccatttcagcagcagattcttccgcgaggacggatgtaccgttacccaactggtcgcaacatgcctgaagctccagcgatgccaggggttgctggaggtatgattcaggcatatgatatgggaggcttccctgtgagagatgctgccttatcaccggccgctcaaattgggactctgacttctgcccttgcaaatgctaatcctgagcagcaaagaacgatacttggtgaaaacctatacccactggttgagcaactggaaccaaaccaagctgcaaaggtcactggaatgcttttggagatggatcagaccgaggtcctccacctgctcgagtcccctgatgctctcaagtccaaggttgctgaggcgatggatgttctccgcaatgtggcccaccagcaaaacccaaacctcccgaccagtcagcttgccgcattatcactgaccgaaggcattatgtcctaacttgaaggccataacaaactatcttcagtttccaactcagtgcgggtgtttccagaggttgtctggcacatgacagtattgttccttcgatactatggttggacttgtgaatgttgtttccatactggatgttaggttttatatgcgccctacggtgacctgccgttaaggcaaagaacttatttgcaagtctgagcactattttggggggtggggtggggggtgcgttgtttttataactgtcttttttcccctagttggaagttttcttactcaattgaatgaacgagggaacttattgcatactatcaaatgttttgtgatatggtgttgagtaattatcaacaccttggatttt

SEQ ID NO: 792 - DNA, 1166 bp, Zea mays
  Clone ID: 700093523_FLI
ctgtaattcagatgccagaaggagaaatagaagagttgccatatgcacttaagaaagtagaacctggagaccggttggaggtcagccaggagaacggtacagagttatccgaaaaggcttctttctataaaggagtattctacaactaccttagcattgggatggatgctcaggttgcatatggcttccatcatcttcgtgatgaaaagccatatcttgcacaaggaccagttgcaaataagttgatttatgctggatatagctgcactcaggggtggttttgtacaccttgcacagcgagtccacagctaagggggcttaagaacattttgcgactttccattaaaaaggccaattgttcagagtgggagcaagtgaaaatgccttcaagcgttagatccctagttgtgttaaatttatacaattatggcagtggaaggcatccatggggtgatctaagacctgagtatctcgaaaagaaaggctttgttgaagcccattcagatgatggcttgcttgaaatatttggtctgaaggaaggttggcatgcttcatttgtcatggccgagcttatcaaagcaaagcacattgcccaggctgcggctatcaagttcgaaatgaggggtggcgagtggaaccgagcatatgttcagatggacggagagccgtggaaacaaccgctcctacaggagcactcaaccatcgtggaaataaacaaagttccgtaccattctctcatgataaacggggagtaatgagatttttcctctgtcaaccagattgtaccagggctgcattcatagatcgttaggatcgtgtacagttcaggagcagcgggcactagatccttagaactgggtcggacggactgcagcgaggatggcatgcatgttcgttttggccttttgtcgtgctatggtcgaagccatggccggagcgtggtgtggcaccatgcattgttgtattcgtaccataatatgtgcgttgttgtatcctaagttctttttgaaggaaacatgatttatttgtttgtattgtaacgttgtgtcattgcaaaagaataacctggtgtaaaactgtaaaatgggacagtctgccgtttgcacagccctgtagcattttttttttgttcttgttaactttttttttgatgaaagtattaactg

SEQ ID NO: 793 - DNA, 1817 bp, Zea mays
  Clone ID: 700093540_FLI
aaaggcggcagcacagcgccacccctcctgtcccgccgagttcggagcgcagcgcaaggcggggggaggagcaagaagccgccggcctccctcctccggctcaccaccaggcttactccgcaccgcgctgccacgggtaggagcggcgtcaaattcgggattcccaagcggcttcagcccggaggttcagccaaagctattttctaagaaaaatggcggcaatgatggtggcgatgactgcgaggagcaagaacagcatattacccgtggagaagaagcagggctggtctattcagctaccagagctccggttcccttgggattcacatgaagacaagggtttctctctgagtctgcaaggatctggaccttctcatggcggcctgtttgctagcgtgggtcttaaagtgtcgacaggtgccccagcagtggcgcccggaccgggtgacaaggatattaagattccattcactgatcattgtatgaagtacgtgcctgaggcagttgggtaccaggttattagcactgaagcggagccagtggaggaggtggtggatgctaaggcaaagaaggcagccaagaaacgtgggctgcagctgaaaattaagattgggaacccacatttgaggaggctggttagtggagctattgcaggtgctgtttccaggacttgtgtggcaccactggagacgatcaggactcacttgatggttgggagcaacggtgactccatgacagaggtgttccagtcaatcatgaacactgaggggtggactgggcttttccgtgggaatcttgtcaatgttatccgagttgcgccaagcaaagcaattgagctttttgcttttgatactgccaagaaattcttgactccaaaggctgatgagtctccaaagaccttcctacctccatcacttattgctggagcacttgcaggagtcagctcaaccctgtgcacatatcctttggagttgattaagaccagattgacgatagagaaagatgtctataacaacttcctccatgctttcgtcaagattttacgagaagaaggtccatcagagctctaccgtggtctgacaccaagtctgataggagtggtgccatatgccgcgactaattactacgcctatgacaccctaaagaagctctataggaagacgttcaagcaggaggagatcagcaacatcgcaactctcctaattggttcagctgctggcgccatctctagcactgcaacattccctcttgaggtggcccgcaagcaaatgcaggtaggagcagtaggagggaggcaggtctacaagaatgtgttccatgcgctctactgcataatggagaaggaaggggttggcggcctgtacaaggggctcggaccgagctgcatcaagttgatgcctgcagcaggcatctcgttcatgtgctacgaggcctgtaagaagatcctggtcgaagacaatgaggatagtgagtgaagctgaagcatgtatgcccctgaggaggggtatgactgatgtgccaggctagaagaggtttgggttgggttggggagtataccctagtattatcaactgatgaaaatgtagatccaagatatttgaacgccctttagatcataatttggttcagttttgtgttgaaatccataaacaatacacttacttgatggtgcatgttgcggggggcaattttgtcatgtggccatgtctgggtctgtcgaagggctcgtaacttctgtcgctacctttgttaaaactcattttgtaacctattcgatcagtcctgaaaccagtgacgaaagcatttagattttgtgc

SEQ ID NO: 794 - DNA, 2178 bp, Zea mays
  Clone ID: 700093639_FLI
accaaatccaagcgcaagagggggcaaagccgcaaagggggaggcaccaggcaccggcagccattacttactggtcctcactcccacaccaaccaaccaacctcctctgcctgccgcttctcctgctgcgggcgggcactgctgcaagtactagaggaggacattcgcttccattactgcgcctgcggaggatcggaggaaccagtagcggaggcttcgattttcggcgggcgcaataaatttcccgcatggctcggagggccgcgtcctcgctcgtctcccgctgcctcctggcgagggcccctgccggcgcgccgcccgctgccccctctgcgccgcgcaggacagatgggatgcacaggctgttgccaggtgtccttcagaggttcagcactgcagcagcagtagaggagcccatcacgccgtcagtccatgtgaactacacaaagctcctcattaatgggaactttgttgattccgcatccggcaagaccttcccaactctggaccctcgtacaggggaggtgattgctcatgtggctgagggtgacgcagaggacattaaccgtgcagtagctgcggctcgcaaggcttttgatgaagggccatggccgaagatgactgcctatgagaggtcccgtatcctactgcggtttgctgatttgatagagaagcacaatgacgagcttgctgctttggagacatgggacaacgggaagccatatgagcaagcagcccagattgaagtacccatggtggcccgtcttatgcgttactatgctggttgggctgataagatccatgggctcattgtgccggctgatggcccacaccatgtacagatcttgcatgagccaattggtgttgcaggtcagatcatcccatggaactttcctcttctgatgtatgcctggaaagttggccctgctttggcatgtggaaatactctcgtgctcaagactgctgaacaaacccctctatcggctttgtatatctccaaattgttgcatgaggctggactacctgagggtgttgtgaatgtcgtttctggttttggccctactgctggtgctgctcttgctagtcacatggatgttgataagatcgcatttactggatctaccgatactggaaaaattattctcgagttggctgcaaagagcaaccttaagacagtgacactggagttaggaggcaagtcccctttcatcataatggacgatgctgatgttgaccatgctgttgagcttgcgcactttgccctgttctttaaccagggacaatgctgctgcgctggatctcgcacgtttgtacatgagcgtgtttatgatgagtttgtggagaaggccaaggctcgtgcattgaagcgcgtcgttggtgatccgttcaggaaaggtgttgaacagggcccgcagattgacgacgagcaattcaaaaagatcttgcgctacattaggtatggtgttgacggtggagctacccttgtgacgggtggtgataggttgggtgacaagggtttctacatccagccaacgattttctcagatgtccaggacggcatgaagattgctcaggaggagatatttgggcctgtgcagtcgatcctcaagttcaaagacctcaatgaggttatcaagagggcaaacgcgagccagtatggattggccgccggcgtgttcaccaacagcctggacacggccaacaccctgacgcgcgcgctcagggccgggaccgtctgggtgaactgcttcgacgtcttcgatgctgcgattccgtttggcgggtacaagatgagcggcatggggagggagaagggcgttgacagcctgaagaactacctgcaggtgaaggcggtcgtcaccccaatcaagaacgccgcgtggttgtagacgctgcaagtgtggccttgtgcacgagaaccacgtatattcatttcctggtcacatccccgaacaatgtgaagcgttaatcagatagatgacgatgaagaagaacaactataataagatttgccctagcctgggttctcagttatctctaataagccttatggttggtgcctatatattgtgcaatttggttgctccttttttttccttctttttgataagactgttctaggaacggatatgcagagttcattatgaaaatgcatttgttagtgtctttgatggttac

SEQ ID NO: 795 - DNA, 1769 bp, Zea mays
  Clone ID: 700093652_FLI
ggcacccgcctcgacgactacaagctcaagcagcgggcacgtgcgtcctcctccaagacggacaaggtgggtgcgccaaaggatagcagcccacccccaccgcctagccggatgcggtcttctacccgaactgacaagtctgggtccgccgctaagagcgcgctggacgagctgcgggcaaagcagcggatgcggcaacaagctccggaggcacgcaggatcacggacctactcccacatagtggctcatccattaggcgcagggctgggagcccaccaagtgatgggagcaacgatggcaataacagggggaggatgaatgaccatgggaggattgctggtgatggcagggatgatgaatttgatgaatcgccgagtaggcttgatccactcaagtttgatgatgtgaagagtattaccctcaggaggtcaaaactggtgaaatggttcatggagccattctttgatgatctaatttctggttgttttgtgcggctaggtattggtaagacaaagaatgggacccccagttacaggctgtgcatagtgaggaacgtggatgcaagcgatccagatcggaattacaaactggaaaactactcgacatgcaaatatctcaatgttgtgtgggatagtgaggctaatgctgctcggtggcagatgactcaggtatcggactccccacccaacgaagaagagttcaaggactggctgcaagcggcagagaagaatggtgcacgcataccgactcggcaggaagtcctggataagaaagaagccattcagaatgcctataactttgtgtattcagcagcaactgtacaacagatgctgcaagagaaatcagctgtgagacgacctatcaatattgctgctgagaaggatcggttgaggagtgaattggagatggctcttagccgtaggaacgaacatgaagctgagaggattcgtacgaagctgaaaaatctgcaaaacagggcacaaccagtgtcaaaagataataaggctgcaaagttggaggctatgaaccggaagaaccgcgctgataacttcaagaacgcttcagaactgaaacctgtaaatacatctttgaaggcaggagaagctggttatgaccctttctcgaggaggtggacaaggtcaagaaattattatgcatcgaagccaggaggaaataatgttgaagaaactgccaatgggtccagtagtaatgtagcgcctagcaatgaagatacaaagagcaaggctcaaactggtacagcagccacaacagcagctcaagtggcagcagctgatgccgggaagctcattgataccaatgcaccagtggatctgggaacagaatcaaatatgctgcatacatttgagcttcctatatcattgtctgctctgcaagaatttggtggagccaagggcctgtttgatggttacatggcaaggaggcagaagatagaagctacaatggggtacaaagtgcctgacaacgatggaaggaggcatgctttaaccctgagtgtgagtgattacaaaaggcgacggggtctcctctgaagtgtatctgtgattgtgctgggtgctcagcggattcaaatatctgcctggcttcagcgcctctgcattgctgtgacaattgtccagatcatctgcattttgccttatcttcctagaagtaacataaaacatgcgataaaacatgcggagtatacaatttctttcataaatattacctgatgtatgactgattatgttactgacatcatgtttatatc

SEQ ID NO: 796 - DNA, 2507 bp, Zea mays
  Clone ID: 700093672_FLI
ttaataatccagcgaacacactatactactgagcaaataaagccaccgatgtcatcactcctgttgcgagtgctgctcatccagcttgcagcagtggagtgcctctccgccgcgattccaggctgcccaacgcaatgtggaggcgtagagataccctatccattcggcgtcggcaccaactgctcccgcaaagggttccggatcaagtgcatcaacggcagcgcgggcgaggagattccagtgctgctacctactacgcgctaccagaacatccgggtgctgaacctgtccgtgtcgccgttgccggaggctcgagtgcttcttccggtggcatggcagtgcttcaacgccaccgggggcgtcactgggatctactcgggagatgtggacttcaacccagagggcgtataccgcatctccaacacacagaacgagctcttcgtcctcggctgcgacacctatgcgttcaccaaaggcgtgagggtgcacaacgttaacgcacgcttcccttacagatacttcacggggtgtatcaccgtcagtgtagacgagaaggacccgcgcgacggtgcctgcgcgggcctcggctgctgccgcgtcgacatcccgccaggcatcacggacaccagcatgaccttctcgtctacctggacgcgtgccaaccagaccttctgcccctgcgactacgccttcatcgtggagaagggcaactacaccttcaaggcgtccgaccttgtgtcgcacacacccgacaaccgtctgcctttggactggtggaccatgccactgcgtctcgactgggccatccgcgacaacaacggcgactccatgacttccatctcctgcgcccaggcacccaacgaacctgagtatggctgccgcagcaagcatagcgagtgcactaattcaaccaatggccctggctacttctgcaagtgtgcccatggctacgacggaaacccctatgtccagagtgatggtgaatgcacgaatatcaacgagtgccaagatccaaagtcacataattgttcaagtggcagcaaatgcattgacacagacggaggctattattgtcaatgcaatttcttccgaagagggcagcaatgtgatcccttaattcctatggctgccgttgcactgttaacaacatttgctgccgtcgtccttggatgtgtcgcaattgttttgcttcagactctaaacaacaggaaaagattcaacagaaatggaggtaaactactgaatgcccagggcataaccacctacaccaaaagggagctgaagaagataactaatggctacagcaaacgccttggaggagggcactttggcaatgtttacgagggcaccatcgtcgacggcagaaaggtcgccgtcaaatgtcctttgcggacaagggtgtcgtcgcaccgctgccattggaagaatttgattcgacctcgccgtgtaccgctaccgcaacagagggtggaggaagatgggtcgttcatgaacgagatcaggttccagttcgaagtcagtcgtcacaagaacttggtccagctcctgggatgctgcctagagaccgacattccgatcctagtcttcgagtttgtcgccaatggaagcctggaggacatacttcatagtgccaagaaaccatgtaccctctcgctgccggagcggctggacatcgccattggctccgcggaagctatcgcctacatgcactcccttgacaatcaaaagcgtgtccatggagacatcaagccttccaacatcctccttgacgatgacctcaatccaaaagtctctgactttggttcctccaagctcctggcaatccatagctactacgttagggcagtggctgcagatataggctacatggacccattatatatgaagaccgagcacttcacattggagtgcgatgtctacagcttcggcgtggtgcttctggagctcatcacgaggagaagggccagctggtatgaacaagatcagcaagggaacaagatcctccccatcgagttcgtcaagtgcttcaaggaccacggtagcggatgtgcgatgtatgatagcagacttgatttctcaggcgaggatactcaatctcgatgcaacaagcgttgcctcgacatgattggcatgttggccgtccgatgcctcaaggaagacaagagggagaggccaaccatggcagaggttgtcgaggagcttaagcgagtcaaggtactactgctgggtacacatatataaaataatggcctgcagctctcaagcgagttcgaagcacgcagatgaatggaagcgaagcaagcaacaagaatggtcggtcagcacatgtgaagcgctgaacatggcggcggtactgatacaagcaataataagggttcctcaactcaaataaatatacatgatttattcttccaataaaacagcaatgtctatctgtaaacatagtaattcgcatgaattgcttcgctttatacttcttaatttgatgtatgtccatacaaattaat

SEQ ID NO: 797 - DNA, 1648 bp, Zea mays
  Clone ID: 700093685_FLI
ggataaggttgtcaaatttgactttcatgggcagccagcagaaatcaagcatggtagtgttgttatagcagcaataactagctgcacaaacacctcaaatcctagtgttatgcttggtgctggtcttgtagctaagaaagcttgcgagttgggtcttgaggttaaaccatgggtgaagacaagccttgcccctggatcaggagttgtcacaaagtacttgcttcagagtggtcttcaagaatacctcaaccagcaaggattccatatcgttggctatggctgtaccacttgcattggaaactctggtgatctcgatgaatccgtatcaactgccattacagaaaatgatgttgttgctgctgctgttttgtcgggtaaccgtaacttcgagggtcgtgtgcaccctttaactcgggctaactatcttgcttcaccacctcttgttgttgcttatgcacttgccggaactgttgatattgattttgagaaagagcccattggatttggaaaggatggcaaggaagtctacttcagggatatatggccctcaacagaagaaattgcgcaggttgtccaatccagtgtgctgcctgacatgttcaagggcacctatgaggctatcacaaaaggcaacccaatgtggaaccagctaactgtcccagaagcgtcactctactcatgggattccaaatccacttacattcatgagcccccttactttaaggacatgaccatgtccccacctggcccctctacagtgaaagatgcctactgcttgctgaacttcggggacagcatcactacagatcacatttcacctgcaggaagcatacacaaagacagtcctgctgctaagtatttgatggagcgtggtgtggaccggaaggacttcaactcatatggtagccgtcgtggtaatgatgaagtaatggcaaggggaacgtttgcaaacattaggatcgtgaacaagtttttgaacggagaagttggacccaagaccattcatgttcctactggggagaagctttctgtttttgatgcggccatgagatacaaatctgagggccatgctactataatcctcgctggtgctgagtatggaagcggcagttctcgtgattgggctgctaagggtccgatgctcctgggagttaaagctgtaattgccaagagctttgagcgtatccacagaagcaacttggtggggatgggaatcattcctctgtgcttcaaagctggtgaggatgctgattcgcttggcctcactggacatgagcggtacagcatcgatctccctaccaacctcagtgagatccgtcccggccaggatgtgactgttactaccgacaatgggaaatctttcacttgcatcgttcgctttgacactgaggtggagctggcgtacttcaaccatggaggcatcctcccttatgtcatccgcaacttggcagctgcgcataactgaggcaagatcacacaccgtttgacccacaatggcagtggcaggctccatgttcccagggctagcgacctggttctcaatgtagtgacatttgtgatggatctaggggtctctttgtcgattcagcccataaataaagtgtgaaataaaagccgcaggtggaggcaggaacctgctgattgaggg

SEQ ID NO: 798 - DNA, 741 bp, Zea mays
  Clone ID: 700093709_FLI
gtcaacgacgacgtctgccggcagtgctcctgctcctcctcctcctccttcccggccgccgcgcgagcttggtgggttagtgtctcttcttcgcggagacctgtgagaggagccatcatcatggccgccgttgagactgttgtcctcaaggttgctatgtcatgcgagggttgcgcgggggcggtcagaagagtgctctccaagatggaaggagttgaaaccttcgacatagacctcaaggagcagaaggtgacagtcaaaggcaatgtcaagcctgaggacgtcttccagacggtttccaagtcggggaagaggacctcctactgggagggcgaagccacggccccggacgctgcggcggcttctggagccgaagcagctcccggcaccgcggcagaagcgcctcctgctgctgctccggcggcgccagagatcaccccagccaaagctgacgcctgatcgtcacgctattattcactcacatgtgatgctgcggctgcgactcctaaaccttaaatctagaaatagctggggattgggtttgcattgcatcgtgttcttgccggtctagcaagtgactataagaataatggaataaacgatgacccagtgtgtgtatgatttccgttctgaagaacaacacatcccttgcaggattgttgttcagtagattctacttgtaccgcggctttggagttccgcaaaggactttacttgttcaagaacttcttctctgacagg

SEQ ID NO: 799 - DNA, 1222 bp, Zea mays
  Clone ID: 700093725_FLI
attaagatcggaatcaacggcttcggaaggatcggcaggctcgtggccagggtcgccctccagagcgaggatgtcgagctcgtcgccgtcaacgaccccttcatcaccacggactacatgacctacatgttcaagtacgacaccgtccacggccactggaagcacagcgacatcacactcaaggactccaagacccttctcttcggtgacaagccggtcaccgtctttggcatcaggaaccctgaggaaatcccgtggggtgaggctggcgctgagtatgtcgtggagtccaccggcgtcttcactgacaaggacaaggctgctgcacatctcaagggtggtgccaagaaggttgttatctctgccccaagcaaagatgcacccatgtttgttgttggtgtcaatgaggacaagtacacctcggatgttaacattgtttccaatgctagctgcaccacaaactgccttgctccccttgctaaggtcattcatgacaacttcggcattgttgagggtttgatgacaactgttcatgccatcactgccacacagaaaactgttgacggaccctcagccaaggactggagaggtggcagggctgccagctttaacatcattcctagcagcaccggtgctgccaaggctgttggtaaagttcttcctgatctgaatggcaagctcactggtatgtccttccgtgttcctactgtggatgtctcggttgttgacctcaccgtcagaatcgagaagggggcctcctatgaggatatcaagaaagctattaaggctgcttccgagggtccactcaagggtatcatgggttatgtggaagaggatctggtttctaccgacttccttggtgacagcaggtcgagcatcttcgacgccaaggccgggatcgctctgaacgaccacttcgtcaagctcgtctcgtggtacgacaacgagtggggctacagcaaccgcgtcgtcgacctgatccgccacatgttcaagacccagtaggggtttttcccccctgcttctcatggatggttgctgcttgtgtatgccgagaataaatgtggatggcgcgtgcctctgggtcgccaggttcatgctgagtctggacatgttttgcacttttgtttcccttcctgctaccatctgtgacagatccgctcgctaatatgggacctgagattagctttttgctgcttgtggtgaggttgcagttttgttc

SEQ ID NO: 800 - DNA, 1314 bp, Zea mays
  Clone ID: 700093733_FLI
tggattcattagagaactgcgtggaaaaaccagctggattcaaatgtgaatgtcctagttgtgacgaggcacgtgatctaaacgaacaaagacggcatgaaaattggcaaatcaaggtctgcaaaagaatatctgctgagacaaattttcctaacgaggagatcattaaattgtatctaagcgataacaatctggttgaaggtaacaaaaagaagtatggtccaacacattagagaacaacattatgcttatttaagtgcttattgagttgtagtttttttctttggtcaaggttccaaattagcatttgtttatagtaaaaatctaaatttttaacctgtttgcagaaaagggtgttcccttgcttagttggagtaagcctgatgttgaagctttggttgacttattaagttataagcagaattgggagccatcttatattcgtcaaaggatgcttcctatgttatcaaccatatatttaagagaggtggcatcttcttcgtctacaccattgcttctttgtgatcagtatgagtttgattcaattgagcggactaaaataaggcacggtcacccttattacttggtgaaatggaagagagctacccgtggtatgaattctaatatgtctagcaagaagccagtaacggagggagagacaagtagcgaggtagttgtgttggatgacgatgacaatgaggatacagtggtttgcgagtctccagagttattagatgaacctgatgttccacaagtgcttatggatgatggctgttgctttctattgacggatgaagacattcaacttgttggtgctgcttttcctaaggaaacagcaaggtttcaggaagaacagaggctgaaagaagcaagatcaagatcgcggaaatccaaaacgagcttagcagacagtgggtgcgagacacctaaaggtccgagacctagtggggtgcagcttagcatcacagagttctaccgctcgaagaaaggggggcaggacatggaatctgggaagaagaagccggcgggagaggggcacgctgctgcgagggatggctcgagaaaatcctctgacagggacctcaacaacaagagcctgccgaagtccgttcgccgccgcctcctcttcgattgctgaggactagcctggccttcgggtgagcactgtaatcttgctgtgccactgttgtaaatgacctagagaacgccttaacctaatggccggtgtaggtatccgcggctcattttgtacagggaacagagcatcatctctgtcaagaggaaaaatggagcaggtcttagttcagaacgatt

SEQ ID NO: 801 - DNA, 317 bp, Zea mays
  Clone ID: 700093750_FLI
cgaccgcctcggcgccgagtcgttcgtcggcaacagctgcctctgcggtggcccgctcggcaagtgcacgtgacacccctagcccgcccatacgcgggcgggaagcatgtagacatattcgtgcggcttggttaacgaatactagtactataggtttggggccggtgggtatacatgacatgcatcatgatgatttcgcggtgctgcatgtgcctgtctttttctttctttctttttatttatcttcttttgtttactttttaaaaatgcttgtggtttgtccatgtgtctgaacgaatggaagcaaaaattaagct

SEQ ID NO: 802 - DNA, 2028 bp, Zea mays
  Clone ID: 700093782_FLI
agagtccggagctgagacggcgagctgcctagctccggtcctgctctatatctcagctcctccgttctgtggccccgacctgagctgccaaggatacgtacgtcttgaggctgccggtcgccctcttctctggtcgacctcgtgggggttatgcggaggagcaggtcgtgcttgtcctgcgtgcccatggggacggcggcgctgcccattgagaaccacttcgtcgctccggctgcgctaccgtcggtgcccgcctcagattcagaggacggaggatttggcaagggcagcatagaccttggaggcctagaggtgcgccaggtcaccacgtttgccaaggtctggtccaccacacagggcggccaagacggcctcggcgccaccttcttcaagccctcgccggtgcccgccggcttctccgtgctcggccactacgcgcagcccaacaaccggcctctcttcggccacgtcctcgtcggccgggacacgtctggcgccggcggtgcgctcctcgccgcgccagtggactacgccctcgtctggtctagtccggacggcgccggccacttctggctccccacggcgcccgagggctacaaggccgtcggcgtggtggtcacggccgcggcggacaagccttcacccgacgaggtccggtgcgtccgcgccgacttcaccgacgcgtgcgagaccgaggagtcggtgtggagcagcgacaaggacggcttcagcgcgtccaccctgaggccggcggtccgcggcatcgaagctcgcggcgtgcacgctggcacgttcctcgcccagagcagcgcgacgccggcggcggcggcgggcgtgtcaacgacgctggcgtgtctgaagaacaacagcgcgagctacacgtcctccatgcccgacctggcccagctgaactccctcctggcggcctacgcgccgcacgtgtacctgcacccgaacgagccctacttcccgtcgtcggtggcgtggttcttcgagaacggcgcgctgatgtaccagaagggcagcagccagaccccgacgccggtgcccgccgacgggtcgaacctcccgcagggcggcggcaacgacggcgggtactggctcgacctgccggcggacgggaaccagcgggagaaggtcaagaggggagacctcgccggcgcgaaggtgtacgtgcaggcgaagccgatgctcggcgggacggtggccgacctcgcggtgtggatcttctacccgttcaacgggccggcgcgcgccaaggtcggcctcatcccgtcgatcccgctcggcgagatcggcgagcacgtcggcgactgggagcacgtgacgctgcgcgtcagcaacttctccggcgagctcctccggatgtacttctcgcagcacagcgcgggcacctgggtggacgcgtcgcggctggagtacctcgacggcggggacggcggcgggagcaggccggtggcatacgcgtcgctgcacgggcacgcgttctacccgaacgcggggacggtgctgcaggggaactcgggcctgggcatcgggatccggaacgactgcgccagagggagcaggctggacaccggcgcggggcggtgcgaggtggtgtcggcggagtacctcggcgtcaaggagccggcgtggctcgggttcgagcgcgagtggggcccccgggatgagtacgacatcgggcgcgagatcaaccgcgccgctaggctcttgccacgttcggtgagggagcggctagccaagctggtggagaaggtgctcgtcggggagggcccgacggggcccaagatgcatggtaactggagaaacgacgagagggaagcctgataaaggcttcgtatccttaactgtacgattcgtgaggtatatacggatcagacggtttgcgattgaaaggatagcgtgctcattagaggagctaaaaggattggttgtgtcattgtgtgtgtgcgtgcctgcgtggcagtgtatttccatctcagctgtatgtaggcaacgactgctatgcaagcagtccttctgtgc

SEQ ID NO: 803 - DNA, 1128 bp, Zea mays
  Clone ID: 700093789_FLI
ctcccacccggtttagccggctccgctgccaccgccgcgactccacctctgtcgccaccatggtcaagtccaaggccatcagggtccacgagctgggcggccccgaggtgctgcggtgggaggaggtggaggtcggggagcccggtgaaggggagatccgcatcaggaccaccgccgtcggcgtcaacttcatcgacatctactttcggaagggggtctacgccgcgcccaccatgcccttcaccccaggaatggaagccgttggcgtcgtcaccgctgttgggcctggcctcactggcaggaaggtgggcgatgttgttgcatatgccggcaaccccatgggctcctatgctcaggagcagatccttccagcggctgtcgctgttcctgttccaccttccgttgatcataagcaagcagcttctgtgatgctcaagggcatgaccgcccatgttctgcttcgccgggtattcaaggttgagagtggccatactatcctggtccatgctgctgctggtggtgtcggctcactcctttgtcaatgggcaaacgcccttggtgccactgtcatcgggactgtttccaatcaagaaaaagccgctcaggcagctcaggatggatgccaccatcccataatttacactagcgaggatgtcgtcgcaagagtcaaggatattacatcaggaaaaggtgtcaatgtcgtctatgattctgttggaaaggatacatacaaggcttccctggagtgcttggcgtcccgcggcttcctggtgtcgtttgggcagtcgtcaggcaaacctgacccaatcccaacgagcgacctggcttccaagtccttgttcctcactcgtcctagcctcatgcattacactgctacccgtgatgagctgctggagtcagccggcgaggtgtttgccaatgtcgctaacggggtgctgcacgtccgggtgaaccacacgtatccattgtcggaagctgcccaggcccatgcagatctggagggcaggaagacatcagggtccatagtgctcatcccgggatagactcaagggcatgtgaatgaataaatggggtgatctggttatgggaacggcgtaataataattatatctatgctgtttatgcggt

SEQ ID NO: 804 - DNA, 1301 bp, Zea mays
  Clone ID: 700093807_FLI
gaagaggatgctccaggcgatccagcatttcaccaagctcacgtacctggacctcgaggacaccggcattcaggacgccttccccatggagatctgctgtttggtcagcttgaagcacctcaacctatccaagaacaagatcctgtcgctgccgatggagctgggcaacctgagccagctcgagtacttctacctgcgcgacaactactacatccagatcaccataccaccggggctgatctcgcggcttgggaagctgcaggtgctggaggttttcaccgcgagcatcgtctccgtcgcggacaactacgtcgcgccagtcattgacgacctcgagagcagcggcgcgcgcatggcgtcgctcggcatctggctcgacaccacccgcgacgtggagcgcctcgcgcggctagcgccgggcgtgcgcgcccggtcgctgcacctgcgcaagttagaagggacgcgcgccctgccgctgctgtccgcggagcacgcgccggagcttgccggcgtgcaggagagcctgcgggagctggtggtctactcctccgacgtcgacgagatcacggccgacgcgcacgtgcccatgctggaggttatcaagtttgggttccttacgaagctgcgcgtcatggcgtggtcccacgccgccgggtccaacctccgcgaggtcgccatgggcgcgtgccacagtctaactcacctgacgtgggtgcagaacctcccctgcctagaatcgctgaacctcagcgggtgcaacgggctgacgagactgctgggtggcgcggaggacagcggcagcgccacggaggaggtgatcgtgttcccgcgtctgaagctgctggccctgctggggctgccgaagctggaggccgtgcgagtcgagggagagtgcgcgttcccggagctgcggcgcctgcagacgagggggtgcccgcggctgaagaggattcctatgcgcccggcgcgcgggcagcaaggtaccgtgcggatcgagtgcgacaagcactggtggaacgctctacagtgggcgggcgaggacgtcaaggcctgcttcgtccctgtgctgtgagtcatttcactaggcggacggagctgcaattttggcgccagttgatatgttcgacgaccacggtccacgggttgcaccacggttcaaggcaagatgagcgatgagattggaaatatctctcgaacagcgaaaaggcggtttgttttggatttcttctaagaacaattcaaattttggcttaattcccgttatgttgagaactggtgacctagttaaaggcgcttttgtc

SEQ ID NO: 805 - DNA, 1353 bp, Zea mays
  Clone ID: 700093810_FLI
caacccagctcgctcgtcccagctgatcaggtcgagcacctagtagcgacctgctcgatcatcagtgtagagtgtcggtaggtgtctgtctctcttggtggctggttgcaacggtcatggcgacgtcgtctcgtcgggtgcccttgctgctgctgtgcctgggcgtgctggtgtcctgctccttcgcggcgggcagcttggaccaggagctggacatcacgtggggcgacgggcggggcaaggtccttgacaacgggcggctgctgacgctgtcgctggaccgcacgtccggctccgggttccagtcccggcacgagtacctgttcggcaagatcgacatgcagctgcggctggtgccgggcaactccgccggcaccgtcaccgcctactacctgtcgtcgcagggcggcgcgcacgacgagatcgacttcgagttcctgggcaacgtgtccggcgagccctacacgctgcacaccaacgtgttcacgcgggggcaggggcagcgggagcagcagttccgcctctggttcgaccccaccgccgacttccacacctactccatcctctggaaccccaagcacgtcatcttcatggtggacgacatgcccatcagggacttccgcaacctggagagcaagggggtggcgttccccaagagccagccgatgcggctctactccagcctgtggaacgcggacgactgggcgacgcagggcgggcgcgtcaagacggactggtcccacgcccccttctccgcctcctaccgcgggttcaaggccgacgcttgcgtcgccgtcgcgggcggccggacccgctgcggcgccaccgtcggcaccgagggcaccggcgcccccgcctccgccgccggcgccggggactggtacaaccaggagctggacctcaccctgcagcagcggatgcgctgggtgcagcgcaagtacatgatctacaactactgcaccgaccccaagcgctaccagcagggcctccccgccgagtgctccatgcagtagcgcccggttattcctcgcccgtccaacaatggcgcgcgcgcgcgtgtgtgtgcatgtggtccgctctactctaccgctacgacgatcggtgtcgatcaccggatcaaggcaagacgaaaggcatcgaaacatggtagataaataaaggacttgacgatttgtaacgcagtagctggtgcgtgcgtggtgtggtggtaagaaattcttctgctgcctgtgttcttgtagcctcctcgtcctcgcccaccctgttggtacgtgtacggtgtacgtagtctgccgccgcgcgctgttcgtgttcgtcgtgtctcgtgtctgtattatactcgtcctccccatc

SEQ ID NO: 806 - DNA, 2960 bp, Zea mays
  Clone ID: 700095546_FLI
cttccttttctaccccgcgggccgcggcgcgtagtcttctactctctagctcgccatcaccgtcgtcatcaatcacggtgaccttgccctcgctgcccgactggaaccggacgctgctgctgctggtaggctgacagcgaggaggacgagacgagggggccatggctcagatcttgctccacggcacgctccacgccaccatcttcgaggccgagtcgctctccaacccgcaccgcgccactggcggcgcccccaagttcatccgcaagcttgtggaagggatcgaggacaccgtgggtgtcggcaagggcgccaccaagatatatgccaccgtcgatctcgagaaggccgtgtcgggcggacccggatgatctccaacgagcccgtgaaccctcgttggtacgagtccttccacatctactgcgcgcacatggccgccgacgtcatcttcaccgtcaagatcgacaaccccatcggggcctcgctcatcgggagggcctacttgcctgtccaggacctcctgggaggggaggagatcgacaagtggcttgaaatctgcgatgaaaagcgtgagcctgttggggacagcaagatccatgtgaagctccagtactttgacgtctgcaaggaccgtaactgggcgaggggtgtccggagcaccaagtaccctggtgtcccttacaccttcttctcgcagaggcaggggtgtaaggttactctgtaccaggacgctcatgtgccggacaactttgttcccaggatccagctcgctgatggcaagaactatgagccgcacaggtgctgggaggatatctttgatgctataagcaaggctcagcatttgatttacatcactggctggtccgtgtacacagagatcaccttggtcagggacaccaacaggccaaaacctggtggtgatgttactcttggggagttgctcaagaggaaggccagtgaaggtgtccgggtgcttatgctggtgtgggatgacaggacttctgtcggcctgcttaagaaggatggcttgatggctacccatgatgaggagactgcaaattacttccatggcacggatgtcaactgtgttctgtgccctcgcaaccctgatgattctggcagctttgtccaggatctgcagatatcaactatgttcacgcaccaccagaagatagtagtagtcgaccatgagatgccgaaccagggatcccagcaaaggaggatagtcagcttcattggtggcattgacctttgtgatggaagatatgatacccagtaccactccttgttcaggacgcttgacactgtccatcacgatgacttccaccagccgaactttgagggtggatcaatcaagaaaggtggcccaagggagccatggcatgatatccactcacggttggaagggccaatcgcttgggatgttctttacaactttgagcagagatggagaaagcagggtggtaaggacctccttgtgcgtctcagggatctttctgacattatcatccccccttctcctgtgatgttcccggaggacagagagacatggaatgttcagctcttcagatccatcgatggtggtgctgcttttggcttccccgagactcccgaggaagctgcaagagctgggcttgtgagtggaaaggatcaaatcatcgaccggagtatccaggatgcatacgtaaacgccatacggagggcgaagaacttcatctacattgagaatcagtacttccttggaagttcatacggctggaagcccgaaggcatcaagccggaagaaatcggtgctcttcacttgattccgaaggagctctcgctgaagattgtcagcaagattgaagctggggagcggtttactgtttatgttgtggtgccaatgtggcctgagggtgttccagaaagcgcttctgttcaggcaatccttgactggcaaaggagaacgatggagatgatgtacactgacatcgcacaagctctcgaagccaacgggattgaagcaaaccccaaggactatctcactttcttctgcttaggtaaccgtgaggtaaagcaggagggagaatatgaaccagaggagcacccagaacctgacactgattacatccgggctcaagaggctaggaggtttatgatctatgttcataccaaaatgatgatagtggacgacgagtacatcatcattgggtccgccaacatcaaccagaggtccatggacggtgccagggactccgagatcgccatgggcgcgtaccagccgtaccacttggcgactaggcagcctgcccggggccagatccatggcttccggatgtctctttggtacgagcacctgggaatgctggaagacgtcttccagcggcccgagagcgtagagtgtgtgcagaaggtgaacgaggtcgccgagaagtactgggacctgtactcgagcgacgacctggagcaggacctcccgggccacctcctcagctacccgatcggtgtcactgccgacggcagcgttaccgagctgcccgggatggagaacttccccgacacccgcgcccgcgtcctcgggaacaagtcggattacctcccgcccatcctcaccacatagagtgcacactgcaggcagcgccatggctgctctcctctctggcctcaccttggtgtccctgtgtttgtgtttgagacactggaggttcagaatgcagtgttgatattttaccccctccggccacatgatttagtcgttttggacggagggagtagacgttattgagtcataataaaatgcaatgtgcacggtgggagactgggaggataggaattatagttgtttattacgactgcttactgcatccagattgtgttgtcccttgtctggtgttgcttctgttgcttgctgcgttgcagtgccggaggtgactccagatttcagaacttaaacatgattgcttgttcaagtgtgtgctgct

SEQ ID NO: 807 - DNA, 1466 bp, Zea mays
  Clone ID: 700095552_FLI
ttgaagtagaaactaccgaaacgagtctagcaaacaaaccgcagcctgagcacccgaggagactccgtgcgaccgaagccagagccagcggaaccgaacggaagcgagacccccggcggctagcgagatggacggcggcgccggcgaggaggggaagcaggagcggcacctggtgctggcccacaagctcttccttctatcccacccctccgttgatgacctctccaaggtcgccctccgcgccgaagtcctcgacaccgtgaaatccgatgatatggcgacgctgtttgagtcgctggtcgccgggggtgtgctggagggggacgccgcgctgctggccgagatgcgtgggaggtttgacgaggagatccgcaagcttgatgagaaaattgctgatgcggaggagaacttgggtgagagcgaagtccgtgaagcacatcttgccaaatctttgtactttataagggtcggtgagaaggaaaaggccctggaacagcttaaagtcactgaaggaaaaactgtagctgttggccaaaagatggatcttgtgttccacactttgcagattggttttttctacatggattttgatctgatatcaaaatccatcgataaggcaaagaacttgtttgaggaaggaggcgattgggagaggaagaacagattgaaagtatatgaaggcttgtactgcatggcaaccagaaacttcaagaaagctgccagcttatttttagactcgatttcgactttcacaacttatgagatattcccatatgatacgttcatcttctatacagtcctcacaagtgtcatcacattggatcgtgtatctctgaaacaaaaggtggtagatgcaccagaaatcctggctgtaattggcaaagtacctcacctctccgagtttctcaactccctgtacaactgccagtataagtcgttcttcgttgcattttctggtctgacagagcaaatcaagttagaccgttatcttcagcctcatttccgctactacatgagggaagtgcgcaccgtggtatactcacagttcttagagtcatacaagagtgtgacaatggaagcaatggccactgcgttcggtgtaactgttgatttcattgaccaggaactgtcacggttcattgcagctgggaagctgcactgcaagattgataaggttgctggcgttctggagactaaccgacctgatgagaggaatgctttctaccaggcgaccatcaagcaaggggacttcttgctgaaccgcatccagaagctttcacgggtcattgacctgtaaggactgtttgtgttggagctattcctgcaatcggcgcctgcaaatgtttaccaccctacgtcttccacaagacatctctgcttgagtggggattggggaacaagccctaagaacatctgtgttttaagtgcagaatatttgtgttttaatcagtaaacgctgtcctgtc

SEQ ID NO: 808 - DNA, 781 bp, Zea mays
  Clone ID: 700095567_FLI
cacacagaaaaccctagccgccgccaccgaagcggcctcccaggtaagcaggagcgtccaccccgccgccgtcatgaagcgcaatccccgcgtcacgagctcccgccggaagtgccgcaaggcgcactttacggccccgtcctccgtccgccgcgttctcatgtccgccgggctgtcgacggagctccgccacaagtacaacgtgcgctccatcccgatccgcaaggacgacgaggtgcaggtcgtgcgcggcacctacaagggccgcgaggggaaggtggtgcaggtctaccgccgccgctgggtcatccacgtcgagcggatcacccgcgagaaggtgaacggctccaccgtgaacgtgggcatccacccctccaaggtgatcgtcactaagctgaagctcgacaaggaccgcaaggcgctcctggaccgcaaggcccggggccgcgccgccgacaaggctaagggcaagtttactgccgacgacgtcgctgccgccgccgctggtggcgccgccaccggcgcctctctccaggagatcgactaggctcttcacggtcatctgatggttgtcgtaccgccttttcctcatctctttagtttttgctaccaatgattatgtgatagaggttttatgttatttgaaaactgctctgtgcctggatgagagttctggaacataatgtgaacctgtgtgtctgtgacctgagctttgaagatctcattatgtggttaatgtctccttgtagtatcttctaaatggttgctgtgatttgtcttc

SEQ ID NO: 809 - DNA, 2481 bp, Zea mays
  Clone ID: 700095941_FLI
tccccgcttccatggcggttctctctgtccccgctgccccgtcgctgcagctccctttcccctccctcatcgatgtggaaaccgcacacaaactgcaggcgcgtcttcgttcttcctccgcatccggctactggctcacaccgcctgtcctctcctccgtcctctggctctggctcatggatgatgccaccaacacctctcctccgtcctccccagtggcggaactgaggcctggcctacccgggcacgacttcgacggccccgcccagattattgagtatatgatatgagatagaagcccttaaaatgagtaatgaagatgtggcacaaggattgggatccttcattggagcctgatatacttgtttataactcggtgttcagtgcacatgttctatcacagcagtggaaaggcgtattttgggtgttctagcaaacgagaattggtggtttaccatctacagctacaggagcaacatttgggttggacatggaagtaagcttcattttttgtaaacaagaaactacaaactggctaaaagctttatgctgcttgcgttgcagtcttgctggtttgtgctgttgctgcttgctggagagatactgcatccgttaaggaggatgacagagtgtggtgaagtgctgcctggaatacgcatgcattgtgtgtctaatgtaggcgtccacagagaggatcggtgcacggttctgctgatctctcccacgcacgcgcatggaagcagatctcaccccggtggcggcgcgctaccccaccggccctcggcgcgagcgggcacggcgcgggcgaggcacacggccctcccggcggggcggacgcggcccctggccacagcgacggtgacaagacaaatctaaccaacaaagttgttggagaggcagtccaggaagcccccggagaagttgcaactgtcacagcccatgcagcgcgcgggctcactgatggccaccagcgtccttccaagcatggtcggcaccaccatcgtcgtcctggtcccatctcgcggttgctggtcctgtgcgccgcccttagaacaagcaacccatctgctcttcgtgaaactgttgtcgaagtcccaaatgtctcttgggaggatattggtaggctggagaatgtcaagagggagctccaggagactgttcaatatcctgtggagcatccggagaagttcgagaagtttggtatgtctccatccaaaggagttttgttctatggtcatcctggttgcagtaagaccttgttggcaaaggcaattgccaacgagtgcgaggctaatttcatcagtgtcaagggttctgagttgcttaccatgtggtttggtgatagtgaagccaacgtccatgaaatttttgacaaggctcgtcaatctgctccttgtgtcctcttctttgatgagcttgacccaattgcttctcagagaggaagcagtttgggtgatgctggaggtgcaactgatagagtgcttaattagctactgacaaaaatggatggcatgaatgccaagaaaactgtgtttattattggagctacaaacaggcatgatatcattgaccccgctctgctgaggccagggcgtcttgaccagttgatctacattccactgtctcatgagcagtctaggctccagatcttcaaggcctgccttaggaagtcccctgtggcgaaggatgtggacttgaatgctcttgctgagtacacgcaagtgttcagttgagcagatatcacaaaaatttgccagcgtgcgtgcaaatatgcaatcagagagaacattgagaagggataatgacaatgaggatactcaagctcgtgaacactctgatgaggaaatggattctgacgaggaacatgagagggcaaagaaagatgtctcactgaactgagaaatgagcttaaaatattggagactgaacatgcagaatgtcttgtgaaggcgagatcaaataggcaaatcaagtctttcagatcttgcctgcatactaccagatgctggaggtactgtgtttcagattcactgcttggagctatcagcatatttatcagtgttctgagctctgcgctgtgacaagtccacctctcattggtcaatcttctatctgaactaaaaaatgaacttagaatctcacacattgagcataacaaagttcttatgaagatcattttaaatgagcatgtcaagtcattgagaatttaatttggtccatctctttccaccctgtagaatggttggttcccaaaaatcttcattgttcttctcagatacctttttcttcgtacgagaccccacaaactgcgtcgaccccgacccggccaccacgccgccataccctcaagtacttgcatttgtttcatagaaacaatctactgttcctcgcaagacagaagtttattttgtattgtaaggttaaccttcatttatttttttcaaatggtgaaattctggaatcaatagtatgtgtttgttt

SEQ ID NO: 810 - DNA, 1171 bp, Zea mays
  Clone ID: 700102511_FLI
ggtttcgtgtcgaacgatgtcgggcttgacgctgaccactgcaaggtgcttgtgaacattgagcagcagtcccctgatattgctcagggtgtgcacggccacttcaccaagcgccccgaggagattggagctggtgaccaggggcacatgtttgggtatgcgactgacgagacccctgagctgatgcccctcagccatgtccttgccaccaagcttggtgctcgtctcacggaggttcgcaagaatggaacctgcccctggctcaggcccgatgggaagacccaggtgacagtggagtaccgcaacgagggtggcgccatggttcccatccgtgtgcacacagtcctcatctctacccagcacgacgagacagtcaccaacgacgagattgctgctgacctgaaggagcacgtcatcaagccagtcatccccgagcagtacctcgacgagaagacaatcttccacctcaacccgtctggccgcttcgtcatcggcggacctcacggcgacgctggcctcactggccggaagatcatcatcgacacctacggtggctggggagcccacggcgggggcgccttctccggcaaggacccgaccaaggtggaccgcagcggggcctacgtcgcgaggcaggctgccaagagcatcgtcgccgccggcctcgcccgccgcgccattgtccaggtctcctacgccatcggcgtgcccgagcccctttcggtgttcgtggacacgtacggcaccggcgcgatccccgacaaggagatcctgaagatcgtgaaggagaacttcgacttcaggcccggcatgatcatcatcaacctcgacctcaagaaaggcggcaacgggcgctacctcaagacggcggcctacgggcactttgggagggacgaccccgacttcacctgggaggtggtgaagcccctcaaggcggagaagccgtcttctgcatgaggcgcctcctctgttttggaagaagcttttggtctggtctggtctggtctggtgtgcctgcgctctatcatgcttttttatggctcctacttgtgattcttgatctgccccttgcttatcatttgtactgtactgtcactgtcctaataagtggtacgtgtgcggggtcgtattgtgtctgcttattcacctactagaggattatttctggttt

SEQ ID NO: 811 - DNA, 1119 bp, Zea mays
  Clone ID: 700102512_FLI
cactcgcacgtgcctccgtcttcgctccctcggtccctccgcagcgtcagatcgaccgtcgctcgcggagccctagcgacgccgttctcaagtccgagccggagtagcacgagagccttgcggatatgagtcgcgccgcggcagcaagaacgatggatgaggaagccgagtacctggagacggctcgggccgaccgctccgtgtggctcatgaagtgccccccggtcgtttcccgcgcctggcaggccgcctccgcctcttcctccgatgctgccaacgccaaccccgtcgttgccaaggtcgtcctttcccttgacctgttgcgccaagaagaacgcccggaagagcctacgctccagttcaagatggaattggctcaaactaacaccgggaatacacctaagagctactctttgaatatgttcaaagatttcgttcctatgtgtgttttctccgaatctaaccaagggaaactttcatgtgaaggaaaagtcgagcataaatttgacatggaacctcacagcgataatttggcgaactatggaaagttatgccgtgaaagaacacaaaagtacatggttaaatctagacaagtgcaggtacttgacaatgaccatggaatgagcatgaggccaatgcctggcattgttggtctcatatcttctagttcaaaggaaaagaagaagcaagcaccagtgaaaccatctgatgccaaaagaactcgtagggatcgcacggagatggaaaacgttatattcaagctttttgaaaggcagcccaattgggccctaaaggcactcgtgcaagaaactgaccagccagagcaattcctgaaggagatattgaacgatctgtgtgtgtataataaacgaggtccaaaccagggaacgcatgagctcaagcctgagtacaagaaatccacaggggacactgatactgcttgaagatgagagacgacttggtagaatcgatagttctctgttggtaactcaggccacacaaacacaattgtgatccagtttcatgtgtatgctttcagaggcgttcttttctgtaacaatataagctggatacacgttttttagggaaaggaaaaaagttttgaaacaattgcctgat

SEQ ID NO: 812 - DNA, 783 bp, Zea mays
  Clone ID: 700106463_FLI
gtgccgccgccaccccacgcctgcagccatgccgcccaagctcgacccgtcgcaggtggtggaggtgttcgtccgtgtgaccggcggcgaggtaggcgcggcgtcttcgctggcccccaagatcggtccgctcggtctttctcccaagaagatcggagaggacatcgccaaggagacggccaaggactggaagggcctccgcgtcaccgtcaagctcactgtccagaaccgacaggccaaggtctccgtcgttccctctgccgcggccctcgtcatcaaggcgctcaaggagcccgagagggaccgcaagaaggtcaagaacatcaagcacagcggcaacatcagtctcgacgatgtcatcgagattgccaggaccatgaggcccaggtccatggccaaggaaatgtccggcagcgtcaaggagattctcggcacctgcgtcagcgtcggctgcaccgtcgacggcaaggaccccaaggacctgcagcaggagattgacgacggcgaggtggagatcccgtccgcttaagaagggtataatgagcaaatttctgttgttcggttgtaatattgatgaactatttcgctttgtcgtttggagcctgctgtagccaatacagttaatggatgtactttgttcgtgttcacgttccctccatttaaacgatgctccggtgatcctttttcttcatgaattgctagaatgcgatcagcatagctaataagtgtggttccattgtgttagttgctgttcaatcttcaaaaacgaaggaattagtgttt

SEQ ID NO: 813 - DNA, 1251 bp, Zea mays
  Clone ID: 700106469_FLI
gcaatggaggaagagaaagcggcggcgtactacgacgagctcaatcgcaagggcgagggcgcccgccgcttcaagcaggggcttggcttctcctcctcatccgccactgccttcccttccaagcccaccgcctcctccttcctatccggttttgttcgcgcgggcgcagcccctggccccgccaaacagccgttaccgcattccaggaccccatccagtccgcaccatcgctcaagttcaccgcctctttcgcgtcccaggatccgctccaggtccaggtccaggtccccgtctcgctccagccggcgccaatcgagatcgaggtcccggtcgagggagcgcaggcgccgctccaggtctagggagagggaccgcagggcatcctgtagacgctctaggtcgcgggggtcgagatcgccttctcgccggagcggcaggagcctgcacttggaagcccggcgggaacggcatggggatcagcggcggcggcacgacgacggccatcagagctctaagggtcgcagtgatagggacgggggcaaaatggactactcgcggctcataaaaggatatgataaaatgactccagctgagagagttaaagcaaagatgaagtttcagctttcagagacagctgcaaaagattccactcttggaactgcaactgtggggtgggaaagatttcaatttaataaggatgctccacttgatgaagataatgacgatgttgaagttgctaatgatgatgcttcactggtgaagaatattggaaagagcttccggctttctgctgtggagtcaaagcgcgaagataaaatcagagatgcgcatgatgaggctatatttggtgtacctacaacttcatttgttgatgttgaaattggtggtgacgagcttaaaaccaatcatgaagacgggaaagttgaagacacagaatctgatgaacctagcagctccctcatcagcgataaagttcctggagggatcgggctcagaagttgcggaagaatttgaacacatgaagtttgtcctcgggactgctcaagttcgaatttgccagcgtgtgacagagatctagcatcttgtgaagatttgagcctgaagttgaacttagccccacccatcccttagaatagttgcataatgtaagttgtaagatttgcgcctgctttctgtttcctcgagtcagcgcgcaagtgacaccttgtagtgaactgagtttggaaattcatttggttattgtgatttggc

SEQ ID NO: 814 - DNA, 575 bp, Zea mays
  Clone ID: 700106476_FLI
gcttgattgttccaggtattagcagtcgaccggttcctcggagcacgatgaagtttgttgctgcctacctgcttgctgtcctcgctgggaacgccagcccctccgctgacgatttgactgccattctggagtcagttggctgtgaagttgacaatgaaaagatggaactcctgctgtcccaactgagcggtaaggacatcaccgagctcattgccgcgggcagggagaagtttgcttcagtcccatgtggtggcggcggtgtcgctgttgcggcagctgcacctgctgctggcggagctgctcctgcagctgaggcaaagaaagaagagaaggtggaagagaaggaagaaagcgatgatgatatgggcttcagcctcttcgactaggctgcacagtcatcacagtattgttttgggcagtgaaaccagaggaaaaccagagtcatgtttagattttaagcttgttttatgttggaaagtactggaaagactgctacttgtctttatatttggtaattcagccgtagattgctatgctggttgggatttactcgtgaaccagagtttttctgtctt

SEQ ID NO: 815 - DNA, 861 bp, Zea mays
  Clone ID: 700106515_FLI
ctcctggtgggcgtgaagagggcgatgacgttcgtgccccgccgccggaagaagacggcggcgttgccgtcgtcggcggccctgaagaccggctgggtcatgcacgagtaccgcctcgccgcgccgctgcacaagaacggctgcagcctggctcaggcgcaaggagagtgggtcgtctgccgcatcttccagaagggcggcaacaggccgaggaggaggcagcgagaagcgtcgccgccgtccgctagcagcagctgcgtcacggatgcgtcgagctcggacctggacgaggtcagcagctagctagctagctagctagctagcagaaccgaccgtacgtgccggctggccacaacatgcagtcaagaacgtacgtacgtatgtataccgccaccagctcagctcgtcgcgcgcgcagctgtgctgcctgtgcatgccgtacgtgtgcggccggcctcgatctcgaagagaggatgtgaccaagctgagttacggataagggggaaacaacccatccacacgtacttctcctccgacccaacattatttgttgttaactagttttttcttttctttatctctttcttttgcactctgtacgtgtaatgtaatgcagtgtaatttaattagtgagagaagcatgacgccctactaccggccggattattagttaacagcaaattaattactacgtacctagctactactcgcgtcatcagcttctactgtacttgaggtttcagaagccaatatgtatattgtcaaatttgtaacctgcattatatgcagaggtcgtcgtacgtgtccttaattagtgtctttgtaatatctcttcatgaagcgaggaggaaggaaggaacc

SEQ ID NO: 816 - DNA, 989 bp, Zea mays
  Clone ID: 700106516_FLI
gaaccatcctcgaatccaacgtcctctcctctccgtacttcctccgcagctacccccatcacattcccaaaccctccgtcgacccctcctcctcgatctacaccggcgatcggcggcgagtgatggggtgggcgacgcggttcctggcggcggtgtgcttctttgctgcgggtgtcctcttcgtccccgaggctctccttggttccccctccggcgcaggcgccgtcaccgctgccaagctggcccacgtcctctcctttgccacttcctggggcgccgccctctgggccacctttatcggcggcatcatcatgttcaagaacctgccgaggcacatgttcggcaacttgcagagcaagatgttcccggcctacttcacgcttatctctgcctgcgcagccatctcggtcgccaccttctcgcacctccacccgtggaagacggcgtccaccgtggagcgctaccagcttggattcctcctatcagcgctcggttgcaatctctccaacctgctagtcttcacccccatgacaattgagatgatgaagaagaggcacaagattgagcgggacctgagtatcggtgaggaagtgggatggtcaaagaatcagcaggtggctaaatccaaccccacccttgctgcaatgaacaagaagtttgggatgatccacgggctgtcatcactggccaacatcatgtcgtttggtagcttggccatgcactcctggtacctggccagcaagctggagctgtgaagaggagccaagacgtcttccatctccgcgttcttgtgaattttatcactatggtggtaatggtgcacgtcaggttgtcagatcgctagactaaactgtacgattgcgctattggcttcacaagataataaattgtactcctagttaaaaaaagaaatcctgtgttgcatggagctcccaaactagttattcaaaatcagaataattcagccaacaacgtggtatttgttgatc

SEQ ID NO: 817 - DNA, 471 bp, Zea mays
  Clone ID: 700106551_FLI
tcgccgtgaacgcagtctccaccggcatgcggtttccgttcaagggctatcctgtcgcctgcccgacgccacagcagtactttttctacgagcaggcggctgccgcggcatccggataccggatgctcaaggtcgctccaccggccgtgactgtggccgcggttgcgcagagcgactccgactcgtcgtctgtggttgatcactccccttcgcctcccgcggtgacggcaaacaaggtgggcttcgaactggatctgaactggcccccgccggcagagaactaggcaggccggagtttttggctgacgacttagtagcttccttttcccttttgccttcatcaggaatgttacttgtggttgttttggtcctgtatggctgtattcttgttctgtagactaagagatggggagtcttgtaaatattttttttccgtcgagacggaaatgaactgagatctgttcgtctgtc

SEQ ID NO: 818 - DNA, 633 bp, Zea mays
  Clone ID: 700106710_FLI
tggttcacgtgaaatcgaagagacgttgttggagcaccttggagttaaacgaaatgaggtgaccagtgatggtttattttctgttggagaaatggagtgcatgggttgctgtgtgaatgctcctatgattgctgtggctgactactcgaaaggctcagagggttacacatataactactatgaggacctcactccaaaacgagttgttgagattgttgagatgcttagaagaggtgaaacaccccctcgaggtacacagcacccagagcgaaaaaactgtggccctgccggggggaacaccaccttgcacggagagccgaaacctcctccatgcagggatctggatgcctgctaggtttgcttcggagcattacgagcacgcgcataacttggctcgtactgtaaggtgtgcaaactgcacacagcggaggctgtgttatttgtattctgaagctttcttgtgtttcgtcaagaaagcttctctaacttttatcctgcactatcagataaacggtaaattgatagagaataagatgttttcgagctcatgtttagtggcaaacgctttatatttttggcaagctgtgaaggagctgaaccagtgacaactcgaagaattcattttgttgtatt

SEQ ID NO: 819 - DNA, 933 bp, Zea mays
  Clone ID: 700106739_FLI
ttttcgtcggcaagcactcaccaggtactcccatgccttctcttcccttcctgctttgcgagtcccagcgccaaacacccaaaccctaactatttggctattggctatttgatgcctactacgaacattttggcaaaagaaaaaggtattcagccatggttcttcttgaggcagagatgtcatggaatgtgttgatctcacctagccagctggaccgcaagggcctcctgctccgcaaggctatcattgtgcgtcttctggaggatgtcacaaacaggagggcttcgaaagagcatggctactacattgctgttaatcagctgaaggcaatatctgaagggaaagtgcgtgagctaactggagatgttctgttcccagtttcatttacttgcattacacagaagcctatgaagggagaggtcatggttgggcacgtggacaggatcctcaagcatggcgtgttcctcaaatccggacccgtggagagcatcttcctggctgagaagtcgatgagtaattacaagtacataggtggggagaatgcgatgttcatgaacgaccactcgaagctggagaaggacaccgccgtgcgcttcaaggtcctagggttccgctggatggaggctgaccgccaattccagctccttgctacgatcgctggtgacttccttgggccgctgtgaactgcttccacaggtcaaacaggttctaatgtacattgctcgttagatggtggatggatggttggatctgatgtgtagaattaaactttgctaccagtggtttggtcttgtagaacctgagacatggtaggttttctagatgctgttgccagtgatatttagctctggtttgaacgtatcagtgtacctgtatgatgaacaagcgttgtcatggatgtaccttttctatgcttgcttggaagttaacgtt

SEQ ID NO: 820 - DNA, 704 bp, Zea mays
  Clone ID: 700106742_FLI
atccgttcatcctggtggttttgtgaggtcgaaagcggcgagcgaattagaagatgctggacaagctgtgggacgacgtggtggccgggcctcgcccggagacgggcctcgagaagctccgcaaggccaccaccgcccgcccgctcgtcatcaacaaagacgcggacggcggcagctacaagcgggcgcagtcgacgccgtcgaccccgacgacgccggtgacgccgtcgtcgtcgacgacgccgcgcggcgccggcaacgtgtggcgcagcgtcttccacccggggagcaacctggccaccaagggcatgggcgccaacctcttcgaccggccgcagcccaactcccccaccgtctacgactggctctacagcgacgagaccaggagcaaccaccgctagatcgggcgagatggatggacagtgaagaggccatgtttgctggtccttgtggttatctaaaacgcacgcatgctctattatagctagtcatcactatatatatacttgtgtttgtgtattgttgttcttgttttgctggtgtctccgccgtttaatttgacctatgttatggagtgagtgatatatgtgccgtcactcctagtatatagtagtgagtgactagttggtatgtgtagtactgtactatcttttctccatatgcatgttttgccagcgcgtaatgaatgtaatgtcagtactgct

SEQ ID NO: 821 - DNA, 896 bp, Zea mays
  Clone ID: 700106757_FLI
gggcaacatacacacaagcacaacaaagctaagaagctccatagctaaattcaaatattacaaacacaaaaggggagtgcagaaccaaaatgactgcctcgaccttccttctcgttgcttttctagcattggtcacttctcaggccattgcctctgatcctagcccgctccaagacttctgtgttgccgacaaagactctccagtgaaggtgaatggatttgtttgcaaggaccctatggctgtgaacgctgacgacttcttcaaggctgcaaaacttgaccagccaagggacaccaccaaaagcaaggtgggatccaacgttactctgatcaatgtcatgcagctgcctggactcaacacgttggggatctcgttggctcgcattgactacgcaccattaggtcagaatcctccacacacacacccacgtgccactgagatcctcaccgtgcttgaggggacactctacgtcggatttgtcacctccaaccaagctgacagaagcaacaagctatttgccaaggttctcaacaagggcgatgtgtttgtattcccccaaggactaatccacttccagttcaacccagtacatgacaagccagcagtcgccctcgctgctctaagtagccagaaccctggagctattactattgccaatgcagtctttggatcaaagccacctatctcggatgatgtcctagctaaggcctttcaggtgcaaaaggggacaattgattggcttcaagctcagttctgggagaacaaccactactgaaaaaatcaagtctaagttcaacatatgagaataaagaaatgtacttgtattttacatactactctatgtgtcaacctttttctaggttgcgactgataataaaataaatgttactctgtc

SEQ ID NO: 822 - DNA, 751 bp, Zea mays
  Clone ID: 700106765_FLI
ggcaccacttgctcctgcctcctgctgcttcttcccgagttcccgtgccgccgcgagcgctcccaaccaagcaacgagacaacaacaacaaccctgcaccgccgcagcacttgcgccgtccggtcctgtcctcccgcggtctcgacgccgccccctaccgtcctaccttatcgcgcaccgctccatggccgccaagtgggcccagaagaccgtcgttatcccggcgcatcggcggggctgccacctcatcacccccaagattctgagggagatcgagggcgacctggccgggttcaagtgcggtctcgcgcatttcttccttcagcacacaagcgcatcgctgaccatcaacgagaactatgactctgatgtgcaggctgacactgagacttttcttaacagaattgttccagagggccacaatgctccttggaaacacactatggaaggacctgatgacatgccagcacatattaaatcttctatgtttggttgttccctaacgattcctataactgatggacgtctcaatacgggcacttggcagggcatatggctgtgcgaacatcgagaccatgccagccctcgcaaaattgtgattactctcaacggtgtttaacttgaagatcttatatgctgccaggaaatagggccaatgcattttggacctgaatgtgtttcagttaccatgtactatgttgagttgtaatgtatgctataaattccaataaattcatcgttactatttcgt

SEQ ID NO: 823 - DNA, 1401 bp, Zea mays
  Clone ID: 700106776_FLI
gggctaccggtgacgcacgcaccccatctctgatctgatctgatctctccccctggatctcgacctccgcctggctgctccgctctgcgtcgctcgccatggcgtcctcgacggggagcttggagcacggcgggttcacgttcacgccgccgcccttcatcacctccttcacggagctgctctctggggcagcagcggacatggtaggagccgcgggcgccgatcatcaggagcggtcgccgagggggctgttccaccgcggcgccaccagaggcggcggcgtaggcgtgcccaagttcaagtccgcgcagccgcccagcctgcccatctcgccgccgccgatgtcgccctcctcctacttctccatcccgcccgggctcagccccgccgagctgctggactcgcccgtcctgctccactcttcctcgaacttcttcgcgtcgcccaccaccggcgccatcccggcgcagaggttcgactggaagcaggccgccgacctgatcgcgtctcagtctcagcaagacgacagccgggctgcggtcggcagcgccttcaacgacttctccttccacgcgcccaccatgcccgcgcagaccacgtccttcccttccttcaaggagcagcagcaacagcaagtcgaagcggcgaccaagagcgccgtcccgtcgagcaacaaggccagcggcggaagcggcggcagcaccaagcttgaggacgggtacaactggcgcaagtacgggcagaagcaggtgaaggggagcgagaacccgcgcagctactacaagtgcacgtaccacagctgctccatgaagaagaaggtggagcggtccctggccgacgggcgcgtcacgcagatcgtgtacaagggcgcgcacaaccacccaaagccgctgtccacgcgccgcaactcctccggcggcgtggcggcggcggaggagcaggccgccaacaacagcagcctctctggctgcggcggcccggagcactccggcggcgccaccgccgagaactcgtccgtcaccttcggcgacgacgaggcggagaacgggtcgcagcggagcggcggtgacgagcccgacgccaagcgctggaaggcggaggacggtgagaacgagggctgctcaggcgccggcggcggcaagccggtgcgcgagccgcggctggtggtgcagacgctgagcgacatcgacatcctggacgacgggttccggtggcgcaagtacgggcagaaggtggtgaaggggaacccgaacccgcggagctactacaagtgcaccacggcggggtgccccgtgcggaagcacgtggagcgcgcgtgccacgacgcgcgcgccgtgatcaccacgtacgagggcaagcacaaccacgacgtgcccgtgggccgcggcgccgccagccgcg

SEQ ID NO: 824 - DNA, 1101 bp, Zea mays
  Clone ID: 700106819_FLI
ccctgcactgcagcgggatggcgtcgccgccgccaccacgcgtatgcgtaaccggtggcggcgggtacgtcgcctcatggctcgtcaagctcctgctctcccgcggctacgccgtgcacgccactgtccgcgacccaagtgatcccaagaacgcccacctgcaacagctggacggggcccgggagaggttgcgcctgttcaaggccgacgtgctcgaccgcgacgccctggcgaccgcggtcgtcgcgtgcgagggcgtcttccacgtcgcctcccctgtgcccgcggacaaagtcctcgatcccgagtccgaggtgctgtctcctgctgtcaagggcactctgaacgtcctccaggcctgctcggcaaacaacgttcagaaagttgtcgtggtttcgtccacggctgccgtttactttaacccgagctggccccaaggtagaaccaaagacgagagttgctggtcagacagagatttatgcattaagaacgagaactggtactgtgctgccaagacgattgctgaagaaactgcagtggagtatggagagaagaacgggctgattgttgtcacggtctgcccttgtatcgttttaggcccactcctgcagccgctgatcaatgccagcagcgaactcctcgtctacattataaaaggaggtcctagggtgctgaaaaacctcccctggaacatagtcgacgtccgtgacgtagctgatgctttgctcctagtatacgagaaagtggaatcatccgggagatacatctgtgcgcctaatcggatcagcacaaacaacatggtgaacttgtttaagaagtcctaccctaactacaattatgtgaactgcgacaacaaggactatgaatctgaaatctcaccagttacatcggagaaacttaagagtctaggctggaacccaaggacaatggagaaaactttgttggacaacattgagtatttcgagaaggcagggtttttgcgtgatggagagggttatccttgtcgtctacctcatatttttcatttcgcttctgactaatgaaatatattctgtaaaacaattacgacaactactataactgtcttcggacaatttattt

SEQ ID NO: 825 - DNA, 1119 bp, Zea mays
  Clone ID: 700150064_FLI
agtttgtggttggattgggagataaggtctctccaactgatatcgaggaagggatgagggttggtgttgatcgcaacaagtaccagattcaaatccctctcccaccaaaaattgacccaagtgttaccatgatgactgtggaggaaaagccagatgtgacgtacaatgatgtcggtggctgcaaggagcagattgagaagatgcgtgaagttgttgaacttcctatgcttcacccagaaaagtttgtcaagcttggtattgaccctccgaaaggtgtcctttgctatggcccacctggtactggcaagacacttcttgcaagagctgtagcaaaccggactgatgcttgtttcatccgtgtaattggaagtgagctagttcagaagtatgttggagaaggtgctcggatggtcagggaactgttccagatggcccgctcaaagaaggcatgcattgtattctttgatgaagttgatgcaattggtggtgctcgttttgatgatggggttggtggtgacaatgaggtgcagcgtacaatgttggaaatagtaaaccaacttgatgggtttgatgcaagagggaacatcaaagttctcatggccactaataggcctgataccttggatcctgcacttctgcgccctggtcgcttggacagaaaggtggaattcgggctacctgacttggagggccgtacccaaattttcaagatccatacacgtaccatgaactgtgagcgagatattcgtttcgagcttctggcacggctctgccccaactctactggagctgatataaggagcgtttgcacagaagccgggatgtacgccattcgcgcccgcaggaaaacggtgacagaaaaggattttctcgatgctgtcaacaaggtcatcaagggctaccagaagttcagtgcaacacccaagtatatggtgtacaactagtcggcgtgtcttcatgggatctgttgtttctagaaactctggatctttttcatggttgtatcatcatgagattctctatgcaaaggttgttgtttgtttagcaaattggatgccgagtgatttgtgacctgtaccgcatgtttttaagataacaaggttcttcgctcggtggttc

SEQ ID NO: 826 - DNA, 588 bp, Zea mays
  Clone ID: 700150463_FLI
gcgtcggttcacttctccaggtaaggaaagggttcgtactcatggcgccgccgcagccaaagtcgggcctcttcgttggcatcaacaagggtcatgtcgtcaccaagcgcgagctgcctccccgcccgtgccaccgcaaggggaaatcaacgaagagggtgtctatggtcaggggcctgatcagagaggttgctgggtttgctccttatgagaagcgtatcactgagcttctgaaggttggcaaggacaagcgtgccctgaagcttgctaagagaaagcttggaactcacaagagggcaaagaagaagagagaggagatggcgggcgtcctcaggaagatgaggtcggctggtacgcacactgacaaaaagaaatagagagcatttcaagttcatggagctggctgccagagattatgttccagtgtctgattttccatacatgtagaacctaatagacatgtcaaagtattatgtatcgaaccagctcatgggattttgctccttccaatgcatccagggtttatgtatcgaaccaatttatgggatcttgctcttattctaatgcatccatggtttgtgaatcttt

SEQ ID NO: 827 - DNA, 1439 bp, Zea mays
  Clone ID: 700150477_FLI
cggaagctttgcttcggttgactgcactgcactgcacctgctgcctgctgccgagttcagttggtccagggccatggccatgtcctcgtcgcgcgccctcctccgccggatcgggggggctctccgccgccgctccttctccgacgccgcggccggccccgactccgccgccgtagggtaccacgtcgcgggcgggcccagctacatgcgcggcgccgtgttctgggagcccgggcgcccgctcacgctggaggagttccacatgccgcgacccaaggccggcgagctcctcatcaagaccaaagcctgcggggtgtgccactccgacctccacgtcctgaaaggcgagctccctttctccagcccctgcgtcgtgggccacgagatcaccggcgaggtcgtcgaccatggcacgcacacccccgcggagatcatcagcaggttcccagtaggaagccacgtcgtcggcgcgttcataatgccatgtgggaactgcttctactgcgttaagggccaagaggacctgtgcgagtccttcttcgcgtacaaccgcgccaaagggacgctctacgacggcgagacgcggctgttcctacggggcaacgggaagccggtgtacatgtacagcatgggaggccttgcggagtactgcgtggtgccagccaacgcgctggcggtcctccccgcctcgctgccgtacacggagtcggcgatcctggggtgcgcggtgttcaccgcgtacggcgccctgaggcacgccgccgagatgcgggcgggcgactcggtggccgtgatcggagtcggaggggtcggatcgagctgtctgcagatagcaaaggcctttggagcttccgaggtcatcgcggtggacgttctcgacgagaagctccggaacgccacaacgctcggcgcgacgcacactgtgaacgcggcgaaagaggacgccgttgagaggataaaggagatcactggcggtaggggtgtcgacgtggctgtcgaggcgctcggtaaggcgctcacgttttcccagtgcgccaggagcgtgcgcgacggaggcaaggcggtgatgatcgggctcgcggcgacgaatgtggtgggggaggtcgacataacccgcctcgtccggcgacaggtgaagatcatcggctcgtacggcgcgagggccaggcaggaccttccgcagatagtgaagctggcggagagcggcgccttcagcctccggaacaccgtatcgaggaagtgcaggttcgaggaggcgaacggcgcctacgaggacctcgaccagggcaagatcgtcggccgagctgtggtcgagatcatggagtgaatgggtgacgacgatgggcgtgggcgaggtgatcagtcatgtggcgtggttccaggcccctgggccagacgataccaataaataaaagcgcgcagatttctcgcttggcttt

SEQ ID NO: 828 - DNA, 779 bp, Zea mays
  Clone ID: 700093859_FLI
cccgacgcacgagctcccaagagctagccatggcgtccaccaccctctcctccgccttcaccctcctctcccgcccctccacctccccgtgccccgccgcctcgctcccgaggtcctcccacgccgcgccccacatccgccggggccgccgcgccgtcgccgtcgcgtgcaccgccaccgagtcccccaagatcctggagctcggggacgccatcgccgggctcacgctcgaggaggcccgcagcctcgtcgaccacctccaggagcggctcggcgtcaccgccgcggccttcgcgccggccgccgtcgtcgcggcgcccggggcgggcggcggggccgcggccgaggaggaggcccccgtcgagaagacggagttcgacgtgatgatcgaagaggtgcccagcagcgcgcgtatcgccactatcaaggtggtgcgcgcgctcaccagcctcgcgctcaaggaggccaaggaccttatcgagggtctccccaagaaggtcaaagaggccgtcagcaaggacgaggccgaggacgccaagaagcagctcgaggaggtcggcgccaaggtgtctatcgcgtgacactaggtatacgagtactccttttttttctttagtttcttttgtttgcatccccaatctcttgtatccccactgttgttcgtaaggaattgctgtttcatgatatgagatttgtgtatgtgtcgattcactagcttgtatgtgcgtgatatatctctgccttgaattggcagtgaatgtgatctgctcgaaactggt

SEQ ID NO: 829 - DNA, 1010 bp, Zea mays
  Clone ID: 700093869_FLI
gtcgcccgggacatggacgactacgtcgtctacggcctcaacgcgtgcttgcagaacgtccgcaactgctgcgtgcgcctggacgccatcgacaagctgcgggcgcactacgacgccctcgccgacgccgtcgccgacccggccgccaacgtcgagggcctcgccgcggaggcgtccgagtacaaggccgccatgtggcagtactgctacaaccagcggagcgcctccgcgcgggcgcactcccgcgcctactcccaggcgctcaagctggagggcatcgacttcgccgagctggtgcggaggcaccagctccggctcgggtacggcagcaagggcgaggagttcgaggacctggacgacacccagaagctggaggtgtacaacagcatcatcgtcgagtcggggcgggcggggctaccggtgcggatgttctcgtcgggccgctctgccggtggccctaagattgcagccacgacgtgggcggaggcagtgagcgtcttcatcatggcggcgggcaacctggcgtgggacgtgttcaccacggagcacgaggtggaggccatcctcaagggcagcctcaacctcctggcggggctaggcggctttgccgtggaggccgtcgtcggcgcggctgtcaccaaggcggtcgcaaacgtcggcgccggcgtctttgcttgctctctcgccggcttcgtcgtgggcgccatagccgggctgattttcgtcggcgtcagcggcctcctcattaacctcatcatcggctcccctaggaaggtgcctgacatgagcaagctcatgttccacaccgccgtcatgcccgatggaatggcccttgcgtatgcggtatctcattaattacttattatcatcgcagtgactaccaactgcttcagatcctactgttggaacgcgcgtggaaataagaagagagggcacaataaataataattgtaataaaattaataattattacaatgataataattatctatctatctctatttaataat

SEQ ID NO: 830 - DNA, 2274 bp, Zea mays; identical to SEQ ID NO: 777
  Clone ID: 700093879_FLI

SEQ ID NO: 831 - DNA, 830 bp, Zea mays
  Clone ID: 700093880_FLI
gctgcggaagctgggcgtgggggcgtgcacggtggtggggttcagctacggcgggatggtgtcgttcaagatggcggaggcgcacccggacctggtccggtcgctggtggtgtcggggtccgtggtggccatgaccgactccctcagcgaggcgacgctggaggggatcggcgtgaagtcgtcggccgagctgctgctgccggagtccgtcaaggggctcaaggcgctgctctccgtcgctacctaccggaagctctggttccccgaccgcctccacagggactacctcgaggtgatgttcaccaaccgcaaggagagaggcgagctgctggaaggtttggtggtcagcaacaaagacgccaccgtgcccgtcctgccccagaaaatactcctgttgtggggagagaacgacaacatcttcaacatcgagctcgccaagacaatgaaagagcagctcggcgagaagacgacgctgcagagcataagcaaggccggccacctggtgcacctggagaggccctgcgtctacaaccggctcctcaaggagttcctggcgtgcgtcacggctaccgaaaccaccaacaaggagtgacaagggcagctggaaggagttggccgcctacatttgccacgagttctgtctgtttcgaaataacgagagagaacggacgacacttccaccacccaatatgtctattgtattgttgttgtttgagaaagattttctgccacgtgcctaaagtgcaagaatcaacgtttaacccatataaatatgtactaatagttttaaaagcaggtattcaatgagctatatattattatttacaaac

SEQ ID NO: 832 - DNA, 1739 bp, Zea mays
  Clone ID: 700093956_FLI
gtcgcgatcggaggccagaaatccatggccgctcccgccgccgcgccgctcgacgagggcaaggcgaagaaagtccttcgccaggtcgagttctacttcagcgacagcaacctcccccgcgataagttcctgcgggagacggtcgagcagagcgatgacggattggtgagcttgcccttgatatgctccttctcgcggatgaagtcccacctggggctggacgcagatgtcaagcccgagactgtgccggaggagaccgtgcttgcggttgctgaggtgctccggccttctcctgccctccgcgtatcggaggatggaaagaagattggtagagctagtgaactcttgaagccagatgagatcatagaacaagtagactctaggactattgctgtatctccgctgccttgcaatgtaaagcaggaagacgtccaatcttttttcacaaattatgcaaaggtaaatagcgtgagacttccacgcaatattgccaacaaaaaacacttctgtgggactgctttggttgagttttctgaagaagaggaagcaaaaagaattatggagactgctttagtatttgcaggggcaaatctggaaataaggccaaagaaggagtttgatgctgagcaaaagtccaaaaaagaagcatatgaaaagacacaccttaaaaaggacaaccagtatgaaggctatcaaaaaggcctaattgtggccttcaaattggagaaggccacagctgatactgtagtgcagcaagataacatagataaagagaatgactctgctacgaaattagatgtttccagttccatggaaaaaccttcaggccaggggccagaggagtctatccttgagagcgatgttattaagcaagggatgccctcagatgacatgaccaaagagaaagatctaaacactggggaagctacagaatctgagaagtgtattagtgatgtccccatagaaagtgataaacatggtgatagtgaaccattgagcagggaaggcaaaatcatttctggcaatgtgaatgtgaagaaccaaatatcgagggaggatctaaaagaagcattcaaaaaatttggagctgtccggtatgtggacttcagcatcggagataattcaggataccttcgctttgaagattctaaggcagctgaaaaagcccgcatgtctgcagtacttgctgatggtggcttgataattaaagaccacattattactttggagcctgtgactggtgaagctgagaaggattattgggacacaatccgcagtattcaaggaaagtacaaggatagtagaagctacaagggaagggcttcaaataaccagagaggaggaaagcgtttcaacgcgaagcgagatagaaacccagactcggagaagaattctaacaaggcccggaaggttgaagctgtcgcatgaggttaatttaggtaccttagctcgacaaaagaagtaacatgttatgccagcatgatcgacttcactactctccaagtttctagaatcgacttgttttttagctatcgttttcattttggtcgttttgccaccttattcgatgttcatccctaagctataatccttttgtaatggctttactgtgtgatgcgagggctcacctgatggcgtgtaaattaacacaccaagtttaggcttcccttgcgaaagggtggaagcctttctattctttcactagcaaatatgcggctgcttgctttgggaggatgggc

SEQ ID NO: 833 - DNA, 2687 bp, Zea mays
  Clone ID: 700093978_FLI
ggcggcggcgccgatcccgaagacatggacgccgacgtggcactgaacgacgaggcgaggcagccgctgtcgaggaaggtgtcgatcgcgtcgagcaaggtgaacccgtaccggatggtgatcgtggtgcgtctcgttgtgctcgccttcttcctccggtaccgtatcctgcaccccgtcccggacgccatcgggctgtggctcgtctccatcatctgcgagatctggttcgccatctcctggatcctcgaccagttccccaagtggttccccatcgaccgcgagacgtacctcgaccgcctctccctcaggtacgagagggaaggggagccgtcgctgctgtcggcggtggacctgttcgtgagcacggtggacccgctcaaggagccgccgctggtgaccgccaacaccgtgctctccatcctcgccgtagactaccccgtggacaaggtctcctgctacgtctccgacgacggcgcgtcgatgctgacgttcgagtcgctgtcggagacggccgagttcgcgcgcaagtgggtgcccttctgcaagaagttcggcatcgagccccgcgccccggagttctacttctcgctcaaggtcgactacctcaaggacaaggtgcagcccaccttcgtgcaggagcgccgcgccatgaagagagagtatgaggagttcaaggtccggatcaacgcgctggtggccaaggccatgaaggtgccggcagaggggtggatcatgaaggacggcacgccgtggcccgggaacaacacccgcgaccaccccggcatgatccaggtgttcctgggccacagcggcggccacgacaccgagggcaacgagctgccccgcctcgtgtacgtctcccgtgagaagcgcccgggattctagcaccacaagaaggccggcgccatgaacgctctgattcgcgtctccgccgtgctgaccaacgcgccattcatgctcaacttggactgtgatcactacatcaacaacagcaaggccatccgggaggccatgtgcttcctcatggaccctcaggtcggccggaaggtctgctacgttcagttcccgcagaggttcgacggcatcgacgtgcacgaccgatacgctaacaggaacaccgtcttcttcgacatcaacatgaaggggctggacggcatccaaggcccggtgtacgtcgggacagggtgcgtgttccggcgccaggcgctctacggctacaaccctcccaagggacccaagaggcccaagatggtgacctgcgactgctgcccgtgcttcggccgcaagaagcggaaacacgccaaggacgggctgccggagggcaccgctgatatgggagtagatagcgacaaggagatgctcatgtcccacatgaacttcgagaagcggttcgggcagtccgcggcgttcgtcacgtcgacgctgatggaggaaggcggcgtccctccttcgtcgagccccgccgcgctcctcaaggaggccatccatgtcatcagctgcggctacgaggacaagaccgactgggggctggagctggggtggatctacgggtcgatcacggaggacatcctgacggggttcaagatgcactgccgcgggtggcgctccgtgtactgcatgccgaagcgggcggcgttcaaggggtcggcgccgatcaatctatcggaccgtctcaaccaggtgctccggtgggcgctggggtccgtcgagatcttcttcagccggcacagccccctgctgtacggctacaagaacggcaacctcaagtggctggagcgcttcgcctacatcaacaccaccatctaccccttcacctcgctcccgctgctcgcctactgcaccctccccgccgtctgcctcctcaccggcaagttcatcatgccgtcgattagcacgttcgccagcctcttcttcatcgccctcttcatgtccatcttcgcgacgggcatcctggagatgcggtggagcggggtgagcatcgaggagtggtggaggaacgagcagttctgggtcatcggcggcgtgtccgcgcatctcttcgccgtcgtgcagggcctgctcaaggtcctcgccgggatcgacaccaacttcaccgtcacctccaaggccaccggcgacgaggacgacgagttcgccgagctctacgccttcaagtggaccacgctcctcatcccgcccaccacgctgctcatcattaacgtcatcggcgtcgtggccggcatctccgacgccatcaacaacgggtaccagtcctgggggcccctcttcggcaagctcttcttcgccttctgggtcatcgtccacctctacccgttcctcaaggggctcatggggcgccagaacaggacgcccaccgttgttgtcatctggtccattctgctggcctccatcttctccctgctctgggtcaggatcgaccctttcatcgtcaggaccaagggcccggacgtcaggcagtgtggcatcaattgctgagctgtttattaaggttcaaaattctggagcttgtgcatagggagaaaaaaacaatttagaaattttgtaaggttgttgtgtctgtaatgttatggtacccagaattgtcggacgaggaattgaacaaaggacaaggtttgattgttaaatggcaaatgagtgcagtcatgctaaatgtaatccaaatagcaactactcctttggttttt

SEQ ID NO: 834 - DNA, 325 bp, Zea mays
  Clone ID: 700093981_FLI
gtttgtgcagctgaacatcaatggaaattttatctctgatgaaggggttgatgaggtgaaggaaattctgaaggctggtaagaaatctctggatgtgctgggcccactagacgagaatgaacctgatggagagcctgatgatgaggatgctgaggacgatgaggacgagctggatttgaagctgcagagtgtgaaggttgagcaggatgaggatgattgacgatccttaggttaaatatctttagctactcagtaatcatttggatgtccatgagctacgcaaacttttaattaaaaagaatgtactgaggcttttgcattgtcc

SEQ ID NO: 835 - DNA, 599 bp, Zea mays
  Clone ID: 700093996_FLI
ggtcatcacattcgagggcacaatgataccaaacagaggccaggcggcgctgctaaccttctgcacctgcattagcctcgggagtgtcgggcttgttctatctatcgctgtcccagaaggtggcaacaactggttctggctcatgaccctgagccccttggcgtatgtctctctgctactcaactcccagcaattcagaatgaattcttccagtacaaatgcagtaactgacccttcatgatgaggtcccaggggagcgtactactggacgaaagcgtcaaggaaagaagagatcaaggtcaagatgatcctatccgatgacgggaacgtgtccgagatccttgtgcagggcgatgacgtccaggttgagcagatgaggaaggacctcaagttcagcgagaaggggatggtctatgtgaagggcatctttgagacatgactgggagtttcatactctatctgtgagtgaacaatcgagtggagacgagtctttgctgcaacggaaactgcgtaagcgtaacccaggtgaggaaatgcaaattggacgggcaaatctgtaccttggcttaaaggaaaaaaagaagtgatcttcatacggg

SEQ ID NO: 836 - DNA, 2023 bp, Zea mays
  Clone ID: 700094013_FLI
ctagccaaagcatgcacctcggagtccttgcgactgcatggcacgccattaacacgaagtccatgttcactgtctactacaagcctaggacgagcccttcagagttcatcataccgtacgatcaatatatggagtcggtaaaaaataattattctattggcatgagattcaggatgaggtttgaaggagaagaggcgccagagcagaggtttactggtacaatagttggttgtgaaaatcttgacccactatggcctgattccagttggagatacttgaaggtgcgttgggatgagccttctactatcccgcggccagatagggtctctccttggaagatagagcctgcttcatcgcctcctgttaatccactcgtgcattcttctagagcaaaaagacctagacaaaacgttcctccaccttcacttgaatcatctgttctcacaaaagaaggtgcaaccaaggtcgaaatcgattcagctcaaacacaacaccaaaattcggtcttgcaaggtcaggagcagatgaccttgaggaacaacctgactgaaagcgctgattctgattccactgttcagaagccgatgatgtggtccccatcactcaatgggaaagcccacactcattttcagcagagacctgctatggataattggatgccattgggaaggcgtgaaaatgacttcaaggacacccgttctgccttcaaggatgcccgcaccgcctctcaatcatttggagatacacagggtttttttgtgcaagcttatgatgacaatcatcaccgtctctctttcaaaaatcagggttcaactcatcgcttcgcagatccgtacttctatatgcctcaacaatcgtcagtgacggttgaatcaagcacaaggacacaaacagcaaacaatgacttgtgtttctggggtgaccagaatgctatgtacggcaatccaagtgaccaacaacagggtttcaactttggacaaaacccatcaagttggttgaaccagccatttccccaggttgaacagccacgagtggtcaggcctcatgcaacggttgctccatttgatctggagaagactagagaaggaagtggcttcaagatttttgggttccaagttgatacaaccagtccatctcctgtccaattgagctctccattgcccgctatccaggagcatgtgttacaaactcgaccatcggcaccggtgaatgaattgcaacctgtgcaaattgagtgcttgcctgagggatctgtaagcacagctggaactgcaacggagaacattcagcaagccccgcagagttcaaaagatatccaaagcaagtcccagggtgcttcaacaaggagctgtacaaaggttcataagcaaggagtcgcacttggcaggtcggtggacctctctaaattcaccgactacggcgaactccaagcagagctggacaagatgtttgacttcgagggtgaattggtatctggcagccaaaactggcagatcgtctataccgacgacgagggcgatatgatgcttgtgggagacgacccgtgggaagagttctgcagcatagtgcgcaagatctacatctacacgaaggaggaggtccagaagatgaactcgaaatcagctgcgccaaggaaggaggaatctccggcagcgggcggcggaggaggttgcgccgccgccacaaacgagtagtatggtggtttgctcttggtggcaagttgaggccaaggttttactactgctattgttattgctgatttgctctccccgccttccggtgtaaatatctgtgtgtacccagtcccggccttgtgctagtaagtagcaagcagtgttaccttttggtattttaaccagcagctaagttcgcggcattttagtccctgtaagcggtaagcagctctgtagcgtgagatagatggccaagcgccggtacgtacgtgtagtgtctggtcttctcactgagtgtactataaagagttaatataggagctgaccctgtgaacccgcgtgatggatgc

SEQ ID NO: 837 - DNA, 667 bp, Zea mays
  Clone ID: 700094027_FLI
gtcagagtggaaccagagttccagttggtggtggagacaacaacgttgttcacaaagccgaggacgttgtgagcactatgcttgccaagggtttcgtgctaggcaaagacgcggttggcaaggccaaagcattcgatgagaagcatggcttcacatccacagccggtgctacagtggcctcaattgacaagaagattgggctgactgataagatcacgacaggcacttccttggttagcgggaaggtgaaggagatggaccagaagttccaggtctccgacaagaccaagtctgcactcgctgccgccgagcagaaggtgagcagtgccgggtctgccatcatgaagaacaggtacgtcttcaccggcgcgtcatgggtcaccagcgcgttcaacaaggtcgccaagaccgccacggacgtcgggacgatgaccaaggagaagatggccgccgaggagcatcacaagggctctggcccgtcttctggcggccactcgtacacgcccatccgatgattcatgcattggcttgctgttacgtgcctcactcaaacggtgttgtactgcatattggtggatgtaaaacatggtcttttagtcccaactcttattatgttgtggttagctagagttgaaacctaatagaaaccacaagttaaggttcaagc

SEQ ID NO: 838 - DNA, 763 bp, Zea mays
  Clone ID: 700094048_FLI
caaatgtggaacctcaaagccctggtcacctcactactctgcatctcggcgttgtcgtcgtcgccatggccatgcacggcagccggtcagctgggcggcaagcccctggtcaccgccgtcaccaaggacgcgtccacctccctctacacggcgccgctcaaggacggccacccgctcgtcctcgacctcagtagctcggtcatctcgctggccacgtgcgccagctcctccaagaacaacaacggcacgctcaccgccacgctatccgccaacgccaccgacggccagaacccgctgttcccggtctccttctcggcggtggccacgtgcgcgccgtcgtcgaggctgcccgccggcgccgtcggcgtcgcggggctcgcgccctcctccagcagccagcagtcgctcccggcgcaggtggcgcgcacgcagaaggtcgccgacaaggtcgcgctgtgcctgcccagcgacggcaggtccacgtcgggcgacagcgtcggcgtggccatcttcggcggcggcccgctgttcttcgtcccgccggaccgcggcgacttcaccacgatgctggccggcacggcgccgctccacgccggagccggagccggtgcccccgggtactacgtctcctccaccggcatcgccgtggagcaggcccgcgtgggcggccccgccggggcgctcgtcgtggcgctgagctccacggtcccgtacacggcgctccggcccgacgtgtacgctccgttcgtcaaggcgttcgacg

SEQ ID NO: 839 - DNA, 948 bp, Zea mays
  Clone ID: 700094083_FLI
cgtccaatggcgtccctctccccttccctccacctcccttgcaattcaagaactggcttccttggaaagacacgtgggattcgtccttgtgttttccctgctggaagagttggatttgtcagaacagtagtggaatgcaaggaatctagaattggaaagcagcccatcgaagttccatcaaatgttactctcacattagaagagcagtttgtcaaagctaagggtccgctgggggagttatctctgagctttccaggtgacttgaagatcgtgaaagaagaatccggtaacctgagagtttataagactgcagagaccaagagggcgaaccagatgcacggacttttcagaacattgacagacaacatcatcgtcggtgtgtcaaaaggattcgacaagaagcttcagttagtaggcgtcgggtaccgtgcggcggtggagggcaacgatctcgtgatgaacctgggattctcccaccctgttcggatggccattcccgaaggcctggcggtcaaggtggaagagaacacaaggatcatcgtgagcggctacgacaagagcgcgatcggccagttcgctgctaccgtaaagaagtggaggccacctgagccatacaaggggaagggtatcagatacatggatgaagttgtcagaaggaaggaaggaaaagctgggaagaagaaatagaagtgtttgttttttgtttgccctttccatgcttcatttcattttccccgctgtaacggtcctcgtctgctatgaccgaacccgagaaaaaatcagatacatggatgaagttgtcagaaggaaggaaggaaaagctgggaagaagaaatagaagtgtttgttttttgtttgccctttccatgcttcatttcattttccccgctgtaacggtcctcgtctgctatgaccgaacccgagaaaaaatattgttctgtgctgatc

SEQ ID NO: 840 - DNA, 2122 bp, Zea mays
  Clone ID: 700094086_FLI
ccaaatggttacctgcatagaagatcttcaagaaattgtcaaccgcaggaagcatgaggccctcacagtccagacatttggaacacgcatagaaaaactacacagggagaagtatctgcagctctgtgactcagttgatatggacaaggttgattcagcaagcaccataatggatgaagaagatgatgttgttcgtagcttgcgcgcaagtcctgtccatccagtcaaggatcgcacttcaattgatgactttgaaatcatgaaacctattagccgtggagcatttggacgtgttttcttggccaagaaaagaactacaggagatctttttgctataaaggttcttaggaaggcagatatgattcggaaaaatgctgtcgagagtatattggctgaacgtgatatcttgattacagtcaggaacccttttgtggtacgctttttctattcgtttacctcacgggagaatttgtatctggtcatggagtacctgaatggaggggacctttactcattactgaggaatttagggtgcctggatgaagacgttgctcgtgtatatcttgcagaagttgtactagctttggaatatttgcactctatgcacatagtccatagggatctaaagcctgacaacttgttgatagcccatgatggacatattaagttgacagattttgggttgtccaaggttggtttgatcaacagcacagatctgtctggtcctgctgttagtggggcttcactgtatggagatgatgagcctcagatgaatgagctcgaacaaatggatcaccgagcacggagacaaaatcgttctgctgttggaactcctgattatttagcaccagaaatccttttggggacaggacatggttgcagtgcagattggtggtctgttggtgtcattctgtttgagctcattgttggcatacctccattcaatgcagaacaccccgaggcaatttttgaaaatattatgaatcgcaaaataccttggccacatgtcccagaagagatgagttttgatgcacaagatttaattgacagattattgacagaagatcctcatcaacgactaggagcaaatggtgcctcagaggttaaacaacatccatttttcaaagacattagctgggatacccttgctaggcagaaggctgcctttgttccttcctccgatagtgcatttgatactagctacttcaccagtcgctattcttggaatcaatcagatgaaaacatatatgaagcatatgagttagaggactccagtgataatggaagccttagtggaagcagtagttgtgtgagtaaccaagatgacatgggggaggacagcactggcctcaatgagtttgaatctagtgcaaatgtcaattattctttcagcaacttctcgttcaagaatctatcacaacttgcttccatcaactacgatctgctcaccaaaggattgaaggatgatccaccgccaagaacagaaatgtagcagttaatctaaatttggatggactcatttgagtactcagacagtctacaaggtgctcgtgggatgtaggtcttgtacatatcaaagtgtgaggcatggtctgttcctattgaggctgttcctacatctcgcggatccgagtacagttttggtgttgccttgttttcatgactattgccatgccatcatcagtgaaatcacccttgaccaaatttggcattcgacctaggagcgctgtctttttggttcgtctttcctttttttttagtcctattatgagccttgggtttacggagattggtcaaggttactgtattcagaatacagctcctgaagacgtaggcgggtttcagagaattgccattctggcatacagttgactctggttcgttaagctggtagcccgctggacttcctgcggccagaactgtccacaacattttgatggccgtggaatataacattttgcttaatgtgtccagtgtccaacagaatcagggacattttaagaagaatattaaccgattgacattataaggatatcaaatggaagcggcgttttatgcaattcaaaattcgatgggcatcgcccagtagtcatattgtgagtatctgtaggctagtcggaat

SEQ ID NO: 841 - DNA, 1106 bp, Zea mays
  Clone ID: 700094130_FLI
aatgagcagggctgattgaagccacagctcgcagagcaggaccaatacccagaagccttgcccagaatttctgcatgaccgattggctgcaaagcttaagcattggaaggctgaatttgttactacactgcagcattactggttagggacaaagctactatgggcagatgttagaatctcatcaagattactggtgaaacttgctggtggaaaaagcctttctagaagagagaggcaacagctgacacgcacaacagctgatatcttcaggctggtaccatttgctgtgttcatcgttgttcctttcatggagttcttactgccagtgttcctgaagttatttccaaacatgcttccatcaactttccaagacaaaatgaaagaagaggaagcattgaagaggaaactaaaagcaaggatggaatatgcaaagtttttgcaagatacagcaaaagaaatggcaaaggaagtccaaacatcacgtagtggggatataaaacaaactgctgaagatctggacgagtttttgaacaaggttaggagaggtgaacgggtctccaatgacgaaatcttgagctttgcgaagcttttcaatgatgaacttactttggataacatgagcagatcacgcttggtaaatatgtgcaaatatatgggtatccggccttttggtacagatcactacttgaggttcatgcttcgcaaaaaactgcaagacattaagaatgatgataagatgattcaagctgagggtgttgaatctctttctgaagaggagcttcggcaagcctgtcgggaacgtggtcacctaggtctactgtcaactgaagagatgagacagcagctccgagactggttggatctctcattaaatcatgcagtgccatcttcacttctcatactttcaagagcttttactgtatctgggaaagtgaaacctgaggaagctgttgtagcaacactatcttcactaccggatgaagttgtggatacagttggaacagtactgccatctgaagattcagtttctgagaggaggagaaaacttgaatttcttgagatgcaagaagaacttatcaaggaggaagagaaaaggaaggagaaag

SEQ ID NO: 842 - DNA, 818 bp, Zea mays
  Clone ID: 700094136_FLI
ggtaaaactacatttgtgaagaggcatctcactggagagtttgagaagaaatatgaaccaaccattggtgtggaagttcatccgttggatttcaccactaactgtggtaagatcaggttctactgctgggataccgcagggcaagagaagtttggtggcctcagggatggatactatatccatggccagtgtgcgatcatcatgtttgatgtaacctcaaggcttacttacaagaatgttcctacgtggcatagggacctgtgcagggtctgtgaaaacatccccattgtcctctgcggtaataaggttgatgtgaagaacaggcaggtcaaagccaagcaggttactttccacaggaagaagaatctgcagtactatgaaatttctgccaagagcaactacaactttgagaaacctttcctgtaccttgcaaggaagctggctggtgatccgaaccttcactttgttgaagctgttgctcttaagcctccggaagttaccatcgacatggctatgcagcagcagcatgaagctgagcttgctgcagcagctgcacaacctcttcctgatgacgatgatgatctgattgagtagaaaggatcatgagtcttggacttgagcaggagttgtgccttgcacgatttaagttgttctagggtggactctctcttgagttatcattgtctggatcatctttttctccttggacttgttgcaacttttgagtgtggaaatggattggaatagtcgccatgaatttgctggctactttatacatgtctttgttcataaaccttgttttaagatgaagttgtggc

SEQ ID NO: 843 - DNA, 303 bp, Zea mays
  Clone ID: 700094145_FLI
gccgcgggccccgccgtcgtgtacctcgtccccgaagagcaggcgtggcaggtggcgctgcaggccgtcgccgcgctcgtctgcgtggtcggaggcgccgccgcggtggccgcgtccacgtttgtgtccaggctgcagggctcctccagctgacgagcgcatttgcagccgtatctaatttcccgtgcatggctaagcagagaattgctctatgcttataacgtaataaatagtgcgtgcgttgcaacgggaacatataatatcacgataacttatatataaaatgtgtgttatactgttatt

SEQ ID NO: 844 - DNA, 974 bp, Zea mays
  Clone ID: 700094167_FLI
ccttccctccctccctctccccgcgggccgccagaggcaatttcgccctcgattcgaccccgattcgtccgcccgcgaccgggattccctccgccaagcgcggatctgaacgctgcgctccgtgtcgccgctcgaatccgccatgaagggggccaaatccaagggcgccgccaaggccgatgccaagctggcggtgaagagcaagggggcggagaagcccgccaagggcaggaaagggaaggccggcaaggaccccaacaagcctaagagggctcccagcgctttcttcgtgttcatggaggaatttcgcaaggagttcaaggagaagaaccctaagaacaagtctgtcgctgcggtggggaaagctgctggcgacaggtggaaatccctgagcgagtcggacaaggctccctatgtagccaaggctaacaagctcaagctcgagtacaacaaggccatcgctgcctacaacaagggcgagagcactgcagctaagaaggctcctgccaaggaggaagaggaggaagatgaagaggagtctgacaagtccaagtcggaggtcaatgacgaggatgatgaagagggtagtgaggaggatgaagatgatgacgagtgatggagctcctcgagacaatggaccgtgcttcatccaacaatggagcggctacacaaggccccgtggcgatcacaaaaaaggagcctatatccatgtactagaattattcagtttcactccacatcgtgatgttttatttttacttttgtcgtgctataacggatagcgctcctcgttggcgccactggcgggtggttctgcctctggtctggtgtgtttgtgtgtggtcacacttgccagccagcagaggcgcctgcttgtacctagattactgtttccattgtcgtcatcatcggctaacattgtcataatgtcagtttgggtaatgttagattaagtaattattgtgttctgtatt

SEQ ID NO: 845 - DNA, 1044 bp, Zea mays
  Clone ID: 700094182_FLI
acccaaactgccatgcgtgagaatagatagacagaaagaacaggaactcaaccaacacaagacacaacaagctgcagccgcggcaggcatggggcaccgcgcgcactgacaccgggccccaccaccattaccacccgacgcacactttatttagcccacgtcactcgcagcccgcaccggacacgtccacgcgacagtcactgctagctacgtaccgggctacgtacgacacacacacacacacacacagagagacgccagtaaccgtagcgtactgaacagcaaaatcccgtgtcatactgccatgtacgcgcgcgagagactaccccgccacgcgcgcacgccgatcccctggggcctgggccctggccgccgccgctgcgtgcgcacggcctcactcgctggccttctcgggctcctcaggagcagcagcctccgcctcggcggccggctcctggggaccagcaggagcaggagcaggagcctccggctcgtccgcggcgagctcctcgggagcagcagcctctgcctcggcgacaggctcggccgcggcgggctcctcggcaccagcaggaggagcagcagcagcctcctcctcggcggctgcctcctgctcgaccgcaggagtctcctcgggaccagcaggagcagcagcctccgcctcggcggccggttcggccgcgacgggctcctcggcaccagcaggagccgcggcctccgcctcggcggctgcctgctgctcggccgcgggaagctcctcgggatcagcaggagcagcagcctcggcctcggcctcggcctcggcgggggcagactcctcgggcacgacggccggcggcggggtctccaccacgggcgcttcctcggccgccacgacggtcggggtctggacctcggcagtggccattggtggcgatgagaaggctgatggctacacgaaggagtggcgcggctagctagagcctagagctaataagagactaagactgagtgaagggtggagctgcaagagtgagcgaccagcggagagtgagatggatcgag

SEQ ID NO: 846 - DNA, 1091 bp, Zea mays
  Clone ID: 700094210_FLI
cgcgagcaacagcagcgaggtttaccccaattccccatttcccgtagcacggcagacgcgctcccttctgatttctgaatccccgacgccatggcctccgcaccgacgccgccgcccctcctcccggtgaccaaccctgcgtccggatcgtccccggccgccgccggaggctccgatgcgccgatcgctacgccggctttccggctcttcctgagccggatctccgactcggcgcggcgctcgctgtcggatcgccggccgtggggagagctcctcgaccgttcggcgttctcgaagccagactctctctccgacgccacctcccgcctgcgtcgcaacctcgcttacttccgcgtcaactacgccgccgtggtcgccttcgcgctgggggcctcgctcctggcgcaccccttctcgctcctcatcctcctgggcctcctcgccgcctggtgcttcctctacctcttccgcccctccgaccagcctgttgtcctcttcggccgaaccttttccgaccgcgagacgctgctggggctcgtcggcgcgtccttcatcctgcttttcttcacctccgtcgcgtcgctcatcatctccgggctgctcgtcggcggggccctcgtcgcggcgcacggcgcgttccgggtgccggaggacctcttcctcgacgagcccaacgcgccccccggcagcagcgcggcccaagggctgctgtcattccttggcggacccggatctggggtttgaggcggcggagggcaagatctggtagggttcttgggctcgacagatctactggcttagtggtggtttcgattgatgcaccggcttctgcgaagattagcaaattcatcgagattttaccatatggctgagtttagtgccaagtatcgagtaatatgagtttgtggtgtcagactttcgatatggactgtatcttcattcgcacgcagtaatgatacgttgatatgcttcactcactcgttcagtattctattagtatttccttttcctacacttgataaatgcttgtggaaacttgtgataatttctgaccatgagtgctgaagagtgatgtgtgatgcattgaactt

SEQ ID NO: 847 - DNA, 1611 bp, Zea mays
  Clone ID: 700094238_FLI
tgtcaagacgacatgcctatggtacgaagagctgctgcatctaatcttgggaagtttgctgcaacagtggaacaaagtcatttgaagacagaaatcatgtcaatgtttgatgatctaactcaagatgaccaagattcagtgcgactattggcagttgagggttgtgctgctcttgggaagttgttggagccccaagattgtgcagcacatattctcccagttattgtaaatttctctcaggataaatcttggcgtgtgcgctatatggtggcaaatcaactgtatgaactatgtgaagctgttggtactgagcccacaaggggtgatctggtgtcagcgtatgttcgccttctctgtgacaatgaggctgaagtgcggattgcagctgctggaaaagttacaaaattctgcaaaatattaaacccacaaattgcaattgaacatattcttccgtgtatcaaggaattatcatcagattcatctcagcatgttcgttcagctttggcatcggttattatgggaatggctcctgtattgggaaaggacgccactcttgaacaactgcttcccatttttctttctttgctgaaggatgagttccctgatgttcgactcaacattataagcaaacttgatcaagttaaccaggttattggaattgacttgctgtcgcaatcacttctgccagccattgtagagctctctgaagataggcactggagagttcggcttgccataattgagtacatacctttgttggccagccagttaggtgttggtttttttgatgacaagttaggggcactttgcatgcagtggttggaagataaggttttctcgatcagagatgctggtgccaataatttgaagcgtttgacagaggaatttggccctgagtgggcgatgcaacatataattccccaggttttggagaagataaacaacccacattatctgtatcggatgaccactttgcaagctatttctttgctagctcctgtcatgggtcctgatatcacatgccaacagttgctccctgtcgtcattgcttcttcaaaggacagggttccgaacatgaaattcaatgtcgctaaagtcctgcaatcacttgtaccaatccttgatcaatctgttgtggagaagacagtgaaaccatgcttagttgagctcagtgaggacccagatgtagatgtaagatactacgcacaccaagcccttcgggcgtgtgaccaaatggtgatatctagttgactagcctgtccaggaattaacaaatgagatacatattggtctattctttttgaacattttaaagtgttatgtagtcttaaaaatattgtaccaccaatgacgttgatgcatctttttattaattatgtgttttttgatttaggtttagtttagtttttggatttaatcaaccttgggaagtaggtgcacacatgatatttgtgtgattgacctgtgcatgacttgtgctgttggtaggtcactagtgtaagcacattattttatagtccgctttgcttagtgttgtgcgcgggaactgtatgcgttgcttgttcagacatgaagttgtgcgcagaaattgtatgcttgtgaatttgtttt

SEQ ID NO: 848 - DNA, 233 bp, Zea mays; identical to SEQ ID NO: 603
  Clone ID: 700094260_FLI

SEQ ID NO: 849 - DNA, 1395 bp, Zea mays
  Clone ID: 700094281_FLI
gagaagtgggaggctgctgcggtcctcgcccgcgtctgcccgtcgtctccacgtgggggcgtgcccggtaccggcgcgacgagaagccttacgcctgttcaagacgtcaggtgttggtatttgggttgcaattgagtgattgggaaacctgactggacagaagcattgttggtcaaccaatgggaagcaatgaccctagcacaccctccaaggcttcaaaggcatcagaacaagtacttgaaacagtggatcaacctccagctaccacatccagtggaacagtttcagtttaccctgaatggcccagctttcaggcataccaagcaattccaccacatgggttcttcccccctaccgttgctgcaaatccacaggcccatccatacatgtggggagctcagcccatggtaccaccttatgggactccaccaccaccttatgtgatgtatccacctggagcagtatatgcccatccctctacacctcctactatgcatccgtttagtcattaccctatgccaacaaatggacatgctgaaactcctggaaccgcgccaagtgctccagaaatgaatgggaaaagtgagcctggcagaacatctgctccatctgccaatgggattacctcgcacagtgagagtggaagtgagagtgagagtgaaggaagtgatgccaattatgaaaatgattcacattcaaaggacaatgatggaaaggaagatggcaattctcagaatagcatatcttattcagcatcacaaggagtgttaaaccaaaccatggcgatgcttccaatacaaccgggcgcaatggttggaggagtttctagctccacagctaacttgaatattggagtgcactactgggaagctccaggttctgcagctgtctctgcaacgcatggcaaagcaccagctggttcagctcggggagaccaatgggatgaaagggaactcaagaagcaaaaacggaagcagtctaatagagaatcggcacgcagatcccggctgcgcaagcaggctgagtgtgaggagcttgggcaacgtgctgaaactctgaggtcggaaaactcgtctctcagggccgagcttgaacggatcagaaaggagtacgaacagctactttcgcagaacgcttcactcaaggaaaagctggggggcagcagtgacccgattcctgatatgaatgaacagaacgacggcaacggcagcgacaagaagcaatctgattccgatgcccagcctgggagcgagtcttgacccgtttagctcaggatccttgggaatgcacattgctatttattttctcgaacatggttgaacagaacataggagaaaaagaattgtttatgtaactcttaccccttgactggctaatgtctctgacggcatgtat

SEQ ID NO: 850 - DNA, 909 bp, Zea mays
  Clone ID: 700094293_FLI
cgagagacttgaccaagcagcagcagcagggatggcgcctctgaagctgtacgggatgccgctgtcccccaacgtggtgcgcgtggccaccgtgctcaacgagaagggcctcgacttcgagatcgtccccgtcgacctcaccaccggcgcccacaagcagcccgacttcctcgccctcaaccctttcggccagatcccggctctcgtcgacggagacgaagtcctcttcgagtcccgtgcgatcaaccggtacatcgccagcaagtacgcgtcggagggcacggacctgctccccgcgacggcgtcggcggcgaagctggaggtgtggctagaggtggagtcgcaccacttctacccgaacgcgtcgccgctggtgttccagctgctcgtgaggccgctcctgggcggcgcccccgacgcggcggtggtggacaagcacgcggagcagctcgccaaggtgctcgacgtgtacgaggcgcacctcgcccgcaacaagtacctcgccggggacgagttcacgctcgccgacgccaaccacgcgtcctacctgctctacctcagcaagacccccaaggccgggctcgtcgccgcccgcccccacgtcaaggcctggtgggaggccatcgtcgcccgccccgcgttccagaagaccgtcgccgccatccccttgcccccgccgccctcctcctcggcttgacctcgccttgcgttgcgccgttgcctgggtcgcggatgcgtcggagccccgagtcgaataaaagaggcagcatcctgtcttgcatttgctgctgcgccatgtgttaacagcctgtgtaataaacactgttgctttcgtgtgtgttcattgccttttggttggtctttgcatatcctactagtgctgatctttttgtgaagcttggattggat

SEQ ID NO: 851 - DNA, 1101 bp, Zea mays
  Clone ID: 700094315_FLI
cgaagtgataagccaccgcccaccgccgctggcatgagcccgatggcgctgctcacaccactgcccattccccttctctcgccgtattgccaacgcgtctcgtctccgtcgcttctggcggccggggcagttatcagacctctcatttgtctttccccccacaatcaccgccaccacgatgcactctacccctctgtccccaatgtgtggccacgccaccggcgccgccgcaggggcgcagttgcttccgtcgaccaggaggagtctagtgcctcggaaaccgcagtcgctcccgaggaagacctggggccaccggtatcctctgatgcggctgccgaggacggggtcgcgacttctgcccagccggcggaggcgagcccggaggacctggagaacatccgcgaaattaaaagggtactggagctgctgaagaagaacagagacatgacctttggcgaggttaagcttaccatcatgattgaggaccctagagatatagaaagaaagagaacactcgggatagaggatcctgatgaaattactagggatgatttagctgacgctttggctgaggttaacgaaggaaagattccagagaatcgtgttgcacttcagttgcttgccaaggagatggcagaatggccagacattgagatagaagctccaaaaaagaagagcaaacctgggaaatctgtctatgcaaaagccacagatactggcatcgatcctgagacagctgctaaaagacttaaccttgactgggactctgctgctgatatagatggcgaagaggaggacgatgatgaaactgaagtgccgtctgcagtgggatatggtgccttgtatttgttgacagcttttccggttattattgggatctcagtcgtcctaattcttttctacaattctctgcagtagctcctccccttcttgagtgagaatgtgagatgttgctgcattcttgtaaatctgagttacaaggctagttaatcagtaacattttttacgccagtgttgcaaagatatgacaacttgtatagatgtcaaattccaaattttggaatgtaagatagttttttttaaaaaaatcgtgtgaaatat

SEQ ID NO: 852 - DNA, 1835 bp, Zea mays
  Clone ID: 700094352_FLI
ctttgctagccagcatatacttacacgtagctagcttaataatcagcagctggtgcagcaagagtaacagctagcgacgacgaccatatggcggcgaagcagccagtcgtcgctgctgctgcctccggccaccccaagatgggggaggagaagctgatcatccggccggagaaggtgcggttcatagacgtgctgtcgatgctgctcctgaggcgccccatcaccagctacgcattcgtggaggccggcgaccggaccgccgccgacctgggcagcacgcccggcgactggctcgtcgcgctcacgcaggtcatccagaaggcgctcgccggcgcctactacccggctctcgtggtcggcgccgtcgtcgagttcctcctcaacttcgtcgcgctcaacaatggcatactcggcatctttctcaacctcttcagatgtaagctggtgatcccactgaaccgggaggcgcccaacttccggtccatgatcgggatgatcgacgggaggacggagctgaagccgctgccagccagcggcggcccagaggaccggcggctgcaggtggtgggcgtctccgccgccgccggatccggcggcgatgactactacttggacgtggagagcggcagcgcggcggtgccgctggtgcagcagcagtacgtgaacgggcggctcgtccgcctccgcaccttctccgtgttcgaggtgagcatgatggccgccaagatcgcctacgagaacgccgcctacatcgagaacgtcgtcaacaacgtctggaagttccacttcgtggggttctacaactgctggaacaagttcgtgggcgaccacacgacgcaggcgttcgtgttcaccgacaaggcagaggacgcgagcgtggtggtggtgtcgttccggggcacggagcccttcaacatgcgggactggtccacggacgtaaacctgtcgtggctgggcatgggcgagctgggccacgtccacgtcggcttcctcaaggcgctgggcctgcaggaggaggacggcaaggacgccacgcgggcgttccccaaggccgcccccaacgccgtcccgggcaagccgctggcctactacgcgctgcgcgaggaggtccagaagcagctgcagaagcacccgaacgccaacgtcgtggtcaccggccacagcctcggcgccgcgctggcgaccatcttcccggcgctgctggcgttccacggggagcggggcgtcctggaccgcctgctctccgtggtcacctacgggcagccgcgcgtgggcgacaaggtgttcgcgggctacgtgcgcgccaacgtgcccgtggagccgctccgggtggtgtaccgctacgacgtggtcccgcgcgtgcccttcgacgcgccgcccgtcgccgacttcgcgcacggcggcacctgcgtctacttcgacggctggtacaagggccgcgagatcgccaagggcggcgacgcgcccaacaagaactacttcgaccccaggtacctgctgtccatgtacggcaacgcgtggggggacctcttcaagggcgccttcctgtgggccaaggagggcaaggactaccgcgagggcgccgtctcgctgctctaccgcgccaccggcctgctcgtgcccggcatcgcgtcgcacagccccagggactacgtcaacgccgtccgcctcggcagcgtcgcctcggcgtagcttttggattgcatgttcgtttccatgcatgtgtatcattgcatgcaataattggatgaaataaacagcaataagcttcatcagtattattattgttgttgttgaatatatgcatcctcttctctctatatagaattatagat

SEQ ID NO: 853 - DNA, 1075 bp, Zea mays
  Clone ID: 700094360_FLI
cctgctcatgatggcgtccgccaactgcagcgacctcattggcggcgccgaccgggtgggtgataccgacgaacaactgctctgggactgtgctgcgccctcggtgccgcccacccagatatgggacttcaatttaggacggtcaaggcatcacgatgagaaatctgctcttgaagttggatacggttctaaccatggaggctttatgattaagagttacagtgacatgcttaaggaaatttcttcggggacaacgaaagatctggaagatatttatgaatcaagatactgctcaaccgccgaagatatcatgtcctctaatatctgtcagctgtcatcgaaaaatgtgagcaccgggagcaacaaacggaaggtgaggtcatgtgctgcgtcgacgatggatggaccaacgacctccgggaaccacaaccacgtacccgcttcagcttcaggtccaggagcagcgctcaccagggagatctccttcggggatcagacggtgtccgcccccgcggccgagaccgagaggcctgccgccgtgaggatcgacagcgagacgcttgcgcagaacagggacagcgccatgcagcggtacagggagaagaagaagaaccgcaggtacgagaagcacatccggtacgagtcgaggaagctgcgggcggacacgaggaagcgggtgaaagggcggttcgtcaagtccaccgaagcactcaacgccgccaggtacaacggatgaggcagccatatatatatatgcatggcctgtgaagcccgcgagtttgctgcgcgcctgcgttattacgtgcggtagcaacggatgaacggggagctaggtactgctacctggaggtgctacgtatgtatggcgcggccggaatcgctacgcacgcggcccaagtttaattttgcgttgaagctatagcgatcgtggccattgttgggcagtcaactccagagattgcacggtactgcttgtttgtaacagacgaccctccctttccccttttttctctgttgttgccgtcatccccaccagaacagaaagtatgtagcttacctacagcaccgatttacc

SEQ ID NO: 854 - DNA, 1516 bp, Zea mays
  Clone ID: 700094361_FLI
ggcgtatacaacgtcagcgtgtccctcgagttccacggcgtccctgcttacctcggcgacgcggggtcctcctcagctgccggctctgcggaacccggcggccaggcgacactaaaactgccggcgtcgtacttccagccggcggatctgatcctgccaatctcggagggcatgggcagcagcaatggcttttggttccgcatccagaattcgtcggacccgcggtccaagcttgtgagaattccatcgaacacctaccgcgcagtcctcgaagtcttcgtgtccccgcactcaaacgacgagttttggtattccaacccgccggacctctacatccgcgagaacaacctcaccacgggacggggcaacgcggcgtaccgcgaggtcgtcgtgagcgtggaccgccatttcgccggctcgttcgtcccgttccccgtgatctacacgggcggcatcaacccgctgttctggcagcccgtggcggcgctgggcgccttcgacctcccgacctacgacgtcgagctcaccccgtttctgggaatcttggtcgacggcaagccgcacgagatcgtcctaagcgtagtggatggcatcgccgagtggcttgttgacgccaacctgcacctgtggctggaccccgcttcgacgaatgtatcggccgcgctcagccggtacaggacgccgcgtctgtccatcaagcgccggtacagcacccggcggccactggacggaaagttcaagatccgtgccaagaggaagtcccagttcagcgggtgggtgaagtcgtcgttcggcaacttcacgacgaacgtggagacggagctggaggtgaccagcctggtggacttcaccagccagggcaggaacaagactgtccggctgcaggtggagcaggacacggaggtcgtcgtccggtcgtcggagacgcggaaggcggtcggcaaggtggagacggaggctaagtacccgctgtggctggagatggtgacggaggacggcgagaacgacacctacgtgatgagggcgaacctgacacactccctcagcgtcgagaccgacgccgaggccgaggggctgtttgatggcgagacgagggtggtcgacgagcaagccgccgcggggtggatgctcgtcagaggccacgacgtgctcgacggctccgcggctacgacgcagacgtacaggtatagcaacgaggcggggaggtatgagcgagccatcgacacactggatggtgcggtgctgagcgacaacgtgaccgagagctactgggcctcgggagacggcttggcttggcttgctgctggacccgcgggaggaggtgccatggaactgtgacggccagcagtttggacattactgctatgtaggagtccgtcgtcagactgggagttgagttgtccagacttcttcaaaatgtgttgattacgtgcgatcgttatgtgtgcatatgtaattctcctgtgcattcttgtttcataagtgaaatcgacctacgggtactatatttgggttt

SEQ ID NO: 855 - DNA, 1423 bp, Zea mays
  Clone ID: 700094388_FLI
gaagaagaggaggactggaggaggaagaagactatcgatcgatcgatccatccatccatcgaattaatggcggcgacaacaccgtacaagcccaagaggatcctgatcacgggcgccgcggggttcatcgcgtcccacgtggcgatccgcatcgtgaacaggtaccctgagtacaaggtggtggtgctggacaagcttgactactgctccaacctcaagaacctcctccccgtcatgggctccggcggcaacaacttcaagttcgtcaagggcgacatcgccagcgccgacctcgtcagcttcatcctggccaccgagggcatcgacaccgtgatgcacttcgcggcgcagacccacgtggacaactccttcggcaactccttggagttcaccaagaacaacatctacggcacccacgtcctcctcgagtcctgccgcaccgccgcccagatccgccgcttcatccacgtcagcaccgacgaggtgtacggcgagactgacggcgacgccgtggtgggcaaccacgaggcgtcgcagctgctgcccaccaacccgtacgcggccaccaaggccggggccgagatgctggtgatggcgtacggccggagctacggcctccccgtcatcaccacgcgcgggaacaacgtgtacgggcccaaccagttcccggagaagctcatccccaagttcatgctgctggccatgaggggccagcgcctgcccatccacggcgacggctccaacgtccgcagctacctctactgcgacgacgtggccgaggcgttcgaggtcgtcctccaccgcggcgaggtgggccacgtctacaacatcggcaccaagaaggagcgcacggtgatggacgtggccagggacatcagcggcctcttcggcctgcgcccggaggaggccatccagttcgtcgacaacaggcccttcaacgaccagaggtacttcctcgacgacgagaagctcaaggggctcggctggcgcgagaggacgcgctgggaggatggcctcaggaagaccatggagtggtacgtggccaaccccgactactggggggacgtgtccggggcgctgctgccgcatcccaaggcgggaggcgtcagcgtcagcgtcacgacggaccacggcgcccggggatcgtcggagatgctcgacgatcgtttcatttccatcccctcttctccgggagcggcgacggttgcaggagacgacgatgacggcgcaccagctgcaatgccgtacagcaatggcggcgccaccaatggaaccaccaccgtgcattgattgcatgcctgcctgcctgggtcgtcgtttcgtcatatcacatcacatccacacctgaacaattataattgttttttcaagctatatattgtattatttgctactactactagatcgagtattattgttatgt

SEQ ID NO: 856 - DNA, 1535 bp, Zea mays
  Clone ID: 700094395_FLI
gtgccactcccatccaccacaaggcttggcttggtgggaagaagacaaacgccggcacgcgcacgcagacacgatggcgatctgcagcgcgcacactaccacctccctgcgctccccatgcacgaccgtctcgaacgcaggtctgaggcagaagcaagtcatcttcgtcaccagcaacaggaggagcggcggcggcaggaggcacggaggggcaaggagcttccaggtctcgtgctccgtcgacaagccggtggtgattggcctggcggcagactcagggtgcggcaagagcaccttcatgcgccggctcaccagcgtcttcggtggcgccgcggagccgccaagggcgggaacccggactccaacacgctcatcagtgacaccacgacagtgatatgcctcgacgactaccattccctggacaggaacggcaggaaggagaaaggtgtgaccgcctcgaccctaggccaacaactttgatctcatgtatgagcaggtgaaggcgatcaaggaaggccaggcagtcgagaagcccatctacaaccatgtcactggcctcctcgaccctccggagcttatcgcgccaccaagattttcgtcattgaaggtctgcacccaatgttcgatgagcgagtgagggacctcttagatttcagtatctacttggacatcagtgatgaagttaagtttgcatggaaaatccagcgggacatggcagagcgtgggcacagccttgaaagcatcaaggccagtatcgaggccaggaaaccagattttgatgcctttattgatccgcagaagcagtatgctgatgctgtgattgaagttctgccgacccagttgattcccgacgacaacgaaggaaaggtgctgcgtgttaagctcatcatgaaagaaggggtgaagaacttcaacccggtttatctctttgacgaaggatcgaccatcagctgggtgccttgtggaagaaagctcacatgctcttaccctggcatcaaattttcctatggcccggacacttacttcggaaacgaggtatctgttctggagatggatgggcaattcgacagactagatgagctcatctacgtggagagccatctaagcaacctttcaaccaagttctacggagaggtgacacaacaaatgctaaagcatgcagacttcccaggtagcaacaacgggacaggtctcttccagaccatcattggactgaagattagagacctctatgaacagattgttgctgagagggctggtgtaccagcggaagcagcaaaagtttaacgatctatgcattcagatgtcctaaaactacagctctccgaactcaatgggagtaacaaccttcgcatctgttgggatatatggcgagctaggaggtatagaaatgtcattgcagaactcaggaaaacgtgcaatggaatttcttgaaatccctcttgaagagagtgagaactcgatagatcaagaatcaccacacgttgtattaatcgtatggtataatatttatacatgtacaggatgagctatgc

SEQ ID NO: 857 - DNA, 2445 bp, Zea mays
  Clone ID: 700094420_FLI
ctcagggccatatggagcagctcgaggcgtctgcacaccaccagcagcttgatcagtacttaccgatgttcgatctaccacccaagatcctatgcagagtagtcaacgtggaactacgggccgaagctgattcagatgaagtttatgctcaaattatgttgcagccagaagctgatcaaaatgaactcaccagcctggacgctgaaccacaagaacgtgaaaaatgcactgcccattccttctgcaagacactgacagcttcagatacgagcactcacggcgggttttctgttcttcggaggcatgctgaggaatgtcttcctcagctggacatgtctcaaaatccaccttgccaagaactggttgccaaagatctccatggcactgaatggcattttcggcacatttttcgagggcaacccaagaggcatctccttaccaccggctggagtgtctttgttagctcaaaaagattggtttctggggatgcattcatcttcatgagaggtgaaaatggtgagctacgggttggtgtaaggaggctcatgagacaagtaaatagcatgccgtcatctgtcatatcaagccacagcatgcatcttggagtattggccacagcctcccatgccatctccactggaaccctcttttctgttttctacaaaccaagaactagtcgctctgattttattgtgagtgtgaacaagtaccttgaagctaagaagcagaaaatatctgttggaatgaggtttaagatgagatttgaaggtgatgatgctcctgaaagaaggttcagcggaacaatcattggcatcgggagtttgccggcaatgtcaaaatctctgtgggcagattctgactggagatctctaaaggttcaatgggatgaaccttcatccattcttcgtccagatagaatctcaccatgggaagtggagccactggatgcagctaatccacaatcccctcaacctccactaagggctaagcgtccacgacccccagcttcaccttgtatggtttcggaactgccttcaggttttggactctggaaatccccaattgaatcatcctgtacactctcattttcggaacctcaacgggctcgagagttatttccttcaatccccacgtcaaccttgtcatcttcatcaaatgtcagttttaattcaaagaatgagccgtccatgctaaccagtcagttctactggtcagcaaggcatacaagagctgactcctgcgctgctagcaccaacacagtcgtaattgaaaagaagcaagagccaagttctggtggttgtagattgtttggaattaatatatgctcagctgaggaagaagtattacctgaggttactgctccaggtgttggttatgagcagactgctgcctctgtagagttgaactcggataagctctcacagccatctgatgtcaacaattctgatgccctagcagctagcagtgaacgttcacctcttgaatcccaaagccggcaagtgaggagctgtaccaaggtaattatgcaaggaatggcagtaggaagggctgtagacctgacaaagcttagtggctacagcgatctttgccagaagctggaggagatgtttgacatccagggggagctgggttccacactaaagaaatggcgggtcattttcactgatgatgaggatgacatgatgcttgttggagatgatccttgggatgagttttgcaggatggtgaaaaggatttacatttacacatacgaggaggcaaagaagctgacatccaagtcaaagttaccggttagcagtgacagcagcaagctgagcgctgcgaactcactgtctgaatgactatgaacaaaaactgcagagtgctaacgtccctctaattttgttatttccatcatttgattatgggggtgaatgctcacggttgctccgtgggctgaagttgtggttggcattcaactgccttgagttttggaggcttttggactgccttgccagcatgagccccctggaagaggcaccctggcatctgcgtgccatttcccatttgttcgtgccgtttggtaggagtatccattggcttatttagcaggtccctggtttgaagaaagaagcggtcagctgcaagatggacggtgccttgcctcttcttcgactacttagctagtaattaggactatgtatgtaatgaatgtatatagtgccattaagacgcccatgccctggtattgaggtcccggcatttgtatgaatcaattgttcggaaattgttacctttagcagcaacgaacctgagggtgtagggtggccaggtgggagaagttgtatgtttctttcagtaacaatctttgtgcaagtgatctgtatatagtctactgttttaataagcaatgttgtgcaacttgcgctcctacaccctacagtacagtggggcttttcttgtgct

SEQ ID NO: 858 - DNA, 1198 bp, Zea mays
  Clone ID: 700094439_FLI
cacgacccaaattattgagagcccaggaagtgagagatgagcctgcagattccggtgagatcaggcgccctgcgccgccttctccttctaggtggcgccgagggtctactgcgcacctactccaccggcgaccggcgccggcgggtgatccgcgaggcaaggcaagaggaggaggacgaagcgttcctccgcaccctcaacttcggcgctgaccccgagaacaaccctcttcccccgccgccgaggcatggcagaggattatccgacgcctcagccgggaagcagcagcagcagcccgagcgaagcgcgcagaaggtcgtcggggagacgctgctggagaagcttaagctgggcgatggtccctccgccgccgctgctataggaggcggcgatgagccacggcagtctgaggacgagcctgcgcccgcgcagccggtggacgtggacgagatcttccgaaagatgaaggaaaccgggttgatcccaaacgccgtggccatgctcgacgggctgtgcaagaacggcctggtgcaggacgccatgaagctgtttggtctaatgcgagagaagggagccatcccggaggtggttatctacacagctgtcgtcgaggcattctgcaaggtggctaagctagacgacgccgtgagaattttcaggaagatgcaagggaatggagtcatccccaatgcattcagctattggctcctgatacaggggctgtacaaggggggcaggctggatgatgctgtcgggttctgtgtggagatgtttgaggctgggcttgcaccgaatgcggagacgtttgtaggcttgcttgatgcagtgtgcaagacaaaaggtgtggatgaaggcgagaatcttgtgaggagcttccaggacagaaacttcgctattgatgagaaatcaatcagggatcacctggacaagaaaggcccattctcaccagtagtgtgggaggtgatctttggcaagagaaaatcagaccgaccattctaatctctaccagaaagtagtatgtgcacactctcatcattttgttagccttgtagttattatttctcaagagtttgcttgctttcatggttaaacaaatggctaccatgtcttcttttatggaatctataattatggcgatctgtatgcacttttgtcatatgcaattcacctccatctattcaactgccccaattaggac

SEQ ID NO: 859 - DNA, 2203 bp, Zea mays
  Clone ID: 700094445_FLI
gccactttgacgatgaaaggggtggaagatgatgaagacgatctgaagacgctaaatatggagcttaagcgggactggtccagagggactaatgcgttcgagttggctttccgtaggaacaaagagatctctgcattcttggatcagagggaaaggaccaaagtgccggctgatacttcagtttctgctccagaagctgaaagctatcaggaggaagctgctccagaagatgagggaagtagtgaagaattgagctctgtgtcagaagtagcaactgatgtttctcctcctgtatctgatgcctcctctcaggtgggaattcaggattctacttctgtggcaaatgctgctgaggaccaaactgtaggatctgaaagttcacctacaattagtgttgaactgtcctccaacgggaccccagatagctctattgtgtcttcagtttcagaaactgcagataaacctactgaacctgaagaatcttcagcggtagaagaggttcttgtaactgcaagcagcgaggcggggaaagaaccagctgctgacactgaggctgtaccagccttgactgagaaaactggtgccgaggttgctgctgctgctggagttgcacaagcaagcaccacgacagccactatttctcctacccttgtcaagcaattgcgtgaggcaactggagcaggcatgatggactgcaaaaaggctcttgctgaaacagggggtgacattgataaagctcaagaattcctacggaagaaagggttggctgctgctgacaagagggctggcagagcaacagctgagggaagagttggctcttacatacatgacagcagaatcggggtccttattgaagtgaattgtgagactgactttgtgtctcgaggtgacattttcaaagagttagttgacgatcttgccatgcaaattgctgcttgccctcaagtgcagtacatctctattgacgacgtccctgaggaggttgtgaagaaggagaccgagctggagatgcagagggaggaccttttgtcgaagcctgagcagatccgggctaagattgtcgaagggcgtgtaaagaagaggcttggagaattcgcgttgttcgaacagccattcatcaagaacgacaaggtcacaataagtgagtggctgaagcaaactatagctacaactggagagaatatgaaggtcaggagatttgcccggtacaacctaggtgaagggctggagaagaaaagccaggattttgctgctgaagttgcagcccagacagcagcgaagccgccaccagctcctcccaaggatgacaagcctgctgaaacaacagaatccgcggagaagaagccggctgttgcagtttcagcctcgttggtgaagcaactccgagacgaaaccggcgctggcatgatggactgcaagaaagctctggccgagtctgacggcgaccttcagaaggctcaggagttcctgaggaagaagggcctctcatccgcagacaagaaatcctctcggctagccgccgaaggactgatcggctcctacatccacgacagccgcatcggctgcatgatcgaggtcaactccgagaccgacttcgtggcccgcaacgacaagttcagggagctggtgaacgacctcgcgatgcaggtggtagcgtgtccgcaggtcgactacgtctcggtggacgacatcccggagagcgtcgtcggcaaggagaaggagatcgagatgcagagggaggacctgcagtcgaagcccgagagcatcagggagaagatcgtggaagggcggatcgcgaagaggctcggcgtgatggccctcctggagcagccctacatcaaggacgacagcaagacggtgaaggatctcgtgaaggagacggtcgcctcactcggggagaacattaaggtgcggaggtttgtccggtacaccctgggcgagaactgatcggtgtgaggccgggcggcgatccgatccctccgtcgcaacgcagccctggcatgagaagtcgggcacgtttttggttcaaggaggcggggcgcgtagctgttgttttatttagtctgtgactcggttccatctgtaattccgtatcacctgttactgctgttcgtggttcatgaagagtaagaggggttggttagtatgtccatcaaagcatatatatatatacacaacatcaaggcaaattgaattttgtatc

SEQ ID NO: 860 - DNA, 1715 bp, Zea mays
  Clone ID: 700094469_FLI
gtcgctcgccatatccccttttcccccctcccttcgtctcccgactcctgcgatccgccccacctgaaccctactccacgtcgcctcgcctcgcctcgccggttgggttgtggctgagccgatctgacccgatcgggtgggtccttgcgccgccgctgcgtgggctcatctcggtcgcccgcctgctcggctcgatcggccggggacggcggcggctagatctgcgatggagggcaacaaggacgacgcggccaagtgcctgcgcatcggcaagggcgcgctcgaagccggggaccgcgcgcgcgccatcaaatttatgtccaaggcaaagcgcctcgacccctcgctacccatcgatgacctgctcacctcccttctcaacgcgcaagacgactccccggcttcctcatcatcatcgccgcctccaccaccgcaaactgccgcagcaggggcatcggaggcagctgaggctgatgggctgagagagaggaagcacaagggcaagaagagggaggaggaggaggaggcgactcctgctgccagggagtacaccgcggagcagctcgaggttgtgcgccaggtcaagaagcacaccagggactactaccagatcctcggcctggaaaaggactgcagtgtcgaggacgtgcgcaaggcctaccggaagctctcgctcaaggtgcaccccgacaagaacaaggcccctggcgcagaggacgccttcaaggccgtctccaaggccttccagtgcctgagtgatgcggagagccgcaagcgctacgaccttgttggctcggatgagccagtagcacaccacaggagggcctccactgcccgcgcatacaatgggttctatgaggatgactttgacccagatgagatattcagaaacttcttctttggcggtatggcgcctgcaaccaccaggcagtttggacagtttggaactttccattttaggactggtgggatgcatgcccatgcccatgcccaacaaaactctggtggctcaactgtcaggatgcttattcagctgttgcctgtcctactgctgctgttgctcaacttcctgccatcctctgagcctgtctactcgctgtcccgttcatacccttatgagcataagttccaaaccccacgtggagttgcatactatgtcaagatgtctaatttcgaggagcagtatccacaccaaagcactgagcgagcgacgctggagcggcatgttgagagggattattactccataatcacacagaattgcagggctgagctgcagcgtcgccaatgggggctgtcataccagacaccacattgtgatatgcttaaaaattttgaggctgcagcaaagtaataactcatccaattctgtaaggttgacatggggagagagactgctggccactcatgtaaaggcgctgccttagccgccagcttgaagtttgaggggacattttagtttggcttagtagtaaattttgtggaataagtgcctttgataactatacaccgctgtccagatgctccctcttagtattggcaaggagtgcgttaattagttacttcaaaaagatatgcaagcttcataggggctgatcacatgcaaaccagtgtatgtatatgaagtatatctatctcattcttttaacttttttgaagtgaagactgtagttaaaacagaaatgcaactataacacaaatgtgatattcatttt

SEQ ID NO: 861 - DNA, 1015 bp, Zea mays
  Clone ID: 700094481_FLI
cacacacacagtcacacacacaccgtcctccctccttggtccttggctccccttgctaccttgccttcacagatctcccgctccccaacagaactgtcacgtctcgacgcccgggggccgtggtattacggctcgtcgcggctcggcggtggtggcgcgcagctgaccggatcgagcagcggatggacggcggcggcgggctgggcggcctgcggtggaccgcggaagaggcgtcgacgatcggaggcatcgccacggtgtcgctgctgcactccttcatccccacgcactggctccccttctccatcgtcgcgcgcgcgcagcgctggccgctctcccgcacccttctcgtcactgcatttggaggtgttcttcatgttgtttctacggctcttcttgggataactgcagttactatggcaaatactatagctggcgaagaaacagtgcataaacttgcctcgctgttgctgatttttcttggagcaagttatatcctcttgtttgccttaggaaaaggtggtcatagccatgcccataatcatccaatggaaaaaatggcagtcgccggtcttgtacttgtacctgcattatcaccttgtgcaacaactcttccagtttttcttgctgttggcaactcttcctcaatgatgattcttgcaatcattgtgctcctcttcagcaccatcacagtgatgacatccttggtggccctttcattctacggtgctagccagatcaagttccactgggtggagcgttacgacaagatcctcgtcggcacggtgctgtgccttgttggagtcttaacatatgtgttccatcatcacgatggtgatgagcatgtgcaccagaaactcgtatctccctagatgcatacatactgaagttccatctctgttgctccctatttgtatacaatcctgattatcgacttactctgccgctctggttttgctggagatacgtatcatctgatcaagtgaatatatttgagcaaactgcgtgaagtttg

SEQ ID NO: 862 - DNA, 1534 bp, Zea mays
  Clone ID: 700094492_FLI
cttttctcgcctcgtcccctcgcgcttcccgccgccgacgccgcgtctatctggtctaggaccaaatgccgcgagatcttcgcgcgtgacgccgtcccccccgccggagccgccctccgagctccgggccacggagcgcttcgtcccggatctctctggtggctcaggacagtagaaaggaaaggagaaaagcttgttgtgtctgtgtgtgagctgcagaccccgagaggatggatcagtatgaggtgctggagcagattgggaaaggagcatttggttctgcactcttggtgaggcacaaggccgagaagaagaagtatgtgctcaagaagatacggctcgcgcggcagaccgaccgcacacgccggtctgcccaccaggagatgcagctcatcgcgacggtccggaatccgttcattgtggagtacaaagattcatgggtggaaaagggttgctacgtttgcattgtcatcggttactgcgagggaggagacatggctgaagctatcaaaaaagtcaatggaaaccatttctcggaggagaaactttgcaagtggcttgtgcaacttctcatggctctcgattatctgcacgcaaatcacattcttcatcgggatgtgaagtgctccaatatatttattgccagagatcaaagcatacgccttggtgactttggtcttgcgaaaatattgacttcggatgatcttgcatcctctgtggtaggaacaccaagctacatgtgcccagaacttcttgccgacataccgtatggtactaaatctgatatttggtctctaggatgttgtatttatgaaatggcagctctcagaccagcatttaaagcctttgacatgcaagccctcattagcaagatcacaaagtcgatagtatcgccgttgcccacgagatattctggttcctttaggggactcatcaagagcatgctacggaaaagcccagaacaccgaccaagcgctgcagaactgctgaagcacccacacctccagccatacgtgctgcaggtccagctgaagtccagcccctctcgcaccacgtccccaatctaccaagctctgacggacaaagtgaagaagatgacgttcgtgagcgacaccgccgattccgcgaggaggagggctgcgagacggagctctctggggagcgagaggaccgtgacgttctgcaagccatcccccgagcgcaactccgtcagctccacgcggagcatcaaggagtacacgacgacgacccagagtgccagggagctctctgtcggcagcagcctgcaggtcgacgacgaggtcacgagtaaggctgttgtgacgaagacggcaggcgttctacggactcccagcaagagccgtgctccggcatctaagacgttggtggcggctagaagccggctggatcctccgaagacgtcctatgccagaacgaaccgtgccgagttggactcaaggacgcctctgagcaagagcagcgcgcggacggcaaggagagcatccctcccgctggcggcgtacagagcacccag

SEQ ID NO: 863 - DNA, 2230 bp, Zea mays
  Clone ID: 700094526_FLI
gccatggaaggctgagattggtcgatggcttgctgggtgtcatgctaactcttcgtctgttgatgttactgaggccatgggtgcaaaacgctgcgagaaagactgcagtgctcgtggtgtttgcaactataatctgggagagtgcagatgctttcatggatattctgggaaaggatgtgaggaggttctgaacttggaatgcaaccttccaagttccccagaatggcctgtaggtcaatggatagtttccatctgtgcagctcactgtgataaaacaagggcaatgtgcttttgtgggcctgggacaaaatacccagatcgtcctgtggcagaagcttgtggttttaaaacaattttacctgcaaaacctgatggtccaaagcttactgattggaaaacacctgacctggaaaacatacttacaacaaacagcagtaagttaggatggtgtaatgtggtccctgaggacgcgtattcatccaaagtgaagtttaaagaagaatgtgattgcaaatatgatggtctctgggggcagttctgtgagacacgtgttgaatgcagctgcatcaaccagtgctctggacatgggcattgccgtggtggtttctgtaaatgtgacagtggatattttgggattgattgcagtatcccatcagcatattcgcttgcatatgactggccctcgtggctccagacaccagtgaatttaccagatctgaaaactttgaacagtaccaccattggtgttaaggccgttgttcagaaaagaaggccactgatatatgtatatgatttgccagctgagtttgacagtcatcttcttgaaggacgacattacagattccagtgtgtaaacagaatatatgatgacaagaatagaactatatggacccagcaattgtatggtgctcagatagcacttcatgagagcattcttgctagccctcaccgcactcttaatggggacgaagctgattatttctatgtgccagtgcttgactcatgtctaataactagatccgatgatgctccacatcttctattgccggagctaccatgcacttgagtactatagaatggcacatggtcacatagctcagcagtatccttactggaaccgcacttcgggaagagaccatatctggttcttttcatgggatgaaggtgcctgctatgcaccaaaagagatttggaagagcatgatgcttgtccactgggggaacactaatacaaaacataagaattcaacgacagcttattgggcagataactgggatgatattcctttggataagagaggcaaccatccatgttttgatccaagaaaggatctagtgcttccggcatggaaggaacctaacccaggggccatatggttaaaactgtgggcaaggccaaggaacaaccgtacaacacttttttatttcaacggtaatctaggttcagcatacgaaggaggccgtccagaagacatgtatagcatggggattcggcaaaagctagcagctgaatttggttccacaccaaacaagcagggaaggcttggacggcagcatgcggccgatgtgacagttacctatctacgaactgaaaaatattatgaagaactagcaagctctgttttttgtggtgtcctgccaggggatggctggagtggccgtatggaagatagcatgcttcaaggatgcattcctgtaataattcaggatggaatttttctgccatatgagaacgtgctcaactacaatagttttgcagtccgcatacaggaagatgacatcccaggcctcataagcacactccgaggaataaacgatacgcaagtagagtttatgctgggaaatgtccgccagatgtggcagaggtttttctatcgagactctatattgttagaggcgcaaagacagaaaagactcttctctgaagaggcaccctggtctgttgaggtatcgaaacttcctgatgacgacgatgtctttgcaacgtttatacaggtattgcattataaactgtacaatgacccttggcgtcaagatttcctgcaaacaaaggatactcggctgccgaacatctgctcaagaacatcctgaagcgtttagtcaggcagcattgcaaccgtaaagaataagcatatattcttaggaacaaaagtacaaaactgtagatatttcttgcattctggacaattgttcttctgactgatagcccaatttaattagaccatttcctg

SEQ ID NO: 864 - DNA, 3011 bp, Zea mays
  Clone ID: 700094544_FLI
gaagcgtcatgcatgtcaccgtgacttgcaaagcagctagcatagggaacatcgagagagagatgagggtagcgatggtgggttccggcctaagcgggctagtggcggcgcatgagctagcgagaagtggcggcgtgcgtgtcaccgtgtacgagaaggaggaccatctcggcggcgccaagaccgttgccgtggacggcggagcagaagaaggccgtgtcctcgtcgacctcggccccgtggtcttcaacccggtgacaagcccaaacttgatggaatggtttgaaaggctaggggtggagatgtgcacatcagacatgtcattctcagcaagtatgcggctaaacaaaagtagtgaaagcttcgaatggggtagccgcagtggtatgtctggtgttctggcgcagaagagcaatttgcttagccccagattctggctcgtggtccatgagatattcaagttcaagaatcacgccctcaagtacctggaggaccacagaagtggtcctaaccgcaatgaaactttggggcaattcattctatcacatagatattcgcagctcttccaggatgcctaccttattccaatgtgtgcatgcatttggcccagtccgtcacacgaaatcctgggcttccctgctctctttgttctttcatttttccgcgacaatcagctacttgagattttgagtggctcaaaatggcttacggtcaaaggtggctcggggtcctacgtgaacaagataagggaagaattggagagtaatggttgtcagatcaagattggctgtgaagtcaactctatttcaaagtcgaacgatggataccaaattttagaggttgatggttcggtggagacgtacgataggatcataataggtattaatgcacatgatgcactaaaagtattaggagctgaagcaacaaatgaggaactgaagaatctaggagctttccattttatccggagtatcgcgtacctccactctgatgaaagtctgatgccgcgtaattcctctgcatggagcgctaggaacttcttggggacaacaagcagtggtgtctgtgttacctcctggctaaatatacttgagaacattgaatctgccgggcctctacttgtgacacttaaccctcctcgtgttcccaatcatgtattgcttaaatgtcatattagccatccaattccttccattgctgctgcaaaggctaatcttcagctcaacagcattcaaggaaagaggggcatctggttctgtggctcatatcaaggctatggataccatgaggacagtgttaaggctgggaaagcagcagctttaggattgcttggaaggaaatgtgaccttttgtctaacccaaaaccgatggtctcatcgtggacagaggcgggcgcacgtcttcttgtagcaagaagcctagaccaatacataaccattggtaacttctgtatactcgaagaaggaggcactacattcagttttggtaaagcatgcgaaaaatgtcatgtaaaatctgcgatacgcgttcacgatccccagttctattggaaggctgcaacagaaggagaccttggctttgcatctgcctacatcaatggccaaatctcatttgttgatcaccgaaaaggccttgtgaaccttgtacggatcatactggctaatagaggtgagttcaagaggttgagcagcactgctagtggcaatacaaggaaagcctggtggtcgccgttgcttggaattactggagtctcatttgcaaaatactttttgcgtcatgccttgcggaagaatagtgtatccaaagctcgtaaaaatatatctgaacactacgatctgagtaatgatttcttcgctctttatctggatccatcaatgacgtactcttctggcatttttaaggtggcggaggagagcttagaaacagcccaactacgcaaacttgacagtctcattaacaaggctaaggtggagccagggcaccatgttcttgacattggttgtggttggggcactttagcaatacggttggtgaagcaaaccggttgcaagtacacaggaatcacattatctgaggagcaactgaaatacgcgaagagaaaggtgaaagaatctgggttagaggaccgcataactttgctcctttgcgattaccgtcaactaccggcaggcgataagtttgacaggattataagctgtgaaatgattgaacatgttgggcatgagtacatggatgatttcttcgggtgctgcgagtatcatttggcagagcatggcctacttgtcctccagtccatcgcgctcccagaagaattgtatgacaaaatgaggatgcggcccgagtttctcaagacatatatcttccccggtggctgcctaccttctctaggccggattgtgtctgccatgtctaatgcatcaaggctcaacattcagcaccttgagaatattggggaccactactacactaccctaatgaactggagggacaacttcgtggccaacagagaaaaagcttctgcgcttggatttgacgacaaattcatccgtacctgggagtattatttaagttacgctgcggctttgttcaaatcacgcacagctatagattaccagatagtgtttgctcggccaggcgattcaaagctaccaagctatgttgccattgcataaaataaatggataggatcgagatgatgctgtgttatgcgtgtgtgtgtgtgagagagagaaatttattcagtcatgtacgtgcatgtgtgttggagagcagcagcaggccagctgctgcatgctgtgtggcttggatagatgcatgcgtgtggtatatagtactactagaagtctgcatgcatatgtctgctagcggtgctttcatttgcactcgagtcgctccacgtaagaggtgaaataatagtggttaaggcatctgatcgagtgcttggcaaaaacatgatgttaagttgacaacttgtaataatattacttaaatatgtagagaattgttctttt

SEQ ID NO: 865 - DNA, 1240 bp, Zea mays
  Clone ID: 700094561_FLI
ttgtcacgtaattcgtttccctgtcctccccctctcgctgagctgagcccacctactccctcccaccacttgcattcacacactcgattccgctgctctctccctcttcctctcccccgcggcggagccataaaccctaggcctcgccgtcgtcggaggcgccgccgcgatgtcgcactttggaaggacgggtccgccggacatccgcgacaccttctcgctgctcgtcctcaacatcagcttccgaaccacggccgacgaccttttcccgctcttcgagcgctgcggcaaggtcgtcgacgtcttcatcccgagggaccgcaggaccggggactcgaggggttttgcgttcgtgcggtacaagtacgccgacgaggcgcagaaggctatagatcggctcgatggccgtaatgtggatgggaggaacatcatggtgcagtttgcaaagtacggccccaatgctgtgccaatccacaaaggaagggtcaaagagggggttgagaaatcaagagacaggtcaaggagccgtagtccaaggccaaggcacagagacagagatgatagaaggcgaagtcgcagcaggagcaggagcaggagcagagaaagacatgtccatgatagagatagggactatcgtcgtcggagcagaagtagaagccgaagtatgagttcaagccctgaccacaaaagtcatcgcagagcaagagatgatgttaagcgcaagagcagaagcaagagtagaagcaagagcaggagcaggagtagaagccgctcataccacattcttcacctgcccggcgcagtgctagccctcccaagagcccactgccacagaggagccccactcctgaaaagcatgccaatggaaaagattcacctctgtcacgcagtgtatctccatcaccgaagcgtgcaagctcccgcagcccaggcagcgatagcaaggaataaagcttgttgatctggtgatgcttaaagagcagtcttcccatgggattgcagaacgttgagaaggctgtttgaatatgatggcagtaccaatctgcaatcaaccgctatccaaggttgctagttgtttttttaatgacttctagaattgtgttttccagttgtcaaaatatgctgttggtttgtatttcgacctctattgtctttttatacccttgtactgcatcatctactttatgtgcacccgtttcttgactccatattaatttgttaaaacatttgtgcatttttt

SEQ ID NO: 866 - DNA, 952 bp, Zea mays
  Clone ID: 700094574_FLI
ggcgcgcggttcgccaagtggcgcaccgtcgtcagcatccctaacggcccctccgagctcgccgtcaaggaggccgcgtgggggctcgcacgctacgccgccatctcacaggacaacgggcttgtgccgatcgtggagccggagatcctgctggacggcgagcacggcatcgagcgcacgttcgaggtggcgcagaaggtgtgggccgaaaccttctacgccatggcggagaacaacgtcatgttcgagggcatcctgctgaagccgtccatggtgacgcccggcgcggaggccaaggacagggccaccccggagcaggtggccgcgtacaccctcaagctcctccaccgccggatccccccctccgtgcccgggatcatgttcctctccggcgggcagtcggaggtggaggcgacgcagaacctcaacgccatgaaccaggggcccaacccgtggcacgtgtccttctcctacgcgcgggcgctgcagaacacctgcctcaagacctggggcggccagccggacaaggtcaaggcggcgcaggacgcgctgctgctgcgcgccaaggccaactccctggcgcagctcggcaagtacacctccgacggcgaggccgccgaggccaaggagggaatgttcgtcaagaactacagctactaattaatcgcccggccatcacccgggataccgccgcccctccgagagatacgtgtgtactgatcatggttaagcacgtactccgatccattcccatcccatgaagccatgataatgatgatatgatccatggaccatgcatggtgctctggtcgatgccgtacgtgtgtccctgatacaatactattttagtactgatgctagtcatcatatatatcgatcgagctcgccactgcgaagtctgagataatgcatgtatgcttgacggcgagatctgaggaaaaataatttctat

SEQ ID NO: 867 - DNA, 2584 bp, Zea mays
  Clone ID: 700094592_FLI
ccctggcatcgctggttgtctagaggaagaagatgatggtgggctcttcccagcagcagctgctgctgcagaggaaggggaagcccgtggctggcaagggagcggcctccatgaccgtgaaggcagagaaggtggtggtcgcggtaagggcagccacgagggagatctccaagacagccgtcatctgggcgctcacgcatgtcgtgcagcccggcggaagcatcatactcctcgtcgtcatcccggcacagagctctggcagaaaattctggggttttccactgtttgccggagactgtgcaagtggccataagtctatggtggatcagaaatgtgatttatcagagttgtgttctcaaatgttgaagaaattggatgtgtatgatattgacatggtttgacctggtgctaatgctcgtttacatgtttattaaaattatcatatacttgtgtgcttaatttatctgtgcttctgtagataaatgtaatgtataagcttgtttccggctctccttctggtgttgttgctgctgagtgtaagcaagcacaagcaagctgggttgtgctagacaaggatttgaagcacgaggagaagcgttgtgtggaggagcttcagtgcaacattgttgttatgaagcgttctcagcctaaagtccttcgacttaatcttgtgggatctcctgataaagagtctaaagcaacatgtgcagttccacctgtgttagattgttctagtggtaaaactgcaactgatgttaaggaggcacgaagttcaattcgaggacctgctgtaaccccaaatagcagcccagacctggatacacctttcagaagtactgaagcgggaacttcctctgtctcaagttcagaccctggggcatctccattttctgcttctgaaataaatggttctctgaagaaagaggtactagcaacaaaggataaaattcagcattcagatgtcaatatttctgattcggacagtgaaacattgagccctccagcaaatttctcttttcagccatggatgtctgatattctacagggatcagcatcctcaagatcgcttggaaaagttccacggaaaactcgtactgcaactgcagatgttttgttggaaaagatttccaagctggatctcctgaatgaaattagtgctatgagaagcaggtcagacttaaacttccgcggagatgtcagggatgctgtttcattggcaaggaatgcacctcctggaccacctccactttgttcaatatgtcagcacaaggcacctgttttcggaaagccacctcggtggtttagttatgctgaactggagcttgcaactggtggtttctcccaagcaaatttcttagctgaaggtggatttggttctgttcatcaaggtgtccttcctgatgggcaggctatcgctgttaagcaacacaagcttgctagttctcagggtgatgttgaattctgctcagaggtggaagttcttagttgtgcacaacatcgaaatgttgtaatgctgattggtttttgtgttgaggacagaaggcgtttattggtttacgagtacatctgcaatagatctttggactcacatctctatggtcgtaatagagaaacattggagtggactgcacggcataagattgcagttggtgctgctcgtgggctgcggtacctccacgaggaatgtagggttggctgcataatccatcgcgacatgagaccaaacaacatccttgtcacacatgatttcgagccactggttggagatttcggcctggcacgatggcaacctgatggagacatgggtgttgaaacaagagttattggcacatttggttatctggcacctgaatatgcgcagagtgggcaaataacagagaaggctgatgtgtactcttttggggttgtgttagtggagcttgtgactgggcggaaggctgttgacatcaaccgaccaaagggtcagcagttgctaactgaatgggcacggccattcttggaggagtatgcaattgatgagctcatagacccacgactgggcgcgcgctactccgaaaatgaggtccactgcatgctgcacgcggcaaacctgtgtataagacgcgacccacattcaaggcctcgcatgtcccatgttcttcgcattcttgagggcgacatggtcgtggagtctggttctgttaacggcagtagtgattctgggagcagaagctggaggttgctgagcgagcaacagcattattgccaggagtacagagtagcccggctcaacaagaatcgcgaagggcaggcgaggggaaacgctcctacagcggaccgggacaagcagagtatctccaacagatattagtgctgtcgcataatgcaagagatcgctcaaatcctgtattattccctcgcccctacctccctgtcgcatttctttatttctttttgggatcattttatgctcacttcctagccctagcaatttgtaggctggaaaagcttttgctgatacatggttgtcctggtgtatatagaaatggtaataggattacaaatatattgacctgcaacgtatggatgtttctggaaaagtagt

SEQ ID NO: 868 - DNA, 2032 bp, Zea mays
  Clone ID: 700094629_FLI
atgcaccgctgcacacgccacacgggcacggcgccttcgtctccaacacggcgactaattaaccccactgattccgacgaccgagctcccccacactttttcctggcaaaccctgcacgcctccgcaaccgcaaccgcgtcgtcggcgtgcgcgatcccgagaggcccagccatcagcttccttggcggggtgtgtatgcgcgtacgtcggccgtgaccagatcggctgagccaaggccatggcggaaccggccctcctcgcgccggaccccttcgcggacctccccttccccgaatttcaggcgcccatcgacggcgacagcttcgcgctcgaggacttcgatctggaggatctggacctggacgtggacttcgacctcgacctcttcgcctcggacgggcaaccctcgcaaccgcccccgctcgcgacctcgtcctcctcggccgggtctccggttggaggctcgtcctcttccggtgccgtcggggacggcggagggctgaggaatgaggagtcttcggagtcgtcttcgaggagcgcgagcggcacggatggcagcggcaaggggaagggggaggaggacgaagcgaagcggcgcgcgcggcaggtacgcaaccgcgagagcgcgcacctgtcgcggcagaggaagaagcagtacgtggaggagttagagggtaaggtgaaggccatgcaggccaccatcgccgacctctccgccaggatctcctgcgtcaccgccgagaacgccgctctcaaacagcagctgggtggcgctgctggggccgcgccgccgccgatgccgatgtaccccacgatgtattctttgccgatgccgtggatgcacccatcgtatcccatgcgtggatcgcaggtgccgctcgtgccaattcctcggctgaaacccccgcagcctgcacctgctgtagcagagccaccggccaagaaggctaggaagaccaagaaggttgcaagtgttagtctcctggggttgatttgcgttgcaatgctttgtgggtgtttgattcctgcagtaaatcggatgtatgactctgttgatgctggagaaggtgctgcatacggtccatctcatcgtgggagggtgctggctgttgaggggcctcatgataatgtttcagatggtgtcgatccaaagccgccacagcgtgccagtgagacgcttccagcactgttgtatctaccaaagaatgggaagcatgtcaagattaatgggaatcttgttattaagtcgattgttgctagtgagaaagcttcattgcagatgtctggcaatgatgggaagcgtcctcaaaaccaagaggaggagactagactggcaattcctggctatgtgactccattgaaagctggagaggttatggaatcaaccgaaggaatgatgaacaatgaactgttggcgttagctcctgcagatggaagcatgtatagggaggaggatggattgctgccacagtggtttagtgaagcaatgtctggccccctgctgagctcaggaatgtgcactgaagttttccagttcgatgtgtccccatcatctgctcatccaaatggcatcattcctgtctattccaatgccatgtcaaactcgtcacagaacttcactcaagatcttccccctgctcgtgttcgcacggtcaagaacagaaggatttcgtactccgaggccattcctctgagaggttcaacatccaacgacactgagcacctcaagagctttggcagtacgaagcctgtttcgtcagtggtcgtctctgtgctggctgatcccagagaggctggcgatggggatggtgagggaaggatctcttcgaaatcattgtcccgcatcttagttgtcgttcttatagatagtgttaagtatgttacgtactcttgtgtcctgccgttcaaaagtcatagccctcacctttaggtctgggttttggacgtgagttgatagagctgacctatacattttatagcagaagaggtgtaagacagctgcatttgttcatttattcaagctttgtgtgc

SEQ ID NO: 869 - DNA, 554 bp, Zea mays
  Clone ID: 700094662_FLI
gtaaaatcctacaaggatgatcaagatcaacttgccttccaagctggtggatttacaagccttacaaagctgatactttctgatctggaaattgtgaaactcgagataaagaaatatgcacttccagaactcacagatttggaggttgagttgtactacgacgaaatcgaaatcgaggtatatggcgagcatgagtttgtgaagaaaattgaacaagtggatgaatacctctatggccgtatcactcaagttccggttgctccaaagaaaattggtcagcttcctagcatgaagcaacgcgtggctagctgaagatcacaggtaaactaagacaccaatatagtaccacttgctgttatttcgatttgcctgttcagtatgtacaactctgtcatgagtcgtgagtttattagtgtggatgtgatggcagattggcatgtctacataataattgctggccgcacctgtctacagtatgcatgtattcctaaattgtaaaataagtgaaaaaacgcatatgtgcgcgtgtatcatggtgtgtactcctaaattgt

SEQ ID NO: 870 - DNA, 971 bp, Zea mays
  Clone ID: 700094665_FLI
cttttccttcacgaaaacagagcaaatccggcgagccggtgcggcggcggagggagacgcctgctcgagaaggagcattagcaggaggcagcggagatggatccggacgcagtgaagtcgacgctctctaaccttgccttcggcaacgtcatcgccgccgccgcccgcgacctccagaaggaaatggtggctaaagacaaggctcaagcagcacctgcaagccatgatgaagttgatcttgatgagttgatggatgaccctgaacttgagaagttgcacgcggagagaattgctgcccttaagaaagaggttgagaagcgtgaagtgctaaaaaggcaaggtcacggtgaatacagggaggtaattgaaggggacttccttggggaggttactggcagtgaaagagtcatatgtcatttctatcaccgtgaattttaccgttgcaagatcatggataagcatttgaaggcccttgctcctgtctatgtgggaacaaaattcatcaagcttgatgctgaaaatgctccattctttgtagccaaactggcaatcaaaaccttgccatgtgtaatattgttcaagaagggtattgctgttgaccggttagttgggtttcaagatctcggaagtaaagacgatttttcaacaagagcgttggaaaacattctcaagatgaaagggataatcgatgagaagaagaaagatgacgatgatgatgatgaagaaagcgagtctaagaataggaggattagatcttcaactgctcaagattctgactcggactgaacatgagatggggattgaggattcaccctttttgcactttatattttgtctgttctgtactgcaattgatttgtgcgactcatgtatctataccagataaccagaacaaaagcatgtacaagagattcttaacttatctaacttatgaacacgttcaaaattgagctggcatatctcaattggcc

SEQ ID NO: 871 - DNA, 1339 bp, Zea mays
  Clone ID: 700094666_FLI
gtcacaagtgagggcgggagaggttgaggttgaggaagagcagaggaatccattccaggagtgtttaatggcgggaggcaaggaagcgcacgggtgggcagccagggatgtctctggtcacctctccccttaccacttctcacggagggttcagagagacgacgacgtcaccatcaaggtgctcttctgcgggctttgccacactgacctccacgtcatcaagaacgagtttggcaacgccaagtaccccgtcgttcccgggcacgagatcgtcggcgtcgtcaccgacgtcggctccggcgtcacaagcttcaagcccggcgacacggtgggcgtgggctacttcgtcgactcctgccgcagctgcgacagctgcagcaaggggtacgagagctactgcccgcagctcgtggagacgtccaacggcgtgagcctggacgacgatgacggcggcgccaccaccaagggcggcttctccgacgccctcgtcgtccaccagcgctacgtggtgcgggtcccggccagcctgccgcccgccggggccgcgccgctgctgtgcgccggcgtcaccgtgttcagccccatggtgcagtacggcctgaacgcgccggggaagcacctgggcgtcgtcggcctcggcggcctcggccacctggccgtccgcttcggcaaggcgttcgggatgaaggtcaccgtcatcagcacgtcgctgggcaagcgggacgaggccctcggccgcctcggtgccgacgcgttcctggtcagccgcgaccccgagcagatgagggcggcggcgggcaccttggacggcgtcatcgacacggtgtcggccgaccaccctgtcgtgccgctgctggacctgctcaagccgatgggccagatggtcgtcgtcggcctgcccaccaagccgctccaggtgcctgccttcagcctcgtcgccggcgggaagcgcgtggccgggagtgccggcggcggcgtcggggagtgccaggccatgctcgactttgccggcgagcacgggatcaccgcggatgtggaggtcgtcgggatggactacgtcaataccgccatccagcgcctagagaggaacgatgtcaggtaccgcttcgttgtcgacgtcgcgggcagcaagattggaggctaggcatcaccattcctagtgttctgtcgatcgacgtgtgatttgcttcttcctcgagcgtgtcttattgttctggttggagcacgtatgcggccatcacacgcaggcgtggacaataaacaaggtagagtttcgggttgtgtcgtttctggatgtatggtgccggtggataataaacaagcttaattggcgtggtcg

SEQ ID NO: 872 - DNA, 880 bp, Zea mays
  Clone ID: 700094675_FLI
ctcaattttccatactcgagacattgagttgactgagaaactggactattcttcagctgtggccttgcttggctactcgttgatcctttcattgctaagggctttcaatgtcaaggatgaggctagcagggtgatgtttgcagcccctattttggcattcgttacaacgcacatcttgtatcttaacttctacgagcttgactatggatggaacatgaaagtctgcgtggtgatggctgcggttcaacttctgacgtgggctgtttgggctggtgtaagccggcatccatcacggctgaaactctggacggttgtttttggaggagcactggtcatgcttcttgagctctacgacttccctccatacatggggtttgccgatgcccattcactgtggcatgcaagcaccattccactcacctatctctggtggagcttcatcaaggacgatgccaaattccgcacgtcaacactcagcaagaaggcaaagtagttaagcaaagcgcgacattcttagcatagggtcagagaggatcagattccgattccgtggtctgcacgggggacattttgggggcacacgtgttgtcggacatcatggaacctcggtacatttgccctccccaaaaaagacattcatcttcatccactcaggtttttggcccacaaaagtcaacatactctttagggcgcatgttctgcccttacgaattatctctttactgacctgaacgtgcatcctgtgattgaatcggcatcttatcattgtagtgttggtggggtttgggagattttgtcatcgccgaatcagttttgtgaaatcagacagaacaatgaacatcagtggtgtgtttcctaaacaaaaaaaagttaaaagggc

SEQ ID NO: 873 - DNA, 1399 bp, Zea mays
  Clone ID: 700094677_FLI
tcgtccccgttccatttcattatccccccggagctggtgcgcgagtcggagctggtgcagggtcacccttcccctcggcctcaagagctctgcggttgccgcggccaagggcgtccgtggagaagcgggagcaggtggcggcgatggaagagcaaggcggccaggcggcgctcgggtgggcggccagggacgactccggcgtcctctccccctacagcttctccagaagggttcctaaagacgacgatgtcacgatcaaggtgctctactgcgggatctgccacaccgacctgcacgtcatcaagaacgactggcgaaacgccatgtacccagtcgtcccggggcacgagatcgtgggcgtggtgaccggcgtcggcggcggcgtcacgcggttcaaggccggcgacacggtcggcgtgggctacttcgtggggtcctgccgctcctgcgacagctgcggcaagggggacgacaactactgcgcggggatcgtgctcacctccaacggcgtcgaccacgcgcacggcggcgcgcccaccagggggggattctccgacgtcctggtcgcgagcgagcactacgtggtccgcgtccccgacggcctggcgctggaccgcaccgcgccgctgctctgcgccggcgtcaccgtgtacagccccatgatgcgccacggcctcaacgagcccggcaagcacctcggcgtcgtcggcctcggcggcctcggccacgtcgccgtcaagttcggcaaggccttcgggatgaaggtcaccgtcatcagcacgtccgccagcaagcgccaggaggccatcgagaacctcggcgcggacgagttcctcatcagccgggacgaggaccagatgaaggcggcgacggggaccatggacggcatcatcgacacggtgtcggcgtggcacccgatcacgccgctgctggcgctgctgaagccgctggggcagatggtggtcgtgggcgcgccgagcaagccgctcgagctgccggcctacgccatcgtgccgggcgggaagggcgtggctgggaacaatgtcggcagcgtcagggactgccaggccatgctcgagttcgcggggaagcacggcatcggggccgaggtcgaggtcatcaagatggactacgtcaacacggccatggagcggctcgagaagaacgacgtccgctaccgcttcgtcatcgacgtcgccggcagcctcggctctgccgcctaggcatggctgcaaaggtttcaatcagagcccagccgcaataatttgttagctaccgaatgaatgatggtctacgcttgttgatgagttggtgctttgtcgtggttttgtggatgtaataattcgatgtacaaataaaaaaaggggagacaaggtgcttgttcccttggtttggtgac

SEQ ID NO: 874 - DNA, 1580 bp, Zea mays
  Clone ID: 700094715_FLI
cggccgatcccccctcctatccgccgcagaggcggcgcctctgggcctaccccgatgtatagcaacttcaaggagcaggcgatcgagtacgtcaagcaggcggtccaggaggacaatgccggcaactacgtcaaggcgttccctctctacatgaacgcgctcgagtacttcaagacccatctcaagtacgagaagaaccccaagatcaaggaggccatcaccgccaagttcaccgagtacctccgccgcgccgaggagatccgggccgtcctcgacgagggcggcgcggggccgggggccaacggaggtgacgcagccgtcgccacgcgccccaagaccaagggcaaggacggcgacgggggcaacggaggggatgactccgagcagtccaagctcagggcggggctcaactctgccatcatcaccgagaagcccaacgtcaagtggaacgacgttgctggcctcgagagcgccaagcaagcctgcaggaggccgtcatattgccggtcaagttcccacagttcttcacgggcaagcggaggccttggagggcgtttcttttgtatggccctcctggaacaggaaagtcttacttggcaaaagccgtcgcaaccgaggctgattcaacatttttcagtatatcttcttcagatctggtttcaaagtggatgggtgaaagcgagaaattagtcgcaaatcttttccaaatggctcgtgaaaatgccccttccattatctttattgatgaaattgattctttatgcggtcaacgtggagaaggtaatgaaagtgaagcatctaggaggattaagactgaacttcttgtgcaaatgcagggtgttggtcataatgatgataaagttcttgttcttgctgccacgaatacgccatatgctctggaccaggctgtgcggcgaagatttgacaagcgtatctacattccgctacctgacacgaaagcaaggcagcatatgtttaaggtccatctcggggatacaccacacagcttaactgaaagcgatttcgagagcttggcccgtcgaacagatggattttctggttctgatgttgctgtttgtgttaaggatgtcttatttgaacctgtgcgcaaaacacaggatgccatgttcttcttcaaggcagacggtgacatgtggatgccatgtggaccaaaacaaccgggcgctgtacagaccacaatgcaggagcttgcatccaagggcctcgctgcaaagattcttccaccacctatctcaaggacggattttgagaaggtcttgtcgaggcagaggccgacagttagcaagaaggatctggaggtgcatgagaggttcactaaggagttcggcgaggagggctgatacaccgcgcgcggacacacacccatgcacagctgcaccacagaaatgtatattgtttatcacttcgattgttctgcttggaagttgcattcacaggattatacatttggtagcccaactatgagtaatcatggcagctgctttaccgtgttgggctaccgatgggcctctgttgtcaacttatttcaatttttatttatgcacatgaaaattttccgc

SEQ ID NO: 875 - DNA, 759 bp, Zea mays
  Clone ID: 700094748_FLI
attcgttccaactcctgagcactttctcctcgtccccgacaagccaatcgaagccgagatacggccatggactccaccggcaccggagcagggggtaaggggaagaagggagcggccgggcgcaaggtcggcgggccaaggaagaagtcggtgtcgaggtccgtgaaggccgggctccagttccccgtcggccgcatcgggcgctacttgaagaagggccgctacgcgcagcgtgtcggcaccggcgcccccgtctacctcgccgctgtcctcgaatacctcgccgctgaggttctggagctcgccggtaatgctgccagggacaacaagaagactcgcattattccgcgccacgtgcttctggcgatccggaacgacgaggagcttgggaagctgttgggcggcgtgactatcgctcacggcggtgtgctccccaatatcaaccctgttctgctgcccaagaagacggcggagaaggcgtccagtggcgggagcaaggaggcaaagtcgcccaagaaggccgccaagtcccctaagaaggcatagactgactgtccggagtgatctgatgtttagcagtaccttgttaccagtatgcggtgatgcgtaggctgcagatgggacgaatgtgcttgtatgtgtatgtgtcctgctgcaagttgtcctttgctatttagaatggaagaagaaatgccttgtttctctgaggttgcaatgtcttttccctaatttcatttatgcactgctgtgatttctgat

SEQ ID NO: 876 - DNA, 1139 bp, Zea mays
  Clone ID: 700094865_FLI
tggtcatgccgcctttggagccaccggccgtatagccatctcaataatcctgtatgtggaactgtatgcctgttgcatcgagtatctgatattggaaggtgacaatttatcaaaattattccctaatgcgcacctgagcgttgggagcttgacaatgaactcccatgtacttttcacaatcttgactaccatcatagtcatgccgaccacttggcttcgtgaccttagctgcctgagctacctttcagctggaggtgtttttgcatcaatccttggagtcatctgcctattctgtgtaggagttgttgataatgttggctttgagaacaaaggaactgctctgaacctccctggaatccctattgcaattggattgtatggttattgctactcagggcatggggtgtttccaaacatctactcttctctgaagaagcgcaatcagttcccttcaatcctttttacttgcattgggctgtctaccattttatttgctggtgcagcggtgatgggatacaaaatgtttggtgaagccacacagtctcagtttacactgaacttaccagagaatttagtggtttcaaagattgcagtttggaccacggtggcaaatccaataaccaaatatgcattaaccataaccccactgactatgagtttggaagagttgcttccaccaaatcaacagaagtactcaaacatagtcatgcttagatcagccctggtggtgtcaaccctcctcattgctctatctgtacccttttttggacttgtgatggccttagttggttctttacttacgatgcttgtgacctatattctaccttgcgcgtgctttttagcaattcttaggagaaaagtgagctggcaccaggtagcagtatgctcgttcatcatcgtggttggggtttgctgcgcttgtgtgggaacatactcgtctctgtcaaagataatccagaactacacatgatacagttgttcctgcaatccaaatttatgtccaaactcaatgagccaaactgcccagcaaattagtcaagtcgatgtatcataaatttgtgagatgtccatgtttgcatgttaatggatcaacacaaataatacgtttgtggcaaggatttgagacaatatttctgaac

SEQ ID NO: 877 - DNA, 173 bp, Zea mays
  Clone ID: 700094901_FLI
tcgctcgcctaggagctagtgaacttggtgacggctttggtgccctcggagacggcgtgcttggcgagctcgccgctgtgtttgctttctgggctgggctcggttgatgtgttttatgtaagaaagtaactgtattgtgtctgcagtaccttaccatgcatgttttaagtagc

SEQ ID NO: 878 - DNA, 649 bp, Zea mays
  Clone ID: 700094938_FLI
cccaaccaaacccgcacgacacgacaccaagtcgaggagctcgagggcaccaatcatggccggcgtgaactccagcgtcgtcgggctcaagcccgccgcggcagtgccgcaggccgccgccgcctcatcgccggcgaagcgggtgcagctggccgcgcccgagggccgccgcgccgctctgctcggcctggcggccgtcttcgccgtcacggccaccaccgggtcggccaaggccacgatcttcgatgagtacctcgagaagagcaaggccaacaaggagctgaacgacaagaagaggctggccaccagtggcgccaactttgcgcgcgcctacaccgtggagttcggcagctgccagttcccctacaacttcactgggtgccaggacctcgccaagcagaagaaagtccccttcatcagcgacgacctcgagattgagtgcgaggggaaggagaagttcaagtgcggctccaacgttttctggaagtggtgaagcagctagcagcagcgtctgatgggaatggaggagatcatcacctgtcttgtcgaccctagatatgtccaaactgcagggaaattaaatcttcatgtgtaattgtgctcattctgtttcaatcatctcaacatccgatcatgaacctcttgcatt

SEQ ID NO: 879 - DNA, 1096 bp, Zea mays
  Clone ID: 700094967_FLI
gcacatcccttcttgcttctcgcctccccacccttcatccacccgccgctcctcaagccccaagctccggcgatatgtcacgcttcggtcgatccggtccgccgccgccgatccgcgacacatattcactcctcgtcctcaacatcaccttccgcacgactgctgatgacctcttcccgctcttcgacaagtacggcgagattgtcgacatctacatcccaagggaccgcaggactggcgactcgcgcggattcgcgttcgtgaggtacaagtacgaggacgaggcacagaaggcagttgataggctcgatgggagattggtagacgggagggagatcatggtgcagtttgccaagtacggtccaaatgctgaacggattaataaagggagaataatggagccagttccaaggcccaggggtcgttccagaagccgcagtccaagacggaggtaccgtgatgattatcgagatgactaccaggatagagattatagaaagcgaagccgtagccagagtagagatggatacgcccgtgacaggtacagagatagggattaccgccatcgtagcctgagtcgcagtttgtctcctgcacgaagaagccctagtcatagccgcagccgcagttacactcctgatgattacaagaggcgtggcaaagacagcgcatcacctgcaagtaggagccctagtcgctcccctcctcgcaagacgccaccttctcctaagagatctcctgtcaggcacaatgatgaccggtctccacgctcacggagcccttcaacataagcacaattcacttgcaaagcatcttcaacagctcaggatgaatggacttgctctgatcctatgtgtgtgtggctatgcttgtgctcaatggtgggcacttttcagttaaagttttgtagtgctgtctgtcagttgctgcctcaaacttggaatactacttctgtttggcacctgaactgcttatcaaaaactttatgtataccagttacattccacttttaaccttcatattagtattaccatattataactgtcttttcagtatttagtacttactattcatggtgacttgcacctttctagtt

SEQ ID NO: 880 - DNA, 1729 bp, Zea mays
  Clone ID: 700094976_FLI
cacactctctcgtggccactaaaaacaatggtgctcctagagctactcatcgtcggctcaacacttgttctatcgttgtatgttaggttctggagatcaaggaacggcccgttgcgccccgtggactggccgatagttggcgttctcccggccctcatttccatgctccacaacctacaccacgaagtcacagtcatccttgctgcctccggctgcaacttcaaggcacaaggaccagtaggaagtggcatgcggttcttcttcaccgctgacccggcaaatgtccgtcacattttcacatccaatcatgcaaactaccccaagggcgaggagctcgccgagatcttcgacatcgtgagcggcagcatcctcaccgtcgacggcgaggcctgccgccagcagcgagggatgttccagaccgtcctgagcaaccaacgggtacttgagctgatgttccgttgctgccgacacaaggtggtgcatgacctgctccccttcttagcccgcatggagagtagtgggacaccgttcgacatgcaggacttgatgacgaggctcatattcgacctcactgccaccccaatcttcggagtggaccctggttgcctgtctacaatgatgccgtcgatgcatgtctcggctgccatggacacggtcatggaggttggtcttttgcggcacactgtgcccacctcctgctggaaggtgatgagacagctgaacattggcccggagaggaagctggccgtggcgcacacactgctgcatgagttcatcacggagatgatggtgaagtcaaaagccaggtgctccgatcctgcaggcgagattgctgccatggacattatttctggtgacccggcgtacagcagcgacgcggccatgctgaggaaaatactcatcaactacatgatcgctggccgggacactgttggcacaacactaccgtgggttttctacaacctcgccaaggatccccgcgtcgtctccggcatccgcgaggaactggctcacatcgcatcactcaaggcttccggaacaaaaaacatggtgttctttgagccggaggagactaaagacctagtctaccttcaggcagccttattcgagactctgaggctgtacccgccaggtccgttcgagcgcaagatggtgcttgccgatgatgttctcccaagcggccaccggttgtgctccggcgaaaccatcctgatctccatctattccatgggcagaatggaagccctgtgggggaaggattgcgacgagtacaggcccgagaggtggttcactgaagatggcgctaagctgcggtacgtgccatctcacaaattcatggcttttaactcaggaccgaggatgtgccttgggaaggacatagcaatcacgcagatgaagacaatagttgccgcggtcgtatggaacttccatttggagatgttggaagggcagagcatccatcccaagctgtcgtgtattctacaaatgaagaacgggctcaagatgaaggttaagaagaggcaggaaaaacgtgatctacagtgattgttatcatgtgcaaaataagatacgtacgtgcagtacaactacaaccaaagccatgcgtctttaattcacgaggtttcaaacgtcaataccaaagagtatgtacagattatcgcgaagatgttttgagcaagaccgcgaaatgcgaacatgtaataacaataaatctatctatatatattac

SEQ ID NO: 881 - DNA, 857 bp, Zea mays
  Clone ID: 700095034_FLI
actccgttcgtccctcccagtcccagcgcgcaacccaacccgccgttcctccgcctcctcccgcacagcaaaatggagacctccttcctccccaccacgctccccaccgcaaagcccctcccggcattccgaacccacgctgtagccgcatcgaaacttccccaacagcgccctcgccgctgcaccatacgcgcggccatcacccgtggccgcaaggaggagacggtgaccaccgtccgggagcagctggagggctgctacctcctggctggtatcaagtacgagggcctgacggtgaagcagctgcagggaatccgcgacgcgctcccagagacctgcagactgctggtggcgaagaacactctggtggggaaagccatcgagggcaccccctgggaagcgctcaagccgtgcatgaagggtatgaatgcctggctcttcgtccacaccgaggaggtaccagccgcgctcaagccctaccgcgccttccagaaagaggagcgcgtcgaggagaccaacgacttcgtcggggccgtctttgagggcaagttttacgggcccggagacttcaaggcgctcgagactatgcccagccgcgccgaggtgtacgccacgctgctcggcgcgctgcagggacccgctacgtcgctcgtcgccacgctgcaggcgccagccagggatgtcgttgcggtgctctccgcgtacgtacgcaagctcgaagaggaggctggagccgcctagtggggttgtgaaatggttgtcatctccctttcactccctactttctgtttgtagaattctgtgtaccttaactggctcccagtcacatttgaattgaatcacactttccagtttac

SEQ ID NO: 882 - DNA, 991 bp, Zea mays
  Clone ID: 700095115_FLI
ccagccgccaccaggtgcagagtctttcgtcatctcttctccggcgaagaacccccagtcgcccaccagatcacttgttaaactttgttgaggggtgatggcggtttctttcgcaaacctcaactccgaggcagggcttaaaaagcttgatgagtaccttctcactcgcagctacatcactggctaccaagcttccaaggatgacttggctgtctacacttcgttttcggctgctccctcgtccaagtatatcaacgtagcaaggtggtttaaccacattgatgcgctcgtgaggctgagcggaattactgcagagggccaaggtgtgaaggttgaatcctcagcagttccttcagccccaactccagatgttgctgaagcacaggccccagttgctgaggaggacgacgacgatgatgttgacctttttggtgaggagaccgaagatgagaagaaggctgctgaagagcgtgctgcagctgccaaggcttctggcaagaagaaagaatctgggaagtcatcagttttacttgatgtgaagccatgggacgatgagactgacatggccaagctcgaggaagctgttaggagtgtccagatggaagggctgctctggggcgcatccaagcttgtcccagttggatatggtatcaagaagctgcaaatcatgatgaccatcgtcgacgaccttgtctctgtcgacactctcattgaggactatctgtgcgctgagccagtgaacgagtacgtgcagagctgcgacatagttgccttcaacaagatctaggcgtgacttccgatcagtccttctcctggggtgctggcgatggtggtggctgggcaatgcaccagcctaatttatccatagctatatgtctgctttgtgtggccagtgatattgccgtgagtatttttggatcctattcgagtcgaatgtaccagtaccagagttaatttgctttaattcgaaacaccgttccagttggaattc

SEQ ID NO: 883 - DNA, 1632 bp, Zea mays
  Clone ID: 700095139_FLI
caagatgaaccacacgcacctgaggaagatgctcgacgacggcaaggaactggggatgccagacggtgttttgatgaatggcaaggggccatataggtataatgactcgctagtgccagatggcattgagcacgagactatcaaagttgagccaggaaaaacataccgtttccgtgtccacaatgttggtgtctccacaagcttgaacttacggattcagaatcacaacatggcccttgttgaaacagaaggttcatacacgatgaagcagaatttcactaatctcgacatccacgtgggccagtcttactcatttctggtcactatggatcagaacgcaagcagtgattattacatcgtggccagtgctaggtttgtgaacgaatcgctttggaccagagtcaccggtgttgcaattttgcaatattcaaattcaaagggaaaagcatctggtcctcttcctgatccaccaaatgatgagtatgacaaaactttctcaatgaaccaggcacgttccatcaggatgaacgtgagcactggtgctgctcgtccaaatcctcaaggatcatttcactatgggtctatcaatgtgagccaagtttacaagctgaggaatgaaccacctgttatcatcaatgggaagaaacggactacactgagtggtatttcttattccccacccgacactcctctgaggttggcagatctgtacgacaagaaggatgtctacacactcgacttccctacaatgccaattgatggaccgccagtgatcagaacatctgtcattaactccacatacaagaactttttggaaattgtatttcagaacaatgactcaactgtccagacctaccacattgatggatatgcattctgggttgtaggaatggactatggcgagtggactgagaatagccgtgggacttacaacaagtgggatggtgtttctcgttgcacgactcaggtgtttccgggagcatggactgctgtgatgctgtcacttgacagcccaggattttggaatgtacggacagaaaacctggacacgtggtatctgggtcaggagacttacatcagggtggtggatccaaatggaggctataatgttactgagatggtggctccagacaacatgctctactgtggcctcctcaaggataaacagaaggctcagaagcctcatggttcgaggtcatcagcctctgcagcaaaactgaactatcatgtgctcgcggctttggtctctttggtggtagccttggtgttgggccattgacaagaactgcctccagcttgtggtcagctgctgtttgcaggttgattaggcgtttgacagaaatactgttgagtaggtcagtcgaattcgtaggttccattcatgatttgtctggcaattgagaaaaaaaatgctgtgccattgcacatcttcgtccatcggaattgattaacatgctgaagaactgtgcagtagcttgagattgagcacaaatttgaggttgtcggcagctggcacccacaagcaaggcgtgtgctgtgctgcctgagtgtgttttcttgatcagtgaatttgtcgagagttggatattgttggttgtatcccatgcatcccattgcaattagtctttttat

SEQ ID NO: 884 - DNA, 1501 bp, Zea mays
  Clone ID: 700095157_FLI
aagggagggaggggcagataaagaacactgcaccatttgatttgtgtgctcctgcagtctacaccctcacttgctttcaaacgtgcacctcctctcttcttcttcctcccctcatctccttccaacagtgccataaccacagcctccctctcctctctctcttgttgcacgaatatgacgccatgatctcccccgtgaacgacaaggagaagcagagtgctacataggtacatgtagggtactataggataggaactatacagctaggaggtagcgcggagggaggagcacgccgccagcagtagggatgtacaagaaccagctccaagaactggcgcagaggagctgcttcagcctgccgtcgtacgtgtgcacgcgcgagggccctgaccacgcgccgcgcttccgggcggccgtcaccttcaacggtgagaccttcgagggccccagcggctgcaccacgctccgccaggccgagcacgccgctgccgaagtcgccctcgcccgcctctccctccgcggcccgtccactaccctcgccgcccgggtcctcgatgagacgggggtgtacaagaacctgctgcaggagacggcccaccgggcggggctgaagctgccggcgtacaccacggtgcgatcgggcccgggccactcgccggtgttctcctccaccgtcgagctcgccggcttgagcttcgcgggcgaccccgccaggaccaagaagcaggcggagaagaacgccgccatggccgcctggtcctcgctcaaacagatgccggaggctcgcaaggagcccggcgccggcgacgagcaggagcacgtggctgtcgccagagcgctcgcggcgctgaagccgcgagacggcggcgacggaaaggcggcgccgcctctgcagaagcacagcagcaacggctcttcttcctccgctcttccgaacccgtcgctgtacagacaccaatggcggcctcggaccagtacccctgcccagcccctgccgccgaggacgggggccctgcccctgcagccgccggccggcccaaggatcctgcccccgctgcatctgctacaacagccggcgtgcggctccagggacgccgcggcggcagagctggtgcggatgctggagcgcgccatggtgcgcgaccgggaggcaacgccgccttcgccgtgctactacgcggcgcctgccgcctcggcgtaccgccacggcagcgcgccgaggaccttcgccgcgggcgggttccacgccccggctgtgagcgtgcggtcggtgatcccggtgtgcgccgccccgccgccgcagaccccggtcaaggaggaaaggaatggcccggcgacaccctcaggcgcatgcaagagggcgtgagcgacgtggtcagcttgtgaagcgcagcaagagaagaagaaagaaagagcctggctctgttgttgcaggggagttttggatcacaactttctctgtagtctgtacagaagttgtgtacgaggtcaactactacgc

SEQ ID NO: 885 - DNA, 911 bp, Zea mays
  Clone ID: 700095188_FLI
gaaaaacataatatgttcttctgtaaatcttgcccacttgagagtatcaggaacgagccttcaccagagctttgcaggggccatattattaggaattttatcaaggaatgcgggagtaaatgtggctgtaacgcgcaatgtggtaaccgtgtagttcaacgtggtataacttgcaatctgcaggtgttttcgacacgggaagggaaggggtgggggctacgcacacttgatgaacttccaaaaggagcttttgtctgtgaatatgttggagagttgctaacaaatacgaagctacatgaaatgactactcaaaacatgcacaatgctaggtactcagtgctcttagatgctggttggggtcctgatggggtgctgaaggatgaagaagctttattcctggatgcgacattttgtgggaatgttgggagattcatcaaccacagatgctatgatgcaaatttagttgagatccccgttgaaaaggagacgccagatcatcactattatcattttgcatttttcacaaccaagaaggtggaagcatttgaggagctcacatgggattatggtattgattttgatggtgataagcatcctgtcaaatcatttgaatgcctgtgcggaagcagatactgccgtggtagaaagcattcgaggacgcgaggcaaagctgcttcgaagtgaagtgttgactgaaagcagcggtgcatggttggtttgggaaagcgaacggactaatcagttttagaatgctttgttaacctaggtagctatgcattcataaagtgcccgctgtgcttgactgcagaacgtgaaattcaattagacagactgaaatgcaatgtacgtacgctactcctaaaccctaagccatctggccatgatctactgatgatgaggtgaatttgatt

SEQ ID NO: 886 - DNA, 1065 bp, Zea mays
  Clone ID: 700095219_FLI
gccaccccaaagagctaccctgaccagatttggccgcttcctcctctgcctcccgctaaccctagtccagccccccgagatctgctccgcgcgagcagccatggcggagacgctcgacatgaccctcgatgacatcatcaagaacaacaagaagagtaacccctcctccggcggggcccgccgcagccgcggcggatccgcccctggcggcggcagcggcggggtcgggccgaccaggcgctccttcaagagggctgggaacaggcaggcgccctaccagccgccgaaggcccctgacgctgcgtggcagcacgacatgtaccctgcggtcgccgcaggaggcggcggcggcgggagggtctcggcgctcgagacgggcaccaagctctacatctccaacctggactttggggtttcgaacgacgatatcaaggagctgttctctgagctaggtgatctgaagcgtttttcgataatatatgatcgaagtgggaggtctaagggaacagctgaagttgtatttgcaaggcgttctgatgctgtagcggcggtgaagaaatataacaatgtccaacttgatggtaagcccatgaagatagagatagttgggaccaatactccaactgcatctgctgctcttccagtctccaatggtggccatgctaggaatgctgtgaggagtgcaccgaggggtgctgccccagcaggtatgccgcagcgaagacctcatcagaggggtgggaggcgtagtggtggatctgggggtggtcgtcgtggcaaggagcgcagcaagccaaagtcagctgaagaactcgacgctgacttggagaagtatcatgctgatgcgatgcagaccaactaaatgtgttcaaaaatttgatattcaacatcaaatatcaagcacattagtccttccattccagctgtttgtgctactatgttcaggggacaacaaaccttatgtttgtgggggtattgctttactgaattttgtgggttttgtttacaatagaactagagttggatgatgctgagtacttccatggaaattacttgcttgccttt

SEQ ID NO: 887 - DNA, 729 bp, Zea mays
  Clone ID: 700095226_FLI
gataagatccttccatttagtagcacctcgtcacggacaccatgcactacaatccctccgacctgtcgtcctgggtcgagagcatgctgtccgagctcaacgcgcccccgccgctgctcccgcccgtgacgccgttcccaaggctcgcgtccacctcgtccaccgtcacaagtggtgtcgccgccggtgccggctacttcgatctcccgcccgccgtcgactcgtccagcagtacctacgctctaaagtcgatcccctcgccggtggtggcggcgtcggctgacccgtcccccgactcggtgcgggagcccaagcggatgcgaactggcggcggtggcacgtcgtcgctctcttcctcatcgtcatccatggacggtggatgaggtgactctgctgcggtggcgacgacggcggccacagacgtcgatctgctcaagcgagcgtggctcaacgagaaggccgcgtcggatatcctcagcttcgactcgcccctcgcgttacgtgtctgcgagcagatccagcatctcatacgctcttctcccttcccgtcttcttgaccacgttccttgttggtcgtcgctttccaggggcctcgacatgcccaatctaaagaagcgatgcgtgaggttcgtctccaccacgccctgccccaggctaagaacccgcccaaggccaagaacctgctggaagccgccgtgaagcaggccactgcgtggatgcccaagcccc

SEQ ID NO: 888 - DNA, 918 bp, Zea mays
  Clone ID: 700095271_FLI
ctgcggcgccgtgtccggcgtctccaccgtcaagaaccccgtgtccctggcgcgccgcgtcatggacaactcgccccactcgtacctcgccttcgacggcgccgaggagttcgcccgtgcgcagggcctggagaccgtggacaacagctacttcatcacggatgacaacgtcggcatgctcaagctcgccaaggaggccggcagcatcctgttcgactaccggatcccgctggcggggacggacacgtgcagcgcgctggcgggcgcggcggacagcaacggcggcggcgtgcacaaggcggggatggtcatgaacgggctgcccatcagcgtgtacgcgccggagacggtggggtgcgcggtggtggacgcgtcgggggcctgcgcggcggccacgtccacgggcgggctcatgaacaagatggccggccgcatcggggactcgccgctcatcggctccggcacctacgcgtgcggcgcctgcgccgtgtcgtgcacgggcgagggcgaggccatcatccgctgcacgctcgcgcgcgacgtggccgccgtcatggagtacaagggactgcccctgcagcaggccgtcgactactgcgtcaaggagcgcctcgaccagggattcgccggcctcatcgccgtctccggcaccggcgaggtggcgtacggattcaactgcaccggcatgttccggggctgcgccaccgaggacgggttcatggaggtcggcatctgggagtgagctggaggccccgccatctaaacacaaatcaaaatcagtgtgcgtgcagctgcatgtggccatcctgcgattgccatgtgtttaatctccgggtcacaggtgttgtcgatgatccaccactagtagtagcgattgcatggagattggtgctcgggtcaataatgatggtgattgtg

SEQ ID NO: 889 - DNA, 2075 bp, Zea mays
  Clone ID: 700095288_FLI
gccccggcgaggtcgcaccgcaccagccatcgtctccttccttccttcctatactaccatccaaccagctgcccagcgcaacgttacctgcccgacatccgacaagccagtccatccggcagcgagcaaaggtctgagatgggttccgtagacgcggcgatcgcggtgccggtgccggcggcggaggagaaggcggtggaggagaaggcggtggtgttccggtccaagctccccgacatcgagatcgacagcagcatggcgctgcacacctactgcttcgggaagatgggtgaggtggcggagcgggcgtgcctggtcgacgggctgacgggcgcgtcgtacacgtacgcggaggtggagtccctgtcccggcgcgccgcgtcggggctgcgcgccatgggggtgggcaagggcgacgtggtgatgagcctgctccgcaactgccccgagttcgccttcaccttcctgggcgccgcccgcctgggcgccgccaccaccacggccaacccgttctacaccccgcacgaggtgcaccgccaggcggaggcggccggcgcccggctcatcgtgaccgaggcctgcgccgtggagaaggtgcgggagttcgcggcggagcggggcatccccgtggtcaccgtcgacgggcgcttcgacggctgcgtggagttcgccgagctgatcgcggccgaggagctggaggccgacgccgacatccaccccgacgacgtcgtcgcgctgccctactcctccggcaccaccgggctgcccaagggcgtcatgctcacccaccgcagcctcatcaccagcgtcgcgcagcaggttgatggcgagaacccgaacctgtacttccgcaaggacgacgtggtgctgtgcctgctgccgctgttccacatctactcgctgaactcggtgctgctggccggcctgcgcgcgggctccaccatcgtgatcatgcgcaagttcgacctgggcgcgctggtggacctggtgcgcaggtacgtgatcaccatcgcgcccttcgtgccgcccatcgtggtggagatcgccaagagcccccgcgtgaccgccggcgacctcgcgtccatccgcatggtcatgtccggcgccgcgcccatgggcaaggagctccaggacgccttcatggccaagattcccaatgccgtgctcgggcaggggtacgggatgacggaggcaggccccgtgctggcgatgtgcctggccttcgccaaggagccgtacccggtcaagtccgggtcgtgcggcaccgtggtgcggaacgcggagctgaagatcgtcgaccccgacaccggcgccgccctcggccggaaccagcccggcgagatctgcatccgcggggagcagatcatgaaaggttacctgaacgaccccgagtcgacgaagaacaccatcgacaaggacggctggctgcacaccggagacatcggctacgtggacgacgacgacgagatcttcatcgtcgacaggctcaaggagatcatcaagtacaagggcttccaggtgccgccggcggagctggaggcgctcctcatcacgcacccggagatcaaggacgccgccgtcgtatcaatgaacgatgaccttgctggtgaaatcccggtcgccttcatcgtgcggaccgaaggttctcaagtcaccgaggatgagatcaagcaattcgtcgccaaggaggtggttttctacaagaagatccacaaggtcttcttcaccgaatccatccccaagaacccgtcgggcaagatcctgaggaaggacttgagagccaggctcgccgccggtgttcactgaggcccgtatgcagcttcttctcggacggccaccacgctgctgcgaaaaaaaaggcgatgtaatggcggtaacactactattcatgaactggcaacagaagggacacgtattcctgtggaacacatgttgccagaaagaggttttagtttgtctgtttgttggccctgtgtgtaatgttcataaacgatatagacgtcgtctctatgttgtttttgacccaaagaacaagcctgattacggcaatacagctacggagtaccgtgtttcat

SEQ ID NO: 890 - DNA, 1010 bp, Zea mays
  Clone ID: 700095295_FLI
ggcgcggcgcagggcgcctcccctcgcggggcgcgccctgccgttctctccgctcgccagcaccagggccccgcgccgcaccgtcacgtgcttcgtgccgcaggacacggcggccccggccgctcccgtgccggcgctggacgaggaggccagggccgcggcggcgcggcgcgttgcggagaaggaggcgcggaagcggtccgagcggcggacgtacctggtggccgccgtgatgtctagcctcggagtcacgtccatggccgtcgccgccgtgtactatcgcttcagctggcaaatggagggcggcgaggtgccggtgatcgagacgctgggcacgttcgcgctctccgtcggggcggcggtcgggatggagttctgggcgcggtgggcgcaccgggcgctgtggcacgcctccctgtggcacatgcacgagtcgcaccaccggccgcgcgagggccccttcgagctcaacgacgtgttcgccatctccctcctcgcctacggcttcttccaccgcggcatcgtgcccggcctctgcttcggcgcgggcctggggattacgctgttcggcatggcctacatgttcgtccacgacggcctggtccaccgccgctttccggtcggccccatcgccgacgtgccctacttccgccgagtggctgcctcgcacaagatacaccacatggacaagttcggcggcgtcccgtatgggctcttcctgggaccaaaggagctggaggaggttggtggcctggacgagcttgttagcagtccggtgagtgaagctactgatactgaagacgcaggagaagaaaagacgcgtccagttgtatgcgttgtccgaacaagcgtgttcatgggccagagtgtgccaaatgagttctagctttaggcgagtgggccaaatgagtgtgggctgcgtcccagggtagtataagtactatgagtctgtaataatcaggacaagaagaatttaggtaaagtaatacatctatcgccatcttcctttc

SEQ ID NO: 891 - DNA, 1260 bp, Zea mays
  Clone ID: 700095307_FLI
gcttccgaccagccttgcttcgcccgttccagcgacgcactactgcggcgaaatcccgctcccgcgttccccatcctccggccgcctcgcttcggcctccctccggaaggtgtcttaaatcatggcgactggccaacttttctcaaaaactacccaagcattattctacaattacaagcaacttcccatccaacggatgcttgattttgacttcctctgtgggagagaaacaccttctgttgctggaataatcaatcctggttctgatggttttcagaaacttttctttggacaagaggaaattgctattccggttcatcccacagttgaagctgcatgcagtgcacacccaacagctgatgtatttatcaactttgcatccttccggagtgctgctgcttcttcaatgtcagctttgaagcagccaacaataagggttgtagccattatcgctgagggtgttcctgaatcagatgccaagcagctaattagttatgcacgtgctaataacaaagtcatcattggacctgcaacagttggaggaattcaagctggtgctttcaagattggtgataccgctggaaccattgataacataattcagtgcaagctttacaggcctggatctgttggttttgtgtctaaatcgggcggcatgtcaaatgagatgtacagcaccattgccagagtgacagatggtatttatgaaggaattgcaattggaggggatgttttccctggatcaactctgtcagaccacattctgcgttttaataacataccacaggttaaaatgatggttgttcttggggagcttggtggaaaagatgagtattcactagtggaagcattgaaacaaggaaaggttgagaaaccagttgttgcatgggtcagtgggacatgtgcacgtctattcaaatcagaagtgcagtttggcccacgcgtccgcaaaggtcactggaatgcttttggagatggatcagaccgaggtcctccacctgctcgagtcccctgatgctctcaagtccaaggttgctgaggcgatggatgttctccgcaatgtggcccaccagcaaaacccaaacctcccgaccagtcagcttgccgcattatcactgaccgaaggcattatgtcctaacttgaaggccataacaaactatcttcagtttccaactcagtgcgggtgtttccagaggttgtctggcacatgacagtattgttccttcgatactatggttggacttgtgaatgttgtttcc

SEQ ID NO: 892 - DNA, 1458 bp, Zea mays
  Clone ID: 700095319_FLI
gcaggtgatccccgattcgctgccttatccgctgaccgctgctactgccgcaccaaagcgtgagcaagcttcccgcgagagcgctcaaccagccaagcgggcgtcggtcagaggtgagcagagtaatgtcgggagcgaacttcctctccaccgcggcgctcgtcgcccgcggcgtcgctgcctgctcttctatttcaaccccgacacggaggcacccgcaaatccggctgtgctgccgggttgacgctgaggcctatgcccatgaagagcgcctgcgattccgtcggagagatttcatcggcacctgcgtcggcaccgctgttgctttggaaatgatcgacggctctacgagtttctctggagtggctactgcagctgatctcattgagcgtagacaaaggtcggagttccaatcaaaaatcaaagacaccctttacgtagccataaaggctaagccagagctcgttccatcgttgttgaccatggcactgaatgatgccatgacatacgacaagaccacaaaaactggaggcgcaaatggatctatcaggctagaaacaagcagacctgagaacagtgggctctcttccgcgttggatttgctgactgaagccaaaaaggagatcgattccttttccaagggaggtcccatttcgtttgcagatctgatccagtttgcagcacaatcagcactgaagagatcgtttcttgacgctgccattgccaaatgtggtggaaatgaagagaagggaagaacactgtactctgcatatggttcaaatgggcagtggggtctgttcgatagaacgttcgggagagcagacgcacaggaagcagatccagagggaagagtgcctgactggagcaaggcttctgtgcaggagatgaaggataggttcgtcgctgttgggttgggtcctcgccagcttgctgttatgtcagcgttccttggacctgaccaggctgctacggagggacgactgatagctgatccggattgccgtccatgggtggagaagtaccagcggagccgcgagaccgtctcccggactgactatgaggttgacctgataactacactcacaaagctgagctcccttggccagaagataaactacgaagcttacacataccctaagcagaagattgacctgggaaaactgaaactgtaagagatgattgccgggcacctgcatcggccgtatccaggaatcgggagctaattgtatggtaggctctgtctgctagagtgatttgattcggcgctgacgtccaagtattggctacttactggtcagctgtcagacattcttcccacggcaattaggatggtccctgtacatggttaaattggttctcccatttcgttttgtgtgaacttgaagaggcaaacgcttgtgagaagtgaggtgttgtgtcaatccccttacgtatacgagacgactgaagaattagtag

SEQ ID NO: 893 - DNA, 1695 bp, Zea mays
  Clone ID: 700095357_FLI
ctcgccgtcgtcttctgcggttctgccgtctacgcctccaatttggcctctctcccttgcaagtttaagcttcaccttcaaccatgggtaaggagaagtcccacatcaacattgtggtcattggccacgtcgactctggcaagtcgaccaccaccggccacctgatctacaagcttggaggcattgacaagcgtgtaatagagaggtttgagaaggaggctgctgagatgaacaagcggtccttcaagtatgcttgggtgctcgacaagctcaaggctgagcgtgagaggggtatcaccattgatattgctctgtggaagtttgagaccaccaagtattactgcaccgtcattgatgcccctggacaccgtgacttcatcaagaacatgatcactggtacctcccaggctgactgtgctgtccttatcattgactccaccactggtggttttgaggctggtatctccaaggatggccagacccgtgagcatgctctccttgcgttcactcttggagtgaagcagatgatttgctgctgcaacaagatggatgcaacgactcccaaatactccaaggcgcgttatgatgagattgtgaaggaagtctcatcctacctcaagaaagttgggtacaaccctgataagattgcctttgtccccatctctggttttgagggcgacaacatgattgagaggtccaccaaccttgactggtacaaaggcccgaccctgcttgaggctcttgaccagatcaccgagcccaagagaccttcggacaagcccctgcgtctccccctgcaggatgtgtacaagattggtggtattggaactgtaccggttggtcgtgtggagactggtgtcatcaagcctggtatggttgtcaccttcggtccaactggcctgactactgaggtgaagtctgttgagatgcaccacgaggctcttcaggaggcccttcctggtgacaatgttggcttcaacgtgaagaacgttgctgtgaaggatctcaagcgtggttttgtggcctcaaactccaaggatgaccctgccaaggaggctgccagcttcacgtcccaggtcatcatcatgaaccaccctggccagatcggtaacggctatgccccagtgctggactgccatacctcccatattgctgtcaagtttgctgagctgattaccaagatcgacaggcgttctggcaaggagcttgagaaagagcccaagttcttgaagaacggcgatgctggtatggtgaagatgattcccaccaagcccatggtggtggagacattctcgcagtatcctccccttggtaggtttgctgtccgcgacatgaggcagacagttgctgttggagtcatcaagagtgtggagaagaaggacccgaccggcgccaaggttaccaaggcagctgccaaaaagaaatgatgcaacctgtcgttaatcctgtatctgcttttgcaatacctgacttgtcactccatcccgaagttttgtatgcggttgttactgttattgtgtactgttaagctctgctgcggcgtgccctgttgtttgggtagcgtcaacgtcgagcgccacttgcgggtgtgcctttgtctgctatcagtagcggcaaaaattgaaagctctcgagacttatgtcccttttgggcgccgttgaactgattattttaaagtctgcccacatttttct

SEQ ID NO: 894 - DNA, 833 bp, Zea mays
  Clone ID: 700095393_FLI
ctgcgccggcgcgcctcatcttccaccttaccgtcctcgtctcctccacggccacgatcctacgatgctgcggattcatggatggcgcggaacaggaggcgaagctgctcgccgccgcggctgggctgcagctgctggcggcgcggcctgccgtgcaaatgtacctcaatgaggctgtgttctgctggtaccagcgtctgcacgcgagccgtgcgccggacactgagtacggccgggccaaggttttcttgcacaaccaccacctctgcgccgtggccacgcagctcgttgcgccgccactgctcgtgctgtcgctgcttgcattgtggcgggttcaagggaaggacttctttgagggcttagaggggatgtactggcttgttggatggtctgttgccatgaaggaggccgcattgcttgcggcccggtggatcgtggctgtgtggtcggcggcgacggtgatcacactcatgtgctacaaacgtggatggttattcgtctcgtgatcctttcttctcttgcttcctgcctgcgtgattggttcatatggagaccggagttgtgtacctgtgtttgatagagtgagatcccaacctggatctctggagttctggtaccacggcacaagtttttgtgtgcactgtttattttgcaagagaaatgttggatcaaattcttttgatttccttgtgtctgttcttactggagaagcaatttgaggtcagattttttgtccgccctttggggtggagtaatgtaacagaaaactgactggccagtcaccctgttgtaccctttgattgatggatatcaatgaatcatattcttccttt

SEQ ID NO: 895 - DNA, 1085 bp, Zea mays
  Clone ID: 700095459_FLI
cagaaccggacggcgccaaggaccaagagcccagcagccccacctgggggccgtccgtcgcgacgtcggtgctggtccaggtaggcgacgagtcgtcgtcgctgggcaacctccggctccggctaagcgaggagagcgcgtcggtgcagcagcagcggtcctgcagccagaggtcgtcgcgcccgccgccagcgttccgggtcaaggaggagtgggacgacagcacggtgagctccaacgtgtccaggatgaggatccagaacaggatcgaggccaccacgcggcgcgagcgagcgctcgcctacgcgttctcgcagcagcttcggagctgcggcggcggcaccagcaagaagcggtcgtcggcgcgcgcggaggggcagggggagttcaacgtggggtggagctggctggagcggtggatggcgacgcggcaggcggagcccgcggacgactgcgcgagccgcaacgcggacacgggctccgccacggggcggcgggtggtggtcgtcaggaggcggagcgacctcgccgtcgaggagaaggagagctgcgcctccaacgacgtctcggtcgtcagcttcgacgcctcctccggcctcgcctgccataggcccacgggcaacaagagccggctcaagggcggccggagcttgccgcgccggaagcaggtggcggcgtcggcgtcggcgtcggaccaccgcttccaggaaagatcacacaaggtgagcaagaaggggcaccagcgagtggagcaggagccgcacaaggaccgattcgacgccgtcgccgccctggacgacgacgcttgccagcctcccacggattactgagacgacctgctctgtacatagatttggaaggatttgcagggctagctgacgatttgtttgggcttgcactagtctgaaagactgcacggttactgtctgctgagtgactgtacgtgtcgtgtcggtcatgtaaaagttcctcgctacacgtacgtcgtatcaaacgtcactcactgtaaaacgtcacggccacatacacgatgacgagttccctagacacggcaaggagaagcaatcagtgacagtatttgtgat

SEQ ID NO: 896 - DNA, 1792 bp, Zea mays
  Clone ID: 700095468_FLI
aagtctacttccattcctctccttcctaaccccgcgtcgcccacgagctcgccgtgccggcagaggcgaggacctcgccgaagcagaggccatggggcgaccgcagccagccagggctggcgccatcaacatcgaggcgtgcgcgcggccgatcgccgtcgaccaccgtatcagtctcccgtactacttccgcatcgcgggcagcctcctccgacaggctaatatatatcggaacgagagtaacttgctcgacctgtatgtcatccttctgagatactcgagcttgctgtgcgagacgattccgaagcatcgtgattaccatgccttcaagttaagagaaaaggcattttttgataaacttattgatattatcaaagagcttgagacattgaagccagttgtgcagcggcaggttgttgagcataacagaggaagtactgtggaatttaatactaatagtctaaatggaaactacggtacaactcgtaggatagagcagtgtactccaagctcttatactccacagacatttgtaggcagcagtaatggagcattgcaaaaacccttccatgctgggagacaagtggcatcattatcaagtgtacagaaacaatttatgaatctaccatatccaaaagaagaaacactagctagacactccatattaggacctaatggtcttaatggccggtggaatgggcctgttactggaatcaaggttcaatatccaagcaattttgaattaacacaaaatggtataacaagtttagtgccatccatcttgaaccaagatgatttgcatggttccaacactgcacctgcacctccacctccaagtagctcctcaaatgacaatgacaatatgaaatctgttctctctcttgatgatggtcgatggtctgtaccagcagaagaacacactccacttccttctgctaatttggaagaggagttgttccaattgaatatcaaacaaccttctcctccaccagttcttgcagaggtacaaagaccaatttctccatcaagagttgccgatccaacaccaggacttccgacctcaggaactgcccgatttcagaacttgcatgttccgatcaagttgatggagtgttttctaagggttgctgagtcaaacaccaaaagaagcttagaaacctgtggggttcttgctggtaccctgaaaaatagaactttttatgtgacaaccttaattattccaaagcagaaatcgacatctgatacgtgtgaagctacaaatgaagaagaactatttgaagttcaggacacatactcattgttcactcttggttggattcatacacatccaacacagtcctgcttcctttcttccattgacgtccacaatcattattcttatcaggtcatgctacctgaagcaattgcaatagttatggcacctactgacacaagaaaacatggtatatttcatctcacggatccaggtggcatgggcgtgatccatgattgtcaagagagaggtttccatcctcacaaggcaccacttgatgggtcgccaatatatgagcagtgctcccatgtgtacatggacaccgatataaagttcgatatgattgatctgcgacaaagatgacgaagctcacctttgggtttattttgcaacctatacttctcgcagttaaatcaattgctgccttatttttttcttagctcaagatttgtgaattcttatgtacgctgttgtacatagctattgcgttgtatagggaaaaccattgaggtaataatatcattggtaatgcttcgttgt

SEQ ID NO: 897 - DNA, 1866 bp, Zea mays
  Clone ID: 700095474_FLI
ggcagcgaggcagtagctgcagccggccgcgcccccatctcatctcgggggtcgggacctgattaccccaatccgtttcctcaccaaatacgccacggcggcgcggcgcgctcgctacccacaatggcgctcaccaccgcctccacggtctcctctccctcccgaatcatccgccggttctcttcttctcaagactctcgccccccttcctcgctcctacatctcgccccgcgccgaggaaccgggaattccccgcgcgcctgtagctggcaccggctcgttgtgcgccggatgggctgggcggcgcgagcgctcctcggcggattatcggacgccggcgccagtgagagcgacgaggaggaggagcacgccctacgagtggggcagcgggagggcgagatcgacgacgccgtggagctctccgcgacggccgttgggccagagagatgggacgtgctgggcctcggccaggcgatggttgacttctcagggatggtggatgacgagttccttgacagattgggcatagagaagggcacgagaaaggtcataaaccatgaggagaggggacgggtcttgcgtgccatggatgggtgcagctacaaggctgcagctggaggctccctgtccaactcgctcgttgcgctggcaaggcttggtagtagccagtctgctggctaccctgagcttaatattgtgatgggcggcagtgtgggcagtgacccactaggtagtttctacagggcaaagttgcgccgtgctaatgtgcacttcttgtctaagccggtcaaagatggaacaactggaactgtcattgttctaacaacgccggatgcacagcgtactatgcttgcgtatcagggtacttcgtcaactctgagttacgattcagacttggccagtttagtgtctaaatcgaatgtactaattgtggaaggttatctatttgagctgcctcacacaattgaagctatcaagcaagcgtgtgaagatgctcacaagaatggtgcaatcattgctgttactgcatcagatgtatcttgcatcaagcgttgctacaatgactttcgggacattgtaagaaactatgcagatatactgttcgccaatgccaatgaagcaagggcgttgtgcgagctaccctcaacagacagtcccatgtcagccacaagatacttaagccactccgttcccctagtatctgtgactgatggcatgcatggctcctacattggggtgaaaggtgaagcaatatacatccctccaccacaatgcgtggccgtggacacttgtggtgctggcgacgcatacgcttctgggattctgtacggcgtcctccggggtgcttccgacctgaaaggcataggacttttggcgtcacgggtagctgctgtcgtcgtcgggcagcaaggcacgcgactgcgggtccaggatgcggacagactggctggatcgtttgagcaccatctggatagcttggagttctgctcagatgtttgaatagatcattctgcaaacgtctggtctgattgtatctgttttttttcccaagccttagaaatctatatgtacatacatcacttccctaggtctagtacatttcatcagggcatttagccgagctgggtaaatcttgtgcgcccatttgatattactttccatctttgagcattgccatgattggaattacgtagatttcattgggcatggaaaatacaacggtatagttcatttcctgttcccattgaaaatggatggatgctatgttggtctggcctttctttatgtgtagtatgtaaaaggaactttgcggtccactgaaaccgcagtgagactgaaattacggtaatgcaatccggctttgtt

SEQ ID NO: 898 - DNA, 1236 bp, Zea mays
  Clone ID: 700095494_FLI
gcgagaagaccagaaggtgagaagagagagagagagtgtgtgtgatcggtacaaggatcaccgctgtgcctgcgcgtgctgcttcaccgaatcgagtcagatcctgtccgaatccgagctaagggatggcaaccggtagtgaagcctcgaaggcagctgaggctgtggttgactggcataaacacgacagcaagaggatgctccatgcggtttaccgtgttggggatctggaccgcacaatcaagtactacacggaatgctttgggatgaaactgctgaggaaaagggatgttcctgatgagaagtacaccaatgccttccttggctttgggccagagaacaccaactttgcagttgaattgacatacaactatggcgttgacaagtatgacattggaacgggctttgggcatttcgcaattgctaatgatgatgtgtacaagttagctgagaatatcaaatccaagggtggtaagatcacccgcgaacctggtcctgtcaagggaggatccactgttattgccttcgcacaggatcctgatggctacatgtttgagcttatccagagggctgacacacctgagcctctttgccaggtcatgcttcgtgttggtgaccttgagcgttctatcaagttttatgagaaggccctagggatgaagctcctaaggaagaaggatgtacctgattacaagtataccattgccatgttgggctatgctgatgaggacaagacaactgttctggagctgacgtacaactatggagtcacagaatacagcaagggcaatgcatatgctcaggttgccattggcaccaatgatgtgtacaagagcgccgaggcggttgatctggcgaccaaagaactaggtggcaagattttgcggcagccagggcctctacctgggatcaacactaagatcgcctcttttgttgatccagatggctggaaagtggttctggttgacaacaccgacttcctcaaggaactccactgaaggctcgggatacccaggtgctgtgctaggatgtagtaatgcttgtctgtggtgtaataagatgtgggtggtttgtttctgccctgatgaacttataatactgaatgttgctacagaggttgtgcttctgccagtgaggtttgggatttgctatgtaactgtgcctgcgggctccgattctggcgctgttcgtacactgtagaagccagtgaatcccaataaacccagcttcacaggc

SEQ ID NO: 899 - DNA, 1102 bp, Zea mays
  Clone ID: 700095514_FLI
gtcacgtcacgaggagcggaacacacacactcggggttccgatggcggcggccgcaccaacacacgcgcccgtgtcctcctcagcgtgccgcgcgggattctcctctagcggtgtatccttccccaattttcgctcggcagcggcttcggcccctgggtggcggcgcagggagccgtacccggcagtctccgtagtgtcgagctccccgcagtctgtggcaggagctataaccgtcgacaccgaggttgacacattgctagacagtgtgaagtgggacagcaaagggttggctgttgccattgcacaaaatgtggatactggagccattcttatgcagggttttgctaataaagaagcccttgcaaaaactatatcaaccaggaaagccacattctttagccgttcacggtcttccttgtggacgaaaggggagacatccatgaacttcattaatgtgcatgacattttcctagactgtgaccatgactctataatataccttggaaagccagatggacctacctgccatacaggagcagaaacgtgttattatacttcagtttatgatgctctacaaagttcaaagcccaatgaaggcaggcaggttatgacaaccctatactcacttgaagatacaattagtagacgccacgaggagaaagttactgatggaggtggcaagccatcatggacgaaaaagctactccttgataaccagctactttgctcgaaaatacgtgaagaagctggtgagctaattcaaacgctgcttgagaacgaggaccaatctcgtgcagcttcggagatggctgatctgctgtaccacgctatggtgctgctcagagtcaaggatgtaaagatggaacaagtccttgaggtcctgaggaagagattttcgcagtctggtatcgaggagaaggccagtcgcaataaatcttagcgtgattggttaataatgccttgatggtggatgactctgatttgctatcggtgcggaatgtgcactattgaagaattttgtgtttgatggatcagttgtgtttttgttttctccgacaagacatctatgaaatatgtggcaggtgtcaataaagttatctc

SEQ ID NO: 900 - DNA, 2091 bp, Zea mays
  Clone ID: 700095525_FLI
ctctcgaaagcatagcagtccaactatgcaatgcaaccctacatcggataagttcaacaatttgtaatgcgacaagtcttttacctgaaccgctcaagttcttcgttccaaactacgtggtaacaaacacagttaccactcatcatttactactgaccacaaccggtgacaagtcgtcaactggccaaatatacaggccgcagcagtagtattagcacaaacatatatatacagtcatatacatacacgaaccaacatcatcacagcacaaccgccacaactgtacaaatctaattttatgacgaacgcatcgataatgctcccagcaatgggctggaaccactgatgcaagaaatgttttatcagtgttgccttcattcagttgggatatcagagctctggcctttctctgggttaggggaagttattggatgaccttcacctatgctagaattatcttcattcccttgattgctccgttgatcacttgtagaagccatcgttgttaagatagtctccgcaggtaaactgccagtgttctctgtgtcctagagtacaacatgcatacacaaggtttcattcatcatccaccctggaattgtttctgataaaagattcatgtatttctccatagcaatctcagggttcatattccctaacttctgccaagcagaccattttgcacgagatgagggtctcagtgtaagtggctgcgctgagtcataacagggaccgtcaatggcaaccttgaggagaccttgaagctgcagctgcacatcactatcgagctttgacagggcagccgccccagccccactagcagcaaatgctgcagccgcaccaaacctcttctccacttcactcctctcgatcccttcccactcctcaaactccatgtctgcctcagggtcatccttcggcagcccttgcgatgtcacttcccccacaggcaattcggtaaccacttcatcactgaagctacattcatggataacattcacatcatcattttttcctgcgaccgactcctcttcaggaaccagttcttgttgttgatcaactgtttgggcctcacactcagcttcctgcttgcactgcacatcctcgtgtacctcggcagcttcttcaacgggctgatgatgtttaagctctcccttccctgccaatggcacatcgagaactggttgtggagcagccccagcaggcaattcatgctctacttgctcctcctcctccaataccgcatcaagaatctcttcaagaacagtctcggaatccaattcgttgggcctcacttcgatagctcgtacactcttgtccactaatcccacgtcaagaacatcttcagcaggagccgcttcggcaacgagatggtgctgtttcacttcagcagcttctgtttccaagggaggcacttgcgcaactccaacaacttctactccctgcttgtccggtcctgcttcgagaacttcaacgggaacaagagcaacctcagcacccagatcatactggttcaccacaacatcctgcacggttcgttcctccaaccctgccgcaccagaaacctccttaggcacaacctcagcgcccgacaccagctggctcgcttcagcacccaccgccgccacaacagttgcggaggtcaaatcaggccgcttcacgccgccaccaccgtcctccccctcctccacttccgcagcaaggcgcacctcccgaacagccttcacgggaaccccctcctcctcgggcaagctctccggctccttcacctccgcgacgaccaccgccggcgccttctccgcctcaacccacccatccgcctccgacggcgccaccgccgccatcccttcgctacgcatcacctcgtcgacctcgatgatcctctcctcctccgccacctcctcggcgatcgcggctgcggcgcgatcggtccggcgatgggaatcattggctgcgaagagcgtggcgagcaggagggcagcgaggagggtgaccgccgccgtgaggagcagttcgtagaacagttccatctcttcgggtgggggaaggaagccggtgcggcttttttggccccttcgctttctcgctcgg

SEQ ID NO: 901 - DNA, 775 bp, Zea mays
  Clone ID: 700095575_FLI
cgcctccgtgcttccgtctcgcacttccggacataaagtgcgaccatggccatggcggcgctgcgggaaacctcccgctgtttggcgtccagggggagatctgcggcctggcgacccgtgctcctcgcgcagtcccgcggcatcacttacaagctcttcgtcggaggtttatcacagtttgcgacggaagcaagcctagcagaagcattctcacgttacggacaagtaatagaagctaccgtcgtcagggataaggtgaccgacgtaccgaaaggattcggcttcgtgaagtttgcttccccggaggaagccaataacgcgagggaagagatgaacggcaaggcattgaacggtcgggtcatatacgtggacattgcaaaggccagacaggaccgtgctgcagatgccctcccaatagcgagaggccctcctaagcctatcagcaacgactgatagaggaaggccttggtgtgcgctcccaatagcgagaggtcctcctaaaccaattagcaacggctgttcaaggaatgcctggtgtgtagttccctcccgtcctcagctggcatactagttcgattctcagatacggaggctcttagatgatgaaacgtgccgtgaaatattctgcggaactttgaggttctggttgaacacaagtagagtttatttagatttaattacccggagtactcgtgtcatgcttgtccggatcagacactgcgtttgcttgtcatgacaggtgctgctttaataaatccgtggtgctagccacacg

SEQ ID NO: 902 - DNA, 1245 bp, Zea mays
  Clone ID: 700095579_FLI
cgttttaccccgtccggccgtccccctcgttctttctctcccccttctctctcgctgcgacgactgggtaggctgccgccgccgccctacgccaggtcccgaggaccaaggcattcgtattcgtcagtctcttcgccgggcgacgccagaaagaagaccagaggtttgtgggagtatcgaaggtggtggtgattttgtagcgtggtgttgcagtttggttggaacttggagtgtagagggaagatttggtgatgagcagccgcagcccgccgccgaaggaccgcaggatgcgtactgaacgcacctcataccgtggcgcaccatatcggagggacagccgccatggtccaagcaggtttcggaatgatttgtgcaacaattgtaagcgtcctgggcattttgctagagagtgtcctagcgtggctgtctgtcatacctgcgggcttcctgggcacattgcagctgaatgttcttccaaaggtacctgctggaactgcaaagagcctggccacatggctaacagctgcccaaatgaagggatatgccgtaactgtggcaagtccggacatattgcaagagactgcactgctccaccagtgccgccaggagaagtgatcctttgcagcaactgctacaagccagggcattttcgtgaggaatgcaccaatgagaaggcctgcaacaattgccggcagagtggccatattgcccgtaactgcaccaatgatcctgtttgcaacctgtgcaatgttgctggccacctggcccgtcagtgccccaagtctgatacattgggcgagaggggtgggcctcctcccttccatggtgttggcgctcccttccgtggtgttggcgttcccttccgtggtggcctcagtgacgtgatctgccgggcctgcaaccagattggccatgcgagtcgtgactgcatggctggtgctttcatgatctgccacaactgtggcggccgtggccacacggcatatgagtgtccctctgtgagtctcattgagaggttcccacctcgccgtttctgaaggacgtccaagggctatccagatgactgttgttttcagcccattgtgtcaagaacactcatttccgttttcttttttttttccaaaccctaatggattctagatctttcagattcttaacttgtcagcactatttgtgattccctaatggattctagatatttcagattaataactcgtcagcaccatttataattctggattttct

SEQ ID NO: 903 - DNA, 973 bp, Zea mays
  Clone ID: 700095609_FLI
aatcgacacccggccgagatgggccgcaagttcttcgttggtggcaactggaaatgcaatggaaccgcagatcaggttgagaagattgtcaaaaccctgaatgaaggaaatgttccctcttcagatgttgttgaggttgttgtcagtcctccttatgtgttcctcccggtggtcaagagccagctgcgccaagagttccaagttgctgctcagaactgctgggtgaagaagggaggtgcattcactggtgaaattagtgctgagatgctcgtcaaccttggcgttccctgggtcattcttggacactctgaaaggagagctctgctgggagaatcaaatgagtttgttggagacaaggttgcttttgctctgtctcagggactaaaggtcattgcatgtgttggtgagacccttgaggagagggaggctggttcaaccatggatgttgttgctgcacaaacaaaagcaattgctgagaagatcaaggactggagcaacgttgttcttgcctatgaaccagtctgggctattggaactggcaaagtcgccaccccagctcaggctcaggaagtgcacgcctccctgagggattgggtaaagatcaatgtcagccctgaggtctctgaatctacaaggatcatttatggaggttcagtaactgctgcgaactgcaaagagctggcagcacagcctgatgtcgatggtttccttgtgggcggtgcttctttgaagcccgagttcatcgacatcatcaacgccgccgccgtgtgaaatccgcttaagatgttccaacccttcaccctgttgcggtgatgtgctgaagacagatcagactatttttttgtttaaccgtgccgtgctatgtaagctactaactttgcgctggtgcggatgctgatttccctcccccctagctttttgtgaggctactctacagcttgattcagcttgctaataatgtttgcctctggac

SEQ ID NO: 904 - DNA, 1755 bp, Zea mays
  Clone ID: 700095659_FLI
gagtgagaccagctcagccggaggggagaggctgctcgcctgctctcttcttctccgtaacagaaacgatggacgataacccttgtgtccattccgaaaataacttgttttcttctgttctaatacaaatgcgctgggcatggattggtgggtgttgcaggggtgtaccagagcacggttaatgcggcggagggcaaggtgacggtgtccgggctcatggacccggacaccgtcatcaggaagctgcacaaggccgggaagccggcgcagctgtggggcgccaccgccaagcctgccgtggcgacccagctcgagaaactgcagctcaaggatgccgggggcaagggccagggccagccgcccaagaacgcaggcggcaagggtcagccgcccaagaacgccgccggcaagggccagggccagggccagaagcagcagcagcccaagggtggagcgggcggcgccggcgccggcgcgaaagtggtggcgctgccgcactcgcagccgacgccgcagcagctgatgcagatgcagcagcagatgcagatgaacgggatgaagtttgctcatccggagctcatggccatgggcgcaggtcgcatgccgatgccgatgccgttcccggcggcagcgcaggcgcaggcgcaggccgccgcggccaaggaccccaagaccgtcaagttcgccctcccggggggcgaggagttcggggacgacggcagcgacctcgacgacgagttcgacgaactagacgacgtggatttcgaggacgacggcctcgacgacgacgacgacggcgacctgtacgacggccccgggatggtgatgaagcccatgggcatgcccccggccgctgctgccggtggcggcaacggaaacggcggcggcaagaagggtggcggcgggaacgaggtcccggttcagatcaatgggaacgccagcaacggcggcggggcgaagcagaacgggggcggcaaaagcggggccaagaacggcaagggcggcggcggcggcggcggcgtcgttgccccgggcggcgggaaccaggctgggcagggcaagccgaaaggcggcttccccggcggcgccggtctcggcgggccgatgatgggcggcgcgccgccgccgcatgcgggcatgatgatgaggccgccgaacatgatgggcggcgcgggcggtttccccggcatgggccagatgggcggccacccccacatgggtggcggcggcatgccgcaggcaggcgggggcgccgcgcacggcatgccggctggtggcagcatcagcatggccgctggcggaatgcctggggccgggttctttccgcgcggcgttggcggcggcatgccggccggcgcggagatgctgggcatgtcgcagctgcctccgcagcagcagcagcacatggcggcggtgatgcagcagcagcagcagcacatggctgcgatcatgcagcagcagcagcaacagatgatgatgatgaacgggcacggccacggccacggccaccatggccacggcgggtacgggtacgggcgcccggcgatgccgcagtacccgccgccgccggcgtactactacccgatgccgcagcgccacccgcacgacagcatgttcagcgacgagaaccccaacgggtgctcggtgatgtgaggcgaggcgcggcggcggcctgcggggggctccggagaaagtgaaccaggcaaccagccagccagccaaccggaaggagggagctcgggcccgtcaggtcgg

SEQ ID NO: 905 - DNA, 1309 bp, Zea mays
  Clone ID: 700095985_FLI
aaaaaaaaagaagaataccccgaacacggccagaaggcctactaaaccctgccgccgccgccgccgcgccatggccgacgagctcgacgagctgatcggcttcctctccgaccgcaacccccaggtgcggggcgcggcggcggacatcgtgcgcgggctgacgggtggggaggacggcctccgggcgctcacggcgcgcgccgatagcgcccttccggcgttgctccgcctgctggcctccgcgggcggaagtggctcgggagaggccgcggcggactcgctcgtcaacctcagccaggacgcggccctcgcagcgcgccttgtcgcgctcggggccgtcgatgccgccatggacgtcgtggccaagcgaggcggggagcagccagctctcgcgcgcagactcgtcatgctgctcgttaacctaacccacgtcgagtccggcgtcgccgcgctcctccaggttggggatgagaaggtgcaaggcttgtatgttgcaaagcttgtgcgatcattctgtaggtcatccagtgattctgaagaggaagacatttttgagtacgttgcctccacacttgtcaatatatctaaggttgaagctggaaggagaatattgttggagcctaagagaggtcttctgaagcagattattcgacaatttgattcaacaaatcaacttagaaagaaaggggttgctggtacaattcgtaactgttgctttgaggctgatactcagcttctgagtttgctttctttagcagaatatctttggccagctctacttttgcctgtagccggaaagaagatatatagtgaagaagacagatcaaaaatgccacttgagctatcgagtgcactctctcatgaacgggaagttgttgaggattctgaaattcggcagcaggcattagaggctatttatatgatcgtattgcaggatggtggtcgaaggtccttttggtcagttaatggcccacgaattctgcaggttggttatgaagatgaaaaggacccgaaagtgatggaagcatatgaactcattggttccctgcttgttgggaagggtgaagatgtacaagataacaagaaggaacaaggagagaagcctcaatgagccccgccgctgataaaaacggtgttgtatttttgtttgtctagcagtgtgcaatagcaatactatgatatcccaacttgtcaactgaaaaatttgcaggtattggcggtcttttccgttgttttgagctctctgacgattattcgtttttttttgaatgcatctcttgacgagtctttcacaccgtcacttcagaac

SEQ ID NO: 906 - DNA, 468 bp, Zea mays
  Clone ID: 700096042_FLI
ggggggcatcgtaaacaacacactgaggccacatgtgccagcttcatgtgatccggagtggagaaggctcatggagcagtgctgggctccagatccggcacagcgcccagcgttcacagagatcgctggacggcttcgctccatgtcagttgcagcaaatcaggcgaaggcaaccaaataagatacaggtggagtactgcctttcaacccccaatccgttgggggttctcttctcctttttttccttttgactggagagtaatacatatacatgcatgttatagagtgctgtaaaaattagtgcatcaatttatttataaccatgttatgagctggattgtatccgtgaatattctggacccggtttgaaggttggtgatgtgtagaagtattagttggaatttgttgaatggtcgcaggtgtgcttgtgctccctcataaaacagaaatgaatgttgtaatatattc

SEQ ID NO: 907 - DNA, 995 bp, Zea mays
  Clone ID: 700096084_FLI
cgcccaacgccagcctgcgcgggttcgaggtcatcgacagcgccaagacgcggctggagcaggcctgcttcggcgtcgtctcctgcgccgacgtcctcgccttcgccgcccgcgacgccctcgcgctggtcgggggcgacgcgtaccaggtgccggcggggcggagggacggcaacgtctcctcggcgcaggaggcgggcgcgaacctgccgccgccgacggcgagcgcgagccagctgacgcaggcgttcggcgccaaggggctgagccaggccgagatggtggcgctgtcgggggcgcacacggtgggcgcggcgcgctgcagctccttcgcgccccgcctctactcgtacgggccaagcggcgcggggcaggacccgtccatggaccccgcctacctggcggcgctggcgcagcagtgcccgccgcaggggaccggcgccgccgacccgcccctgcccatggaccccgtcacgcccaccgccttcgacaccaactactacgccaacctggtcgccaggcgcggcctgctcgcctccgaccaggcgctgctcgccgacccggccaccgccgcgcaggtgctcgcctacaccaacagccccgccaccttccagaccgacttcgtcgccgccatcatcaagatgggtgccatacaggtgctcaccggcacagccggcaccgtccggaccaactgcagggtggctagctagctcatccatgatttacgtctacctgtagactcatgtgcttatataaaatcatacgacgaaactgtacgtacggcgtagagtggtgtggcggggtccaatgattcagatcagattgtacgtgtccatcgatccaaactgtagttgtgtacgcagtacagtacgtgctagctacggatgatatatatagcttgtgcgtttttttacaactttttttttggtccttttggtttatacatatttattagcagatacggatcgaatacaaatattaaaaatggttcgttc

SEQ ID NO: 908 - DNA, 2846 bp, Zea mays
  Clone ID: 700096110_FLI
ttagtagtagtgccgctgcccgctggtgctgggagctcatcatcattcgtcggtagcaggaaggaggcggcgtggaaggggaggcagatgcgggaggcccaccgcagggtcgtcgcaccagatggacacgccggataggccccgcgccgccgccgccgccgggttcgaggattctcctgtcttcaatttcatcaacaatctctcgcctataccaccacctaaacctttagactcagcacataatgtgcagctattcaagtcatcagacttggcacctgtttcttcgatctttgcctcaccacatgttaatccagtgaaggaaactaaagttttgatcagggatgaatctgttcaccttcctcaagaattgcactcgcctagcagtgtcaggactcgaatagacacctcaggctcttttagaatgatcagatgcaaagacattgtgtcggacaattgcaatatcacttgtcaactaaacgaggcatctattgattcttctgatcatacatcaaactctacaggccaattgactcaatccatacaggatgctgctggcagtatggaaagcgataaggatcaatgcgatgccaataaaacagaccttaccatatcccaggagtgcacaggcctagaaggtatgaaccttgatgagagtggcccagacaaaatggattcgtcacattctgggattgttgttcatgaaaaccagctatctgaacaaaacaatgacgaacctgcagcatataatgagggttacattattacacaccaatcaactagtgatatgctcactttagccataccatctggaacagaaacacaaccagtgaatgatacacaaatggctgataacccctactcttgtgaatccttgttggatgatcagtcaagtggatattgcacccagaattctgtgcatgaaccccatttgtactggactggggcagttgaagggtctgcagtatcctatactccccaaacactccctggtgctttgcaaagtcagctgatgccatgtaacaagctcagtgaaccaaaagattacgtgcctactgagcaaaatgccttgtcacagcacttacgtggcatgcgtaggcgcagccttttcaatgaaaaggctggaattagtaataaaggtgtagacaaaacttcggatcatcatcctgtaaattcaactacccccaaatgcaaaactatttctggtgacaactcaaagcctctaagaacccctccatgcgcattacctggtattggcttgcacttgaatgcccttgctacaatacctaaagagaaaatagtccctcgagagattcagtctactataaatgaatcaagtaacttgataggccctgctggatcttctccagcaccttttgagcaaaacattataaatgatgatttcactcaaacaactgatgttgcaactgccgaagcttctagtcagggtagtcccaagaagaaaaggcataagtttgacaatggtgatggcacttcatgcaagcgttgtagttgtaagaagtcaaaatgcctgaaactttactgtgagtgttttgctgctggagtctattgttctgagccttgttcgtgtatcggctgtcagaacaaccagagtcatatggaaacagttctgtctacacggcaacagattgaatctcgcaatccattagcatttgctcctaaagtcattcatacatctgagcctggtatggacttaggggacttttccaataaaactcctgcttcagctcgtcacaaaaggggatgcaattgcaagaagtcgtcgtgtctaaaaaaatactgtgaatgttttcagggcggcgtgggatgctccgtaagttgcagatgcgagggctgtaagaatgcttttggaaaacgggagggggcttctgtgttaggcataggggaacctaaacagggattggaagaaaaggatgtttgtgtgaaagaagaaaaaagtgaaatcgataaacagcttgttgtctaccagactactgacgctgctcctgctgaaaatgtactgaccacaccttccatggtggagtgcagacccttggcttgtcttccacccgcaagctccaagaaaagctccaaaaaaccacggtcttcaacaaagctcacaggacatccttctcggccgtgcaacttacaagctcctccaaagaccgacgttgtgctctccccattcgaaaactacgcggaaatggtcctcggtgatagcacatcagatatcctgaagggaaattcatctcctcatacttctgttaaagttgtgtcaccgaataagaagcgaatctctcccccacggatgggtatcgggctatctccaatctgtaggagtggcaggaagctgattctcaagtccatcccttctttcccttcccttggtggtgatgtaaacaacgaggatccgaaggccaagctcccagcgccttgaatttatcatgttttgtgtcactcgtggcccttcccgttggttctcgaaatcgcccacgcgctgactgcaccagactgtttctaccaccataccatcagatagtggatggacaaccaagcgtgcaccgtttcatcatttgtgtaattgtgtttgcttcgattaataattattcacgtactgctataataacccactgtgatggcagaattctacctacctcccagaaccaccagtggcatttggtttgctggtaagttatgtctcggctcaaggacgttgctgtgttgcctgtgcctgtatgtctgtataatttatgttcattatccgggatcaagatgtggaacctctatgtacctgatggcagaactgttaagacatattttattttatttttatctgaggttaaactgtg

SEQ ID NO: 909 - DNA, 1087 bp, Zea mays
  Clone ID: 700096111_FLI
gctcctcctcctcctccccccagtccctcccaggctcccaccccgccttgctcgcagcctccccaaaaccctagccctagccctagccctagccctagctctcccacacccgcactgggagatggacggcggcggcacgcaccgcacgccggaagacgtgttccgggatttccgcgcgcggcgggctggtatgatcaaagcgctcaccaccgacgtggagaagttctaccagcagtgtgacccagagaaagagaatctgtgtttgtatggtcttcccaatgaaacatgggaagtgaacctgcctgcagaggaggttcctcctgaacttccagagccagctctgggaattaattttgctcgtgacgggatggatgaaaaagattggctgtcactagtcgcggtgcacagtgatgcttggttgctggctgtggccttttacttcggtgcaagatttggttttgacaaagaatccaggaagcgcctttttgtcatgattaataacctccctacaatatatgaagttgtcacgggaactgccaagaagcaaaccaaggagaaaactcccaaaagcagcagcaagagcaataaagctggcccaaaaccgccacgccagccagaacccaactcaaggggttcgaagatgccacctccgaaggatgaggatgacagcggaggcgaggaagaggaggaagaggaagatcacgaaaacacgctgtgtggttcttgtggtgacaactacggacaggatgagttctggatatgctgtgatgcgtgcgagacttggttccatggcaagtgtgtcaagatcactcctgccaaggccgaacacatcaagcactacaagtgtccgaactgcagcggtagtggcaagagagcccgagcatgatgatgctggctggatatatccatctctcatgcctgacttgatgtaaaacgcccacatggggaccgaatgcccgatggctgttgctttcagtgtaggaccagctgtgtaggttcttgatgtgctgtttgctgtagtatgtcaaagacgttctagatctattgttagtaactagcaactaattgtagtagcctgtatttcttc

SEQ ID NO: 910 - DNA, 950 bp, Zea mays
  Clone ID: 700096182_FLI
atccataagaagactgaacatgcttgatatacccgtacccaaactgccatacatgagagtagatagacagagaacatgaagcaaaacagagacacaagctgcagcggcacacatggggcaccgcgccccactaccaccaccagaccagacgacgcacactttatttagcccatgtcactcgcagtccgcaccgggcactgctatagctacgacacacacactgtcacacacagagagatggagagaaaccgtcgcgttcgcgttgtactgaacagtaggcgccagcgcgcgcgacgcgactggcacgccacgcgcgcacgctgagacatcgatctcccgacccgctgtccgccgccgcagtgcgcgtacggcgcacggcctcactcgctggccttctcggccacctcagcggccggctcggccttctcgggctcctcagcggccggctcagccgccgcgggctcctcagcagcagcagcagcctcgggctcagcggctgccggttctgcttctgtctcggcagcgggcgctgccgcttcctccttcacctcttcagccgccgccggctccggctccggctccgcctcctttgccgtctcttcctcctttggcgtctcttcctccgccgccacgggggccgcctcgggctcagcggcggcagctggctcggtctccgccggggcagctggctcctccaccttggcctcggcggcgggagcagcctcctcgggcacggcggcggccggagccggggtctccaccaccggcgcttcctcggtcgccacgacggtcggggtctggacctcggcagtggccatgggtgacgatcagaaggctgatgactacacgaccgagtggctagctactagctagggctagagctagagcagctaaagaatgatcgagctgcaagagtgagcgatcagctgctgatcgggagtgggatcgct

SEQ ID NO: 911 - DNA, 1787 bp, Zea mays
  Clone ID: 700096218_FLI
gcagtccaggtcgatcgcgatcggaggccagaaatccatggccgctcccgccgccgcgccgctcgacgagggcaaggcgaagaaagtccttcgccaggtcgagttctacttcagcgacagcaacctcccccgcgataagttcctgcgggagacggtcgagcagagcgatgacggattggtgagcttgcccttgatatgctccttctcgcggatgaagtcccacctggggctggacgcagatgtcaagcccgagactgtgccggaggagaccgtgcttgcggttgctgaggtgctccggccttctcctgccctccgcgtatcggaggatggaaagaagattggtagagctagtgaactcttgaagccagatgagatcatagaacaagtagactctaggactattgctgtatctccgctgccttgcaatgtaaagcaggaagacgtccaatcttttttcacaaattatgcaaaggtaaacagcgtgagacttccacgcaatattgccaacaaaaaacacttctgtgggactgctttggttgagttttctgaagaagaggaagcaaaaagaattatggagactgctttagtatttgcaggggcaaatctggaaataaggccaaagaaggagtttgatgctgagcaaaagtccaaaaaagaagcatatgaaaagacacaccttaaaaaggacaaccagtatgaaggctatcaaaaaggcctaattgtggccttcaaattggagaaggccacagctgatactgtagtgcagcaagataacatagataaagagaatgactctgctacgaaattagatgtttccagttccatggaaaaaccttcaggccaggggccagaggagtctatccttgagagcgatgttattaagcaagggatgtcctcagatgacatgaccaaagagaaagatctaaacactggggaagctacagaatctgagaagtgtattagtgatgtccccatagaaagtgataaacatggtgatagtgaaccattgagcagggaaggcaaaatcatttctggcaatgtgaatgtgaagaaccaaatatcgagggaggatctaaaagaagcattcaaaaaatttggagctgtccggtatgtggacttcagcatcggagataattcaggataccttcgctttgaagattctaaggcagctgaaaaagcccgcatgtctgcagtacttgctgatggtggcttgataattaaggaccacattgttactttggagcctgtgactggtgaagctgagaaggattattgggacacaatccgcagtattcaaggaaagtacaaggatagtagaagctacaagggaagggcttcaaataaccagagaggaggaaagcgtttcaacgcgaagcgagatagaaacccagactcggagaagaattctaacaaggctcggaaggttgaagctatcgcatgaggttaatttaggtaccttagctcgactaaagaagtaacatgttatgccagcatgatcgacttcagtactctccaagtttctagaatcgacttgttttttagctatcgttttcattttggtcgttttgccaccttattcgatgttcgtcccttagctataatccttttgtaatggctttactgtgatgcgagggctcacccgatggcgtgtaatttgagcacaccaagcttaggcttcccttgcgaaagggtggaagcctttctattctttcactagcaaatatgcagttagggcttattcggttatttccatttctaacatagcctaaagcttaagggccgtttgg

SEQ ID NO: 912 - DNA, 486 bp, Zea mays
  Clone ID: 700096266_FLI
gcaagtgtattcatgcgactggggagttctgcactggatacaacgcagtgatggagagttggggcatgctgttgaactggggccaagacggaggagggcagggcattgccttgcagataagggacgtccgtgtgcgtgtgctcggtgaggtggcatgggtgaacatgaaggcgaacgtgctgttccatgtgaccaacgtctacgagctgtgtaacggcaggtggtatatggtccatcaccacagctcgctcatggctgaccctcctccgcacaatatgtttgcttgatgtgctgctattcttgagcggagattagattatcggacgaagatttcctcccccccccccccccccccaacaacccttttattcgttgtggatctgctgtttgttggtattgctctggatctccgttccgcagttttgtacagatgtgttttaggtggtaaggcttattataaattggtgaatggaaggttatggcgcc

SEQ ID NO: 913 - DNA, 1943 bp, Zea mays
  Clone ID: 700096308_FLI
gataaaccagcaatcgcatattcgcttgcctttcttgccctacgccgccagcttcccacggagccaccaccctccacttctcaccactgccgtctccttcccaaacccggctgccgtctcctttgattccacggcctgccacgcagcagcagcaaaactcctagtcaacccttcaactcgcctactactcctactagccccttcttttcttcgatctccgcaatctacagctttgcttctcccggctcgagcggctagggtttcgggagtgcgcggtgagacggcatgacaacgcggggagctaagcgcgcggccacctccgaccccgccgcacccgatttaccaagtaagagagtaatggacggaccctcttttgatgttcacagggcggagtcttcccatcagcatgtgatggcaggacccgctagtttagatcctcggcgggcggaggctgctagcaaacatgtgagggcacttaatacccagtttgcaagctgggttcaattgcagctgcaaaatcatccagctgaactttgggaggacggccttaaggattacatatcacatgcttctgaaatcatggaaaaattcaaggatgttgtcaactggctaaggcaaaatcaagcaggttcaatagttgtttcatccccaagctcactgaaggatgataagttgaatctgccagcagcagatgatagcaaactcttagtacagccaagttcagataacaaacagaaggctccagttatggcttctagttcttcatcttttcagaactcaagcttaccgaaccttttttcatcaccttctcagcaaaaaacaccagattacagtggtatgtttgctgacaagaacacgtccagtgatagcagtaaaccagctttccagtttggtggaaataatgtcatatttggtggcaagaaggatgcacctgttgacagcagtaaacctttccagtttggtccgaataatggcatatttggtgacaagaaggatactcccagtgacagcagcaaacctttccattttggtgcaaacaagggcatgtttggcgacaagaagacgacaagtggtgacagcagtaatccttttcagtttggtgcaaataatggttttccaacatccaatgcaccatctattttttcttcagttggccaaagttttaacccacagagtccacctctgttttcaatgaatcaacaatcagtcctcccaggaaaccaaaatacttctgaagcttcagctgacgcagatgaagatgctgaacctgagaagccaagcagcccttctgtaaagaaggcagaagagaagggggtagttgttgttcatgaaaccaaatgcaaggtgtatgtcaagcatgatgatgccactaagggttggaaagacattggtgttggtcagctctctatcagaagtaaagaaggcacagagaaagcttccaaagaatccactccgaccattgttataagaaacgatgttggtaaaatcctcctgaatgctctgatctacaaggggataaaaatgaatcttcagaagaatacggttgcttcgatatttcatacttcagatgcacaatcaagtgaatcagctggtgacacagttgtagctcgaacatacctgttccgattgaaaaatgtagaggaggctacaaaactatcgacagcaatcaaggagaatgcgccctcagactagttcttacggcatggattatcatctcgaatctctgcttttggcacgagctgtaagatctgaaggggacaccaccgatggccactgcggcaggctaaaagatgccttgcagagtttctttctttctttttttgttctcctagctgcatcaagatatcttgcttgtaacttgtaaggttgactggctggttatgtattagtactttcatgtaccatcttttgcattgacaagattattgagcatgcttacagcc

SEQ ID NO: 914 - DNA, 2442 bp, Zea mays
  Clone ID: 700096359_FLI
gaagctcgcagcagccgcctaatccagcggcagttgaggatggcggcggcgccgccgccgccgccggacgggcaggagaaggtgatcgcggcggcgcagcacatcgtcaagtcgctcgcgaactccaagaacgccgccgacgacatgatccgcatcctctctcgcttcgacaaccgcttctcgctcatgtccgacctcttccctcctccccctaccgccgtcgattccatactggaggcggacgaggggacctctcagggggaaggggacgagcccgatctcgaccccgaaggcgacgcggcggcccgcgccgaggcggagtgggacgcggcggccgaggtggttgagcgctgggagtcccccaccgccgacgcgctggtgttcgactcgcgggagggcgaggagtacctcgccgcggccgcctgcctcacgggcgcgccgggcccgcgcgccgaggccgcgctgcagaccgccatggcgcggctcgaggacgagttccgccacctgctcatccgcggcgcgccgccacttgccgcggaggacctccaggtctcgctcctccgccgactctcgctcacggtaccctccttcaactcctccgccgtagacctagactgcccctcctttgcccaacaccacgccgccgtcgccgccgagggggtaaacgagcagcagggcggcaggagttccgcctccgacgacgagatctcgccctacctcatcgccccggacaccgtcagcgtcctcagggacatcgccgacgtcatgctgcgcgccggctacgcgcccgagctgtgccaggtatacggggaggtgcgccgggacacgctcatggaatgccttgccgtgctcggggtcgacaagatgagcctcgaggaggtgcagcgggtggagtggggcgtgcttgacggcaagatgaggaagtggatccaggcgctcaaggtcgtcgtccggggcctccttgctgaggagcgccgtatctgcaggcagatcctttcgccggacatgaacactgaggaggagtgcttcactcaggcggccaagggttgtgtcctgcagatgctgaactttggtgacgccattgcgattgggaagaggtccaccgagaagctgttccgcatccttggtatgtatgaggcgctcgctgaggtgctgccagagcttgagggtttgttctcgggtgatgcaaagaatttcatcaaggaggaggccgagggaatactcttgcggcttggggatgcagtgtgtggcacgatcgaagagtttgctaatgacatacagggagatacttctcggagagcactgcctggtggggagatccatccccttacccgctatgtcatgaactatgtgtggctgcttgcagactacaatgcctcgctaaataagcttctggaatgttgggatactgagctgaccggggttgataatccaaacatgactccattggggcactgcgtgctcatgctgatcacacacctacagtgcaagatcaatgagaaatcgaggctgtatgaggatgaagcgttgcagaacatatttttgatgaataatctgctgtatattgtgcagaaggtgaaagattcagagctcaagacattgcttggtgataactggattcgcaagcgtcgtggtcagattaggcaatactctacagggtatcttcgatcatcatggactagggtgttagcttgcctgagagatgatgggcttccgcacacgatgggttcatcaagcacactcaaagccgcattgaaggatagattcaaaaactttaacttggccttcgaggagttgcacaggacacagacatcatggagggttgtggatcctcagttaagagaagagctgaagatctcaatctccgagaaggttcttccagcataccgttcatttgttggaagatttcggggacaactagagggagggaggggttctgcaagatatataaagtacaaccctgatgatttggagaaccatgtctcagaattttttgaagggagaaagtcaaatgcttgatggtcaaggcatgttcatatcaactatgcagcctgaagacccgtgcaaattttgatgatgctagttccaagtccccttccaaatttcttggcactatacagggaacttgaccttcaaacatcttttgaaggtctgaagatggaaatataatcttctcctgaactgacagaaactttgtgaattgcaaagcaacccgaattgaatggtttagcttgtcattcttgatcctgtcacagcgagtggtgacgtcattgaggcttgcccatggaattatgacaactgcatctgccatgagctgtgtaattgcaattcttacattttacctgtcttttgtcaatggtaacatctcgtgactcttgtttgactaaaatggaatttcggtccctggaatttttatgtacaatcctaccaggagttatgttc

SEQ ID NO: 915 - DNA, 506 bp, Zea mays
  Clone ID: 700096384_FLI
gaggaaaggctcgccttggatcgattgttcacaagaagaatgcatcagtcttgtgtcttaccactgtcaagaacgaggataagcttgagttcagcaagattttggaggctattaaggcaaacttcaacgacaagttcgatgaggtcaggaagaagtggggaggtggcatcatgggatccaagtcgcaggccaagaccaaggcccgggaaaagctgctcgccaaggaggctgcgcagcggatgacctagattgtctactgctgtgtctgccctgtagtttaacggggaagaactgatgaactcgtattgtggttttccgaatctagtttcatatgtttctgtccaccagaccatgtttagaagctttgcaagacagagtttacagtgtttatgtgatgcctcagatccatgcagctttgcttctaattgcctaagagcaacctcaaaagtatttcatgaaaaaatgcccttctacagctttttaaatttagaattttaaatgttgcc

SEQ ID NO: 916 - DNA, 714 bp, Zea mays
  Clone ID: 700096393_FLI
aagctcttggagatgctcttaacatacagtgggaagacggaagggtgtacaggtccaagtccaacacacgacacacacaaacacacgcgctgatggctgacgagtgacgacccacatgcatgcacataccgacatacgtacgcccaatccttcatcacaagagcggacaggcacacggcatgtacgtacagtacagagtacagacacgcctttttacacgcgcacgcacgcatgcatccatggccatgcacagcgttgttcaagactcacgggacgccggcgccacctgctcctcctcctcctcctcctccgccaccgaggccgccgccgcctccgaacccgccgaacgggcccgcgccggcgacggccccgccgaacgggccgaacccagcgacgccgccgcccagcgggccgtggacgccgccgaagaggccgccgccgccggtccgcccaccgaacacgtcggcggtcttggcctgctcgtcgtcctcgtccacggcgccggcactgccgtcgcccgccgcgaaggcggcagtagtgtcgcagtcgcggggcgttgctcttgccgccgccgatgcgacggcgaggcagagcagcagggaggcgacgagccaccacttggctgccattggcctctctctctctctcgcttattaccaggaggaccagctcttgttcttcgaggtgtgcctgtctggcctggtgctgctggac

SEQ ID NO: 917 - DNA, 434 bp, Zea mays
  Clone ID: 700096410_FLI
caagcttgctgcctccctttgccagagctatcgttaaaacaggaagtactgtcagtttccgagctacaatcaagctataagtttagaaaaataatttagaaatgtacaacaaagtctagtaatacattgctaaagataaatcaatactctacaaacaagctataagtttagaaaaataatttagaaatgtacaacaaagtcttttaatacattgctaaagataaatcaatactcaataagttccttatgctttggattttgggataacatacctgttttatttacatgctatttggaccaacaaaaaataccttaggaacagccatttgagaaaaaaaacaaagccttttagtcctaagcaaaaaaaacttttagtcctaagcaagttagcatagcctagagttgcaacttctacatgagcacaataaacagac

SEQ ID NO: 918 - DNA, 2748 bp, Zea mays
  Clone ID: 700096446_FLI
cgggttgcaatcttagagagctctgaagccgcgaagcagatcatgaaggagcttacagaaggctcctctagtggtaatgtctcaagagacttcaccaatagcatggatgggcagattatgcttgatgattctgaggatgatgatgatggggatgagaaggaatttgattctgctgccttggcggcccttctgaaagcggcaaccggtggatcctcagatgggaatgtcacagttgcttcacaagatggttctagaatattcaccatggatcgacctgctggtcttggttcatcagccccttctctcaggccgactgcacctcgccaacctgccaggtcaaacctattcagcccctcagagctagcagttactgctgaccctacagaagagatgacagaggaagagaagaagctacacgacaaggttgagttgattagagtaaagtttctgcgtctggtttacaggctgggagctactcctgaagaaacggttgcagcacaagtgctgtatcgtctgagccttgctgagggtatccgacatggtaggcagacaaatcgagcattcagccttgataatgcacggagaaaggccttacttcttgaagcagagggaaaggaggatctgaacttctcatgcaacatacttgttctaggaaagactggagttggcaaaagtgcaactatcaattctgtatttggtgaagagaagtccaaaactgatgcttttagctcagcaaccactaatgtgcgggaaatcattggggatgttgatggtgtcaagattagaatcattgatacacctggccttcgtcccaacgttatggaccaaggatcaaacagaaagattcttgctgctgtcaagaaatataccaagaaatgtccgccagatattgttctatatgtggatcgtctggatagtctgagccgtgatctcaatgatttgcctcttctgaagacaattacctctgttcttggctcatccatatggttcaatgccattgttgccctcacacatgctgcgtctgctcctcctgaaggcctcaatggtgctcccatgacatatgaggtcttgatggctcagagatcccacatcatccagcagtccatcaggcaggctgctggagatatgcgcttgatgaacccagtagcccttgttgagaaccatccttcgtgcaggaaaaaccgtgagggccagaaagtgcttccgaatggccaaagctggaggcatcagatgctgcttttgtgctactcctcaaagatattatcagaagccaactcacttctgaagcttcaggatcctaatcctggaaagctttttggcttccgtttccgctcaccacctcttcctttcttgttgtcctcactcttgcagtctagagcccacccgaaactttctgctgagcagggtggcaatgagggcgattctgatattgaattggatgactactctgatgtagaacaagatgatgaagaagaagaatatgatcagcttccacccttcaagcccttgaccaaagctcagcttgcaaggctcacaaaggagcagaagaatgcttattttgatgagtatgactacagggttaagcttctccagaagaaacaatggaaggatgagatccgcaggttaaaggagatgaagaagagggggaaaactgatctggatgattatgggtatgctaatatcactggtgaggacgatcaggatcctcctccagagaatgtgtcagttcccttacctgacatggtactgcctccttcatttgattgtgacaatcccacataccggtaccgctttctagagccaacttcgactgtcctagcaagacctgttttagatgcgcatggatgggatcatgactgtggttatgatggagtgagcgttgaagagacactagctatccttagcaggttccagcaaatgtagcagttcaggtcaccaaggacaagaaggaatttagcatccatttggactcttccatcgcagcaaagcatggagagaacacatcatctcttgctggttttgatatccagactgttgggcggcagcttgcatatattctccgtggggagacaaaaatcaagaatatcaagaagaacaaaaccacaggagggttctcagtaactttcctgggcgacattgtggcaactggactgaagattgaggaccagctctcccttgggaagaggttgtcactagttgctagcactggcgcgatgcgagcccaaggggacactgcatatggagctaacctggaggcacgcttgaaggacaaagactatccgatagcccagtccctctcaaccttgggtctctctctgatgaagtggcgtcgggaccttgctctgggcgcaaacttgcagtcccagttttccatcggaagggggtcgaagatggcagttcgacttggtctgaacaacaagctgagtgggcagatcaccgtcaggacaagcacctcagagcaggtccagattgcacttctgggtctcgtaccggttgcagcctccatttaccggagtttccggcccagtgaaccatcctttgcttattagcttgtcaggagtctcagtttaattatttcatgatcacatcgtttctcttagcaattttgcttttcatatcaaccatgtttcctgctgtttcagttcactcctttgtaattggcagatcgtttcctatcataattttgggtgaagagggttgcgagatttatctggaactatagctgaataaataatgtggagggatgtt

SEQ ID NO: 919 - DNA, 2248 bp, Zea mays
  Clone ID: 700096523_FLI
agagttaacaagttgggtaatatattcagatgaagagaagaagtttaacattgatatcatttttggccttattcgttcggagttgctgaatattggggagtacaatgttcatttggcaaagttaattgatgggggaagaaataaggttgcaacggagtttgcaatgtcccttgtccaagcattgtttgctcatgatcctgttggcttcacagagtttcagaatgttcttgatgcactatcgaagcatacaaagagaccaggttcacctgaatcgttgcaacaattgattgaaatcgcaaggaataatgtgagcaccactactggttttgttgctgtgaaggatgaaaaggtcaaactgccgaaggataaaaaggttttagctacccgggcaaacaaggaggaaaacactgctaatgaaattatactagttgatccaaatcaggtggcagtcctattttctgaatggtgtcagatgtgtaatcatgtaagtgctagtgatgcggcatacactcgttttgtcacacagttgcagcaagatggtctgctgaagggggatgatatctctgaacgcttcttccgtattctcacggaacttgctgttacacactctctagtctccgagcaaatcgttgctcctggtggatcatctcagcaatcaccacagcaacctcacatttcatatttctccattgattcatatgcaaagcttgtggttatggttctcaagtactcagtggagataacaccaaataaagccagtatactttccaagatcctatctgttacagtgaggtccattcagaaagatgctgaggaaaagaaagcttcatttaatcctcgaccatacttccgattgtttataaattggctctatgatcttactactaccgatggtcaccatgatagttctaattttcaggttttgactgcatttgcaaatgcattccacatgctacaacccttgagagttcctgcctggagctttgcttggcttgagctggtgagtcacaggagcttcatgccaaaactgctgatgtgcaattcacagaaaggttggccattttttcagcgactgcttgttgctcttctcaagttcatggaaccatatctgagaaatgctgaactcccagaggcgatggaccttttatacaagggaactatgcgagttctgcttgtactactgcatgactttcctgaatttctttgtgattatcacttcagtttctgcgatgtgattccttcaagttgcattcaaatgcgcaatgtcattcttagtgcttttccacgtaacatgagactgccagacccttctacccctaatctaaagattgatttgttggctgaaatttcaatagcaccacgaatcatgtcggatgttgatggtgcccttaaatcaaagcagttgaagactgaggttgatgaatatctcaagaggccggaaggctcttcctttttaagtgacctgaaccaaaaattgctgctgcctcagaatgaagcaagtgttgctgggacacgctacaacgtgcctctgatcaattcacttgttttttatgttggcatccaagctgtgcaacaactgcaactgaacaaggctaatccgtctgcatcagtacagcagattaaccatatatctccgatggacattttccagattggaacagctaccgatatattcaggagtcttataacaagtttggatacagagggccgctaccttctgttgaatgcaatcgctaaccaactgcgctatccaaatagccatacacactactactccttcatcactctgtatctattttccgaggctacccaggaaattacccaggagcaaatcacaagggttcttctggagcgtctcatagtgaaccgcccccatccttgggggttacttattactttcattgaattgataaagaatccgcgttacaacttttggagccggtcttttacacactgtgcacctgagatcgagaaactgttcgagtcggtggcaaggtcatgtggcgcaaaagttgtggacgaaggaatcagcgtgcaggatggcagccactaaagccatctgctttgttcaagtgttgtttttgtgctatttcttctctggcactggaaattttctgtgcttgtacagatcgtctgtatagtaaagctgttagtcacacgtgtcggtgcactgccaaaccttagcaggtgcctgggagaatgcttttgtttgtatgaattttagtcagcaatatggatggtttgcaat

SEQ ID NO: 920 - DNA, 1664 bp, Zea mays
  Clone ID: 700096534_FLI
tgcctcttctccctcttgccggtcccgaataaagagcagcagcgcaagaggtcggtagagcgagaagaaggcaatggcggccgagagcttccttttcacctcggagtccgtgaacgaggggcaccccgacaagctgtgcgaccaggtgtcggacgccgtgcttgacgcatgcctcgcgcaggaccccgacagcaaggtggcctgcgagacctgcaccaagaccaacatggtgatggtgttcggcgagatcacgaccaaggcgaccgtggactacgagaagatcgtgcgcgacacctgccgcgagatcgggttcacctccgacgacgtgggcctcgacgccgaccgctgcaaggtgctggtgaacatcgagcagcagtcccccgacatcgcgcagggcgtgcacgggcacttcacgaagcggcccgaggagatcggcgcgggcgaccagggccacatgttcgggtacgccaccgacgagacccccgagctgatgccgctgagccacgtgctggccaccaagctgggcgcgcgcctcaccgaggtgcgcaagaacggcacctgcgcctggctgaggcccgacggcaagacccaggtgacggtggagtacgtgaacgagggcggcgccatggtgcccgtccgcgtgcacaccgtgctcatctccacccagcacgacgagaccgtcaccaacgacgagatcgccgccgacctcaaggagcacgtcatcaagcccgtgatccctgagaagtacctcgacgagaagaccatcttccacctcaacccgtccgggcgcttcgtcatcggcgggccccacggtgacgccggcctcaccggccgcaagatcatcatcgacacgtacggcggctggggagcccacggcggtggcgccttctccggcaaggaccccaccaaggtggaccgcagcggcgcctacgtggccaggcaggccgccaagagcatcgtggccagcggcctcgcccgccgctgcctcgtgcaggtgtcgtacgccatcggcgtgccggagcccctgtccgtgttcgtcaactcgtacggcaccggcacgatccccgacaaggagatcctcaagatcgtgaaggagaacttcgacttcaggcccgggatgatcagcatcaacctcgacctgaagaagggcggcaacaggttcatcaagaccgccgcctacggccacttcggccgtgacgacgccgacttcacctgggaggtggtgaagcccctcaagttcgacaaggcatcggcttaaggttgggagtgtcactgtggacatgaggactaccttcctctggctctgctgttacctgcaagcattgctgctgctggatgtgtgtgtttgatcagtgactggctgctgctccatagaagatgaacggagagaaggatgatgaagggctttggcaatcgccgctgcaactgcaacccatgccatgccggcttagtgattgggtataatttggcttggcagcagccagcattattatgtgctgatctgttatcttttactagtttggtcgtccgatatctttctttctttttccccccttttcgactctgtactgaaactgctgagagattcgcagtattgttgtatcgtattcatatgctactgttactctggtgcccctctctctctctctgctgagagttttctc

SEQ ID NO: 921 - DNA, 651 bp, Zea mays
  Clone ID: 700096541_FLI
aagcaacatgaatccgccgcacccagagccgggccttccccgccgccaccaccacatggtccacctccacctcgacccgcgccaccaccaccacgtccacatccacctccgctgctgccatcatcaccaccacggcacccacctgctcgctcctgcgccgccggcccgcctcaacgacaaccagcagcggcacccggctcccgtactcttccccaacacctacccgaacccaagcgcggcgcctgggcagccagagccgccccgcgccgccgtaagggaggacgtggaggatttggatcccgagccggggctgctgcacgcggaggaggaggaggaggaagacgaggagccggtgttcgtacttacggacgagtgggcggagttcttcgccaaatccgaggccaagagaagactggctaaacagcagaagaagaagagccggaagtgatctgatgtgtctgggccatcatcagacagtctggccagagtctggagctcgggaagagaacggacgaatagcttgtcaacatatacgcatcgctttgccaggagttcattatgttttttttttactttatacagagagttacgagttcacatgatctaaacactgtaaccttttgagttcacatcatctgaaatctgtgctgt

SEQ ID NO: 922 - DNA, 904 bp, Zea mays
  Clone ID: 700096581_FLI
tgcctgccgtttccatctccatccagttctccgcacccacccacccacccactcctttccccaacccatggccgccgccgccgccggcacccgggaggagatggtctacatggccaagctagcggagcaggcggagcggtacgaggagatggtggagttcatggagaaggtcgcggccgccgccgagctcaccgtcgaggagcgcaacctgctctccgtcgcctacaagaacgtcatcggcgcgcgccgcgcctcctggcgcatcgtctcctccatcgagcacaaggaggagacgcggggcgcggcggccgtggacgccagggtcttctacctcaagatgaagggggactaccaccgctacctcgccgagttcaagaccggcgccgagcgcaaggacgccgcggactccacgctcgccgcctaccaggccgcgcaggacatcgccgtcaaggagctgccgcccacgcatcccatcaggctcggcctcgccctcaacttctccgtcttctactacgagatcctcagctcgccggaccgcgcctgctcgctggccaagcaggccttcgacgaagctatttcagagctggatagtcttggggaagagtcgtacaaggatagcaccctcatcatgcagcttcttcgtgacaacctcaccttgtggacttctgacatgcaggaggatggtggcgatgaaatgcgggatgcaaataagcctgacgaggagcagtagtagtcgtcatgccatgccatgccatgccatgcttgtacaaggaccattttcgtgtgtcctttccttcaatcgtcgacctttcgttttgttgttatactgctattgtggaaccctgttactgttactgttagtgtatcctattggcaataatcaaatgtggtatggttgactact

SEQ ID NO: 923 - DNA, 1630 bp, Zea mays
  Clone ID: 700096588_FLI
caaggccatgccaccgtcgagcccaggaggcggaagtcaacgtaaccaagcgaacccatccatggcctccgctgctgccgtcgtctccctcaacgtcggcggcgagatcttccagatcaccaccgccacactttcccgcgccggcgcctcctccccgcttgcctccctcggtccctcctccccgtctgctccgcacttcctcgacggcgacccgcgcctctttgcccaactcctatccttcctccgccatggccgcctccttgctccgtcctatccctcagccacgctcctcgctgaggcgcgccacttcgcgctcgatggcgccctcctcgcttctctctccccggcctccgcctttgccccgctctcgctgcgcccttccgcgctcctcccgctcaccggccgcgtcgcgccctccgccgtagcgctgtgcccctcgccgcctcacccggtctccctcgtcgccgcacacggtggggtcgtcacctgcttcgacgccgcgctcgcctcccgcaccagcgtcctcacgccgctgcccgccgttgactcgctcgccgcggtgtcccccgtcctcgccctcgccggcgcccgcgacttccacggggtccacctctgccggttctccgacgacgcctccgccggctgtactgatccgaatgtgctttcgtggccgggatcgccctccgccaccgtgctgtccatggccactacgaccgcgtcagaagcaccgtcgccaccctggctcttctccagcttcgagtcagcgcggcggaactcgagtgccgtggtggtgttcgacctcaattccttgtctcctgtggtggaaatcgggcggaaggaggtgttcggcgcggacatcgaggctgcgatcccagcgagcaagctcgcgtggcttggtgggcacagcctccttctcgccgctggctctcactctggcccggccggggtagtgggggacatacgtctctgggatgtccgggcgagcgccacggtgccagtgtgggaggtcagggagaaggaggattgctttgctgatgttgcggcgtctgacgcactgtcagcggtgttcaaggtgggtgcagcatccagtgaggtgttcatggctgacctgaggaggcttggtaacggtggtggcgttggattggagccatgggtgtgcattggcgatggacagaaggcggctgcagccgcatcatctggaaggaaagagaggaatggttgtagaattgagtgctactgcagttgggtgtttgtggcacggggcgcggacgtcgaggtgtggagtcaggtgggattggcaccagaagccggtggaaagaaggtgatgaggaggaattgggttggcagtgaactatccacaaagcccaagattgtgagctgggcatttggtggcagcaggatggcattggccagagctgatcagctgtctgtggagatatgggatagtgctacagcagcaattggcgcaaacccctgagtagagggaggatatcgcaaaagcaagccgacgcttgtcaatgttcaattgctgcttgttcctctatgcaatgtaaatttactttagcgtgttgtttgtgttgtatcccagatagttagaatcttgaatgcaatgcctggaaggtatggaatg

SEQ ID NO: 924 - DNA, 1311 bp, Zea mays
  Clone ID: 700096638_FLI
tcgcagtcgcagcaggcaacaaaccaaatcgcttaccgcccccgaagcgtctcggttcgcatagcagagctgctcttgcaacaagccaaacaacccagtggctgctagccgagacaggggatagattgagagagaggcgcgcagatggcgacgccgtcgtcgtcgctttgctccagcttcgcctccctgcggaccgcctccatcggccacccccgtggcatcgcctcctccacgcccaggaaggcattccatgtgagggcatcagctcgggttgacaaattctcaaagagtgacatcatcgtgtccccttcgattctgtctgcaaactttgcgaagcttggtgatcaggtaaaagctgtggaggtggcaggatgcgactggattcatgtcgatgtcatggacgggcgctttgtgccaaacatcacaattggacccttggttgttgatgctctgcgtccagtgactgatcttccgttggatgtacatctgatgattgtggaacctgagcagcgagtccccgattttatcaaggcaggtgctgatattgttagtgtccactgtgaacagacatcgaccatccatttgcaccgaacagtcaatcagattaaaagtctaggagcaaaggcaggagttgttttgaatccagcgactccactcactgcaattgattatgttcttgatgttgttgacctggtgctgattatgtctgtgaatcctgggtttggtggccagagctttatcgagagtcaagtaaagaaaattgcagaactgagaaggttatgtgcagagaagggagtgaacccctggattgaggttgatggtggtgttggtccgaaaaatgcctacaaggttattgaagctggcgcaaatgccattgtcgcaggttctgcagtttttggggctccagactacgctgaagctatcaaaggaataaagaccagccaaagacctctagctgtagccgcataaggagctggacgtgtaatcatttactctgtgcaagtttaccagtgatgcaatctgtatagatgtgtgtcttgtccagccatacgtataccggagatgaaaggagacggaggcagtgaagaaatatccttttttttcttctcatttttcacgaggatgcggtgcactgctcccagaatgctgtgtccaatttacaaacgcacaggtggcacatgaactagcagagtagctttatcttgaaaggaaactgtatttggggtcgatgaaccctctggtgttattcttcagactggtaaacgatgtaacatgtttgataatcaataaagtgcgtcgtatggctttcct

SEQ ID NO: 925 - DNA, 687 bp, Zea mays
  Clone ID: 700096643_FLI
tctcctcgcatttccttgcaaccgattgccttcccccctcccaacccaagaccgatggcgcccaaggccgagaagaagcccgcggcgaagaagccggcggaggaggagcccgcggcggagaagacgaccgccgggaagaagcccaaggcggagaagcggatccccgctggcaagtccgccggcaaggagggcggcgagggcaagcgtggcaagaagaagggcaagaagagcgtggagacgtacaagatctacatcttcaaggtgctgaagcaggtgcacccggacatcggcatctcctccaaggccatgtccatcatgaactccttcatcaacgacatcttcgagaagctggccggcgaggccgccaagctcgcgcgctacaacaagaagcccaccatcacctcccgcgagatccagacctccgtgcgcctcgtgctccccggcgagctcgccaagcacgccgtctctgagggcaccaaggccgtcaccaagttcacctcctcctaggcttgcacgctcgccctttgtaggcttctcttgtgttgatgttcgccttgtgttgtagttagatgttgctggtttctctgtcggcgctgctctgcttctgtaggaactgcgtcatgtaacctagcaaggacttgtttatttgtgaatcatcaacactttgttgttgatcacttatgttcc

SEQ ID NO: 926 - DNA, 2847 bp, Zea mays
  Clone ID: 700096646_FLI
attagtagtagtgccgctgcccgctggtgctgggagctcatcatcattcgtcggtagcaggaaggaggcggcgtggaaggggaggcagatgcgggaggcccaccgcagggtcgtcgcaccagatggacacgccggataggccccgcgccgccgccgccgccgggttcgaggattctcctgtcttcaatttcatcaacaatctctcgcctataccaccacctaaacctttagactcagcacataatgtgcagctattcaagtcatcagacttggcacctgtttcttcgatctttgcctcaccacatgttaatccagtgaaggaaactaaagttttgatcagggatgaatctgttcaccttcctcaagaattgcactcgcctagcagtgtcaggactcgaatagacacctcaggctcttttagaatgatcagatgcaaagacattgtgtcggacaattgcaatatcacttgtcaactaaacgaggcatctattgattcttctgatcatacatcaaactctacaggccaattgactcaatccatacaggatgctgctggcagtatggaaagcgataaggatcaatgcgatgccaataaaacagaccttaccatatcccaggagtgcacaggcctagaaggtatgaaccttgatgagagtggcccagacaaaatggattcgtcacattctgggattgttgttcatgaaaaccagctatctgaacaaaacaatgacgaacctgcagcatataatgagggttacattattacacaccaatcaactagtgatatgctcactttagccataccatctggaacagaaacacaaccagtgaatgatacacaaatggctgataacccctactcttgtgaatccttgttggatgatcagtcaagtggatattgcacccagaattctgtgcatgaaccccatttgtactggactggggcagttgaagggtctgcagtatcctatactccccaaacactccctggtgctttgcaaagtcagctgatgccatgtaacaagctcagtgaaccaaaagattacgtgcctactgagcaaaatgccttgtcacagcacttacgtggcatgcgtaggcgcagccttttcaatgaaaaggctggaattagtaataaaggtgtagacaaaacttcggatcatcatcctgtaaattcaactacccccaaatgcaaaactatttctggtgacaactcaaagcctctaagaacccctccatgcgcattacctggtattggcttgcacttgaatgcccttgctacaatacctaaagagaaaatagtccctcgagagattcagtctactataaatgaatcaagtaacttgataggccctgctggatcttctccagcaccttttgagcaaaacattataaatgatgatttcactcaaacaactgatgttgcaactgccgaagcttctagtcagggtagtcccaagaagaaaaggcataagtttgacaatggtgatggcacttcatgcaagcgttgtagttgtaagaagtcaaaatgcctgaaactttactgtgagtgttttgctgctggagtctattgttctgagccttgttcgtgtatcggctgtcagaacaaccagagtcatatggaaacagttctgtctacacggcaacagattgaatctcgcaatccattagcatttgctcctaaagtcattcatacatctgagcctggtatggacttaggggacttttccaataaaactcctgcttcagctcgtcacaaaaggggatgcaattgcaagaagtcgtcgtgtctaaaaaaatactgtgaatgttttcagggcggcgtgggatgctccgtaagttgcagatgcgagggctgtaagaatgcttttggaaaacgggagggggcttctgtgttaggcataggggaacctaaacagggattggaagaaaaggatgtttgtgtgaaagaagaaaaaagtgaaatcgataaacagcttgttgtctaccagactactgacgctgctcctgctgaaaatgtactgaccacaccttccatggtggagtgcagacccttggcttgtcttccacccgcaagctccaagaaaagctccaaaaaaccacggtcttcaacaaagctcacaggacatccttctcggccgtgcaacttacaagctcctccaaagaccgacgttgtgctctccccattcgaaaactacgcggaaatggtcctcggtgatagcacatcagatatcctgaagggaaattcatctcctcatacttctgttaaagttgtgtcaccgaataagaagcgaatctctcccccacggatgggtatcgggctatctccaatctgtaggagtggcaggaagctgattctcaagtccatcccttctttcccttcccttggtggtgatgtaaacaacgaggatccgaaggccaagctcccagcgccttgaatttatcatgttttgtgtcactcgtggcccttcccgttggttctcgaaatcgcccacgcgctgactgcaccagactgtttctaccaccataccatcagatagtggatggacaaccaagcgtgcaccgtttcatcatttgtgtaattgtgtttgcttcgattaataattattcacgtactgctataataacccactgtgatggcagaattctacctacctcccagaaccaccagtggcatttggtttgctggtaagttatgtctcggctcaaggacgttgctgtgttgcctgtgcctgtatgtctgtataatttatgttcattatccgggatcaagatgtggaacctctatgtacctgatggcagaactgttaagacatattttattttatttttatctgaggttaaactgtg

SEQ ID NO: 927 - DNA, 2905 bp, Zea mays
  Clone ID: 700096660_FLI
cacacacagacacacgcaaaaacatttctcccccctcccgactgctactgccgctgcctcctccccctttccgcccgccttcgctccctcccaacccccttcctcctccgtctagggtttcccgccgccgcctgatccgagtcagatgccgcccgcaacagccatggcgccgccgtcccagcccccgtctaactcaggggatccgctgtacccggagctctggcgcgcctgcgccggcccgctcgtcaccgtcccccgcgtcggcgacctcgtcttctacttcccccaggggcacatcgagcaggtggaggcgtccatgaaccaggtcgccgggaaccagatgcgcctctacgatctgccccccaagctgctctgccgcgtgctcaacgtcgagctcaaggcggagacggacaccgacgaggtctacgcgcagatcatgctcatgccggagcccgagcaaaccgatgtgccggctgagaagccgagttctgcacctgctgcgtcgccgaggccagcagtcaggtccttctgcaagacgctcaccgcctcggacaccagcacacacggtggcttctctgtgctgcgccgacacgctgacgagtgcctccctcccctggatatgacccagtcgcctcccacacaggagctggtggcgaaggatctgcatggcatggagtggcgcttccgccacatctttagagggcagccaaggaggcatctccttcagagtggttggagtgtttttgttagttctaaaaggcttgttgctggtgatgccttcattttcctcagaggagaaaatggtgaacttcgagttggtgttaggcgggcaatgaggcaattgtctaatgtaccttcttcagtcatatctagccaaagcatgcacctcggagtccttgcgactgcatggcacgccattaacacgaagtccatgttcactgtctactacaagcctaggacgagcccttcagagttcatcataccgtacgatcaatatatggagtcggtaaaaaataattattctattggcatgagattcaggatgaggtttgaaggagaagaggcgccagagcagaggtttactggtacaatagttggttgtgaaaatcttgacccactatggcctgattccagttggagatacttgaaggtgcgttgggatgagccttctactatcccgcggccagatagggtctctccttggaagatagagcctgcttcatcgcctcctgttaatccactcgtgcattcttctagagcaaaaagacctagacaaaacgttcctccaccttcacttgaatcatctgttctcacaaaagaaggtgcaaccaaggtcgaaatcgattcagctcaaacacaacaccaaaattcggtcttgcaaggtcaggagcagatgaccttgaggaacaacctgactgaaagcgctgattctgattccactgttcagaagccgatgatgtggtccccatcactcaatgggaaagcccacactcattttcagcagagacctgctatggataattggatgccattgggaaggcgtgaaaatgacttcaaggacacccgttctgccttcaaggatgcccgcaccgcctctcaatcatttggagatacacagggtttttttgtgcaagcttatgatgacaatcatcaccgtctctctttcaaaaatcagggttcaactcatcgcttcgcagatccgtacttctatatgcctcaacaatcgtcagtgacggttgaatcaagcacaaggacacaaacagcaaacaatgacttgtgtttctggggtgaccagaatgctatgtacggcaatccaagtgaccaacaacagggtttcaactttggacaaaacccatcaagttggttgaaccagccatttccccaggttgaacagccacgagtggtcaggcctcatgcaacggttgctccatttgatctggagaagactagagaaggaagtggcttcaagatttttgggttccaagttgatacaaccagtccatctcctgtccaattgagctctccattgcccgctatccaggagcatgtgttacaaactcgaccatcggcaccggtgaatgaattgcaacctgtgcaaattgagtgcttgcctgagggatctgtaagcacagctggaactgcaacggagaacattcagcaagccccgcagagttcaaaagatatccaaagcaagtcccagggtgcttcaacaaggagctgtacaaaggttcataagcaaggagtcgcacttggcaggtcggtggacctctctaaattcaccgactacggcgaactccaagcagagctggacaagatgtttgacttcgagggtgaattggtatctggcagccaaaactggcagatcgtctataccgacgacgagggcgatatgatgcttgtgggagacgacccgtgggaagagttctgcagcatagtgcgcaagatctacatctacacgaaggaggaggtccagaagatgaactcgaaatcagctgcgccaaggaaggaggaatctccggcagcgggcggcggaggaggttgcgccgccgccacaaacgagtagtatggtggtttgctcttggtggcaagttgaggccaaggttttactactgctattgttattgctgatttgctctccccgccttccggtgtaaatatctgtgtgtacccagtcccggccttgtgctagtaagtagcaagcagtgttaccttttggtattttaaccagcagctaagttcgcggcattttagtccctgtaagcggtaagcagctctgtagcgtgagatagatggccaagcgccggtacgtacgtgtagtgtctggtcttctcactgagtgtactataaagagttaatataggagctgaccctgtgaacccgcgtgatggatgcatatgcttagtgc

SEQ ID NO: 928 - DNA, 1047 bp, Zea mays
  Clone ID: 700096672_FLI
accctgaggagcaagatggagggttcacatattactgtacaggagatcacacaatgagctattatggcagcagctcttctggtggacgaagcagtaggagagtcgactatgggaggacatatgtggtgaggccaaagggaaggcacctagccaccattgtgtggctccatggcataggtgacaatggtgctagctggtcccagctcctggattctcttcctctaccaaatatcaagtggatatgccccactgctgcaacccggcctgtcgcggcttttggtggattcccctgcacagcatggtttgacgttgaggacacatctatagatggccgagacgacattgagggactggatgcttcagctgcacacattgcaaatctgctgtcgtctgagccgtctgatgtgaagcttgggattggcggtttcagcatgggcgccgccgttgcccttcactcagcagcatgctatgctcatggcaaattcacaagtggcattccctatccaatcgcactcaacgcagtcatcagtttgagtggctggctcccttgctcaaggaccctgaggagcaagatggagggttcacatattgctgtaagaagggctggctccttgcccatcctgcttagtcatggaagagtggatgaagttgtcgtctacagggatggcgagagatcagctgaggttctgaggaactcaggattctcatttctgactttcaagccctacaacgggttgggccattatacgatccctgaagaactggacgacctctgcaagtggcttagttcgtcgcttggcctcggccgatctcgctaaaagaatagttttttttttttggcgtatgcgcaatgggtttggtgacagcatatattttgaggggaggtttggtttgatagcttgtaaaacacttgatgctagctgctctcttcgcatgtggcttttgtttccgtcgtcctaatttacgtactctatgtctctatgtaatgcggtactttgttgtctgatgtttgctaataaaaagaaaatgccgttgaggcctctgatc

SEQ ID NO: 929 - DNA, 1661 bp, Zea mays
  Clone ID: 700096721_FLI
ctgtcctctcctctcgaccagctgacctcgctgacggagcacacagccacgccgcagcgccgcgtgggtgtctgtctatagccttgtaggtcgttcgcaggtaggtaaccgtaacctagctagctcgtcgggatgatgatgatgagcggtcgagcggccaccgcggggcggtacccgttcacggcgtcgcagtggcaggagctggagcaccaggcgctcatctacaagtgcctggcgtccggcaagcccatcccgtcctacctcatgccaccgctccgccgcatcctcgactccgccctcgccacgtcgccgtcgctcgccgccttcccgccgcaaccctcgctggggtgggggggctgcttcgggatgggcttcagcaggaagcccgccgacgaggacccggagcccgggcggtgccggcgcacggacggcaagaagtggcgctgctccaaggaggcgtacccggactccaagtactgcgagaagcacatgcaccggggcaagaaccgttcaagaaagcctgtggaaatgtccttggccacgccggcgccggcctcctccgccacaagcgccgccgccgccgccacctcctcgtcccaggcgccgtcctaccacagcccggcccccgccgtgccgtaccacgcgccctacggcgccgcgtaccatcacacgcagacgcaggtgacgatgagccccttccacctcctccacctcgagaccacccacccgcacccgccgccgccgccgccgccgccctactactacgcggaccagagggactacgcctacggcaaggaggtcggcgagcgcgccttcttctccgacggcgcgggcgagagggaccggcagcagcaggccgcggggcagtggcagttcaagcagctcgggacgatggaggcgacgaagcagccgtgcaccacgccgctgctcgtccccgccgccgggtacggccacggcgcggcgtcgccgtacggcgtcggtcaggccaaggaagacgaggaggaggaggaaacgcggcggcagcagcagcactgcttcgttcttggcgccgacctgcggctggcggagcggccgtcgggggcacatgacgccgccgcgcagaagccgctccggcatttcatcgacgagtggccgcacgagaaggggagcaataaggcggggtcgtggatgggggggctcgacggcgagacgacgcagctctccatgtctatcccgatggcggccgctgccgacctccccgtcacctcccgctaccgtacgtgatggcggcgcgcactatgagtgattgccagcaagaaatgttttgtggttgctgcgacctcgaggtggcgaggccacatgaaaaaaaaatactggagctggaacacgagtggttctttcctgtgccgttttgctcagggccggtcggcacggtttgaagaagttgggaagagaagtaaaataaacctccttgggagtgttacgtttcctgtaattgcttgcttcctttgctgtacctgtgagacgacgcttagtgctagaagtgagggcctttcctgatctcagctctggtctggatttgccttttcccgctgtcggattcctctgcctgtctgtgatggtttgtctgtgatggtttgtgctcagagcctgcagcgaatactaaaccgcagtaattaatc

SEQ ID NO: 930 - DNA, 2021 bp, Zea mays
  Clone ID: 700096728_FLI
ttctcagtagcagcggcatctccatccagaccccggtcggctagccccaacgccgccgccgccgccgccgcccgccgctcggggattgcctgctttcctctgccgaccacatctacaccgcacaactggtccttccaagtgagcttcaatcccctgcgtgtagatggagagggttctcaaggatgacgccgtcgaggagaagggcgaccgcgccagaatggcatcgtttgttggggccatggcaatctcggatttggcgaagaccacattgggtccaaaaggaatggacaagatcctgcaatcaactggtagagggcgtaatgttactgttacaaatgatggggctaccattttgaagtcacttcacattgacaatcctgctgcaaaggtccttgttgacatctcaaaagttcaagatgatgaagttggtgatgggacaacttctgttgttgttctagctggagaacttttgaaggaggctgagaagttaattaacatgaaaattcatccgatgactattattgcaggttacagaatggctctcgagtgtgccagaaatgctttgctacaaaataccatggacaacaaagaaaatacagataagttcagagctgatctcatgaatattgctatgactactcttagttcaaaaatactttcccaagacaaggagtactttgctgaacttgcggttgatgctgtcttgaggcttaagggtagcaccaacttggaatctattcaaattctgaagaaacctggaggatctctcaaggattcatttttggacgaaggattcattcttgacaagaaaattggcatcgggcagccaaagcggattgagaatgccaaaattttggttgcaaacactgctatggacacagataaagttaagatatatggagcacaggtccgggtggattcaatgtctaaggttgcagacattgaagctgctgagaagcagaaaatgagagagaaagtccaaaagatcatagctcacggaatcaactgtttcatcaacaggcagttaatctataacttccctgaggaactctttgctgacgctggcatacttgcaattgagcatgctgactttgagggcattgaacgtctggctcttgttactggtggtgagatcgcatcaacttttgataatccagattctgttaagcttggtcactgcaaggtaattgaagagatcatgattggggaggacaggttaattcatttctctggggtcgcgatggggcaggcttgcaccattgtcttaaggggggctagtgagcatgtgcttgatgaggcagagaggtccttgcatgatgccttgtgtgtgctgtcccagacagtaaatgatacccgtgtcttgtttggaggcggttggcctgagatgctgatggctaaagaagtggatgaacttgcaaggaagacccctgggaagagatctcatgctatcgatgctttctcccacgctctgcaagccatcccaacaatcatagctgacaatgctggtttggacagcgctgagttgatctctcagctccgagctgagcaccacaaagagaactgcactgctggaatcgatgtcatcactggcaccgttggggacatgcaaaggctggggattcaagagtcgttcaaggtgaagcaggccatactcctgtctgcgacggaggccgcggagatgatcctcagggtcgatgagatcataagctgtgccccacgcagaagagaggataggatgtgattagacacgctgtttctcggtgtagtggggatgcttgttaccctagttttgatggtggttctggggcgttcaagttggtcacatttcaagtgtttttggctcctaagaacctagtaattgttatttcgttgaaacaaccaaccgtaggcttttttttttctagattctcatgatgtaccatttggtagcgaagttcttcctctgttcttttttatgtgtcgagttttagtttaaaactagacaacaaatattcgataatggaggtagtacattgtttacg

SEQ ID NO: 931 - DNA, 1784 bp, Zea mays
  Clone ID: 700096763_FLI
gcacatcgtatcatggctataggttctgtggccgcggctggtggcaacaagctcttccggaagacctcgggcagccacgctttcgtcgccgacttcccggccgccgatgacgatgacgatatcgtctttggaacggaggccgacggcggcggcgggtgcagccccgacgcggacgccagccgctgcgtgaagcgggcgcggccccacgagcgcaacaagatcctaaagtacaggctgttcgcgagcacgtggaacgtgggcggcgtggcgccaccggacgggctggacctgtcggactggctggacggcggcgacgacgggccctacgacatgtacgtgctggggttccaggaggtggtgccgctgcgcgcgcgcaacgtgctgggcgccgacaagaagcgggtagggatgcggtgggtcgagctcatccgcgccgcgctgaaccggtcgcattcgcagcgcagcaggggcggcggctcaggcgacggcggcggcggcggcaagcagaaggtgcacccggtgcgggacggctgtggcggcgagctgggcagggagtaccggtgcgtggtgagcaagcagatggtgggcatcctgctcacggtgtgggtgcgctccgacctccgccgcttcgtccgccgccccagcgtctcctgcgtcggatgcggcgtcatgggctgcctcggcaacaaggtgagtatatatagtcctgtacttggttactcccgaatatggtggccgccccggcatctagctaagctaagctaagcaaacgatcgagaaacgaatggcagggtggcgtgtccgtccggttctggctgcacgacacgagcttctgcttcgtctgctgccacctcgcgtcgggcgggcgcgagggcgacgaggcgcaccgcaacgccgacgccatggagatcctttcccggacgacattcccgcgggggcacgcgctcaacttgccgttgccgcagaatattctagaccacgaccgggtgatcctgctcggggacctcaactacaggatctccctgccggaggccaagacgaggctgctggtggagcgccaggactggaagacgctgctggagaacgaccagctgcgcgccgaggtgtgccgcggcggcgcgttccagggctggagcgaggggcccatcggcttctctccgacgtacaagtaccaccccaactccgacgcctactacggctgcgccaccgccgcccgcggccggaacaagcggcgcgcgccggcatggtgcgaccgcgtcctgtggcgcggcgcgggcctcgcgcagacccgctacgaccgctgcgagtcccggctgtcggaccaccgccccgtccgcgccgtcttcgcggtggaggtggatgcgcccggggacctcaactcgctcaggagcttcttcatgtccgagaggttcgacagggaccagatgctgctccgcaaggatgacgtcaacagcgccagattcggcgacactctttgagacacgcgtgttgagagggtgaagttgtcagtccagttctccgactgcaattgtactacgcaggcaaaagtgtgatgcagagcagagtacatatatggatgtttttcatttctgagtcagtcagtgttcatacggtcgtatctactgcaggcagctaggaaggatacagagatggggttttatttgtctgtctgtttccaccctgttccctacgttctgtaactacgtgtgtactcttcttgatccagttagggcttgttcggttagctctcaatccatatggattgagtgagattgggtgggttt

SEQ ID NO: 932 - DNA, 1303 bp, Zea mays
  Clone ID: 700096765_FLI
cgacgccatccactccgacaaggccaaggcgctcctcgacacctaccgcatcggcgagctcatcaccacgggcaccggctacagctccgacaactccgtccacggcggctccgtcctgtcgcacctcgcgcccatccgcgaggccgtcagggctcccgcgctctccaacccgcgcgaaaagatccactgccgcctcgtcggcaagaaggagctgtcccgcgacgtccgcctcttccgcttctcgctgccgtcgcccgaccaggtgctcggcctccccatcggcaagcacatcttcgtctgcgccagtattgaagggaagctgtgtatgcgggcgtacacgcccacgagcatggtggacgagatcggccacttcgacctcctcgtcaaggtctacttcaagaacgagcaccccaagttccccaacggcggcctcatgacccagtacctcgactcgcttcccgtcggctcctacatcgacgtcaagggcccgcttggccacgtggagtacaccggccgcggcagcttcgtcatcaacggcaagcagcgccatgcgagccgcctcgccatgatctgcggcggaagtgggatcacgcccatgtaccagatcatccaggcggtgctgcgcgagcagccggaggaccacacggagatgcacctcgtgtacgccaaccggacggaggacgacatcctcctccgcgacgagctcgaccggtgggcggccgagtacccggacaggctcaaggtgtggtacgtcatcgaccaggtaaagcgcccggaggaggggtggaagtacagcgttgggttcgtcacggaggccgtcctgcgggagcacgttccggaaggtggggacgacacgctggcccttgcctgcggaccaccgccgatgatccagttcgccatctcgcccaacttggagaagatgaagtacgacatggccaattctttcgtcgtgttctaagaccgcgcgggcagtagccaattaataattaatttgatatacctacgacgtaccacggaccagatatatgtatataaaccagccgacttgccagcgtaaatttcgtgagatgcatgggatatcgttggaaggatactgtaaggtttgcacttgtactgtgctctagcctagaattaccagactagagcagcagataacataggccatgcatgttttgattttgccctcggaatgtgcaacatgtaaattctgagggtattgtttatttacttatgtatgctactactagcgtttaactattattgttgttaaccatcggacataaatatctcaaaatgttctttc

SEQ ID NO: 933 - DNA, 811 bp, Zea mays
  Clone ID: 700096767_FLI
cagcgaaaccctagttccaactcggccgcctctactataagtagctccactctctgtcctccgcggaaaccttgcccctgctcctcacgccgccgccgccgccgccgtcgccgccaccacatccgtagcgcccagccgccggagaagaggagggagccagcaccagccaccatgggtcgcgtccgcaccaagaccgtgaagaagacctccaggcaggtgatcgagaagtactactcccgcatgaccctcgacttccacaccaacaagaaggtgctggaagaggtctcgatcctcccctcgaagcgcctccgcaacaaggttgccggcttcaccacccacctgatgcgccgcatccagcggggccccgtccgtggcatctcgctcaagctgcaggaggaggagcgggagcgccgcatggacttcgtcccggagaagtcagcgctcgaggtcgaagagatccgcgtcgacaaggagaccatggagatgctcgcggcacttggcatggccgatctcccgggcgtagagcgccaggctgaggtctccagcgtccccgcctacggccgcccgcagtatggaggtccccgccgtgaccgcgtctaggttcaccgccgatcgcagtggttgcgtcgtggtcgcaccgttactcacagttgttatgctactatgttaaacttgttttagatctgtggtttcttctggcgattaagttttgaacttgtctgttatgctttaaactctatagttggatctgcgtgtgatggacattagagttatgttcttgcgccaatgaagtctcaagagattataagtt

SEQ ID NO: 934 - DNA, 1544 bp, Zea mays
  Clone ID: 700096803_FLI
agcatgcactagctgactagcatctgtgtaatcggtgaccgctcttgacttgttggctcctcgctcccacggtagctaaagctagctaggtgggtggtagcaccaccatggcctcgcccaagcattctcatcgccatcatcgtgcggcggcgacgaagcatcgtcggccgctggcgctgcggcgtgcgatgctgcattcgtgcgtgtgcttcctggtgggtctcgtgaccggcctggccccttccgactggacggacgccgcctcgcgcgcggccgtgcacgcgaacggcgcggccacggcgcaggtgttccgcgcgctgcacgccatgaaccagacggcggcggcgggggcactgggccagctgctggcgctgcagcactaccagcagcagccagtggtggagaaggagaaggagaaggagaagcctctggatctggtggtggtggtgacgactacgacaacgtcgacggggctgtcggagcgcgagcggcggtcggcgggtctgacgcgcacggcgcacgcgctgcgtctggtgtcccctcccctggtgtggctggtggtggaggcggcccgggaggctggtcccacggcacggctgttgcggcgcacgggggtggtgtaccggcacctgacctacgcggagaacttcacatcggaggcctgggaggaggagcggcaccaccagaggaaccaggcgctagcgcacattgagcggcaccgcctgcgcggcgtcgtcctcttcgcggggctcgccgacgtgtacgacggccgcctcctggagcagctcaggcggcacatcaggacaaggagtgtgggcgcgtgggcagtggcgacagtatgggagcaggagaagagggtggccgtggaagggcccgtcgtcgtctgcaacaccaccaccagcaccagcgcagcatccacagcatgtgcatggttctccgcctccgactccacattattggcggcagcggcagcggcagcgcccccagtgacggtcgacgactccgtccacggctttgccttcgccagtgacctcctctgggacccttccaggtgggaccgcttccccacatccgagcccgaccagtcgcaggattcgatcaagttcgtgcaaaggttggtgatggcggagtacaacaaaacgagggccatcatccctgcagacgacgattactcctccaaccgttctcaaatcatggtgtggcgtgtcgacacaacgctgctctagctagccctcttgccacgctaagagcgatagataaagatgcatgcatgcttaaaataaacattccatgacttattacatagtaatgccatacacgtacgtatgtatatgtataaagggaaaagaatggcaagcagcagtctgcatcagtcgttgtcgtcgaaatgctcaaggcaacgcatcgcatcatcctcttgctcgcctgcgcgcaatccttttcttgtccgccctgcattgcatgtccctttttctttttcttcttgtttgccttgtgcggctgtctgtcttgcaaccccggcatgaagaaaaggaattcgattt

SEQ ID NO: 935 - DNA, 1872 bp, Zea mays
  Clone ID: 700096901_FLI
cttatatgttattttatgtacgtaacagtattgggaagtcggtggtgtgcaaagataataatgctgctaatttgctcaagaagaaaacctctgaaaaaatctcaagtttgaatggtattgcacaaaccaatgtaagagcacaaaatttgaatggtgtgtctccatttggtgataagacgcacggcacaatcattggctactctacaatttccagcaagactaaaacaatccactgttcaaagaatgaggtcaaagctgaagatgctccagcctctcaaaacaatgctctaccttccacacaagcccccatagctcgaaatgatgttggtatcttgccaactaaaccaatgcagtttgctgtaaaaaatgaggagaaaacctcatcccaccaacctgcgccatttacaaatacttgtggtgaacaaacagttgttgggaggcccttgcaggaaatggaacctaaggctggtgcaggggaaaatacttctgttgtctctgctgttgctaatgatgccgctacattgtccaaggcagacaaactaacttctcagcctcaaacagctccatcttccaagccaactgccaatgtaaaggacacagctactgagtttgctacactgtctttatcaaagaaggattctgttgtttcaaatggtgctgtgcttagcattggatgtctcacatccggtgagaaagcaatgaacttatcagaatctgtggatcaagctaatgaaatcacaaaggcacttcctacgagtcagaacaatactgcaccagtaattgctcaagcagattgtggagtagagatcagctctggtgtcatcatgcacgttgctgtgtctgcttcatgcaatggaactacagagaaaaaggtgaattcgaagtcaaagaagtttgtgaggtatcctgttgtgaacatgtggttagggtccagacatctaaagccagggaagaaagcgaaccgcaagagaagtaaaatgataagacgtgttgtagcctgcaaggacgcggcaaatttatcttgtttgagtgagcagctgacgtcaacatcgtccactgcatgctctgaaaccgtagaatgtacctccagccatcagaaacggtcacatgctagtgcaaggtccaaagatgacacccagtcctccggaaacaagcacaaggtcgacggagcccgtgtcggtgctggcacaggtgcaccttcttgcagcgccgacgttccaaagtctgatccgagcccttccacggatgctaagttggtagcgacccagcctgccagtattcgcgcaacggacctgatggaagctaccgttccgcgttgggatgatgtagacgtgccaaatataaaggtcgctgagccgcagtccaaacgcaagagcggtggctacatcttagatgagtgggacgaggagtacgaccgagggaagacgaagaaggtgcggaggtcaaagcaagactttggcgggccaaacccgttccaggaggaggcggactacgtatcgcagcggaggacgaagcagaaatcctaccgaggcaagtcttggaacaagcgggcctaacacggtagagaggggggagttgagagaatacgcgcgcgagagagagaatccccggacgcacatgctgtttgttgttacgttttagcacccattggtgagggagatttacgttaaaaaccatccgttgtcggtagtccccattagctgtcgaagttatgacgttttgggcagttttcgtagaacatttgaaacatttgttcggttgtaacggagtgctgtttagttgagttggggggaacaaaattggcgagactattttgctgcattctgctctgctgtttagttactgatgaagaataaaacgatggtggtgatc

SEQ ID NO: 936 - DNA, 2108 bp, Zea mays
  Clone ID: 700096950_FLI
cctcgaagcacggaaggctcccagaaggagctctcacctcgcagccatctctggcacgtccgtccttcttctccctcggtccctccccttctccacagctatcggattggcgttggagtggagatcgacccgggctcggaattcccttcgttggtaaggaaccctaatttggtcagatgggatttccaacttcgacaaagcccgcgaggtcgatcgatctcagttgacgcgagggattggaaaactaagttgcgggtgtagttaattttctaggaagattggggtttcagctcaaactcccatgctcgacgctgaggacgaccctggcgggagatgacgaggatcttcgtgcagcgcgggaccgccggctcctcgtccagctccggccgctcggacacgcagccagtgcagccggcagcagctgcccgggaggaggagttgccgctgcaacctcaaccacagctgccggagctattggccatagatgatacaactgataatttaaatgagggcagcgagaatatcagcaataagcctttgaggacggatgacaccatttcagagagctcaagctccgcagaggagagggctgccagggagaagcctcttaaggatgactctaatgtaatcaaccccactttcttagtagaggaacctgtagggatccagatccctgatcagattgagcatgaaaattctgtgctgtcagtcactggttcatcacagatggcaggtgcagcatcgcacccaccaccactgccagctccacctccaaaaccattgttggggaataatggcttgcggagaatggggcctggaagttcgaatagtgtgcggattggatcttcaagaaggccagtagcttggccactagtggcagcccggacatctgcttcaggttctcggccttcttcacctaggtcacttgttgatggggaaggttacaacagtgctgatgaacagggcccctgttatgccttgagttatgatgattcggaaagggagcgtatgtttgaccatgacctaaggcgagtgaaagggttggaaatcagaaagatggccgaagatgggaactgtctattcagagctgttgctaatcaagtttatggagacgcagaagcttatgacatggctaggcagatgtgtgttgattatatggaaagggaacgggatcatttctctcagttcataactgaaattgaaagttttacattatactgtaagaggaaaaggagagataaggtttatggcaacaatgttgagatccaggcatttgcagagatgtacaatcgtcccattcacatatattcctacagtacagagcccattaatatttttcaaggaagctataacacagacgttcctccaattagattaagttaccatcatggtaatcattacaattcagtggttgatccccgacggcagacagttggggcaggacttggatttagctcccttagagggacaaataatgttgacagggaccaggtgaaggctgcaataaaagctcagcaagaccagcaaattgagaatgcacttttagcagaagggcgattctactctgatctggagttaacagagagggaaatagaacggatggtgatggagtcctctcgttcagaatatctcgccaaggagaaaaagcttaacattcgggagtcatcgacatcaagggcagagccatcttcatccgccgcaattagtggttcctcccgttcagttgctggagctgatagaggcaaagaggactactttgtgcttccagatactgcactgactcgcagcatgcagttgctcctcgcaatgggcttcagctacatccaggtcatggaggcctacagcatattcggcgaggacgtggactcgatggtctgctacctgttggagacaggaggcaccggagcctcagcgggcggtagcaatcgccggaaaggaaaggctgctgagtgatctgcacaccttcattgctgtggatgtaatcgttgatcgaaatcgttgggcatgaggaagcataccagataatgacagccttgtgagttgatatgtcgatatacctgctaccttttgggtgatgaataaatggtactcacacttgagacttctcg

SEQ ID NO: 937 - DNA, 940 bp, Zea mays
  Clone ID: 700096952_FLI
atgagactgctcctactggcacatgtgctgtatgtgttgttggtggtgaaaggtcattgattgcaaatctgtcagcggcaaactgttacaaatctgagcatctaaagagaccagagaactgggcactagttgaaaaggcaaaatacatctacattgctggatttttccttacagtgtcgcctgattctatccagctagttgctgagcatgctgcagcaaataacaaggtgttcctgatgaacctctctgctcccttcatctgtgagttcttccgtgatgcccaagagaaggtcctcccgtatgctgactacatcttcggcaacgaaactgaggcaaagatctttgccaaagtcagaggatgggagactgagaatattgaggagattgctttgaagatctctcaacttcctttggcttcaggcaagcaaaagaggattgctgtgattactcaaggtgctgatccagtggttgttgctgaggatgggaaggtgaaaacgttccctgtgatcctattgcccaaggagaagcttgttgacaccaacggcgcaggtgatgctttcgttggaggcttcctctcacagttggttctaggcaagggcattgaagactgcgtgagggcaggttgctatgccgcaaacgttatcatccagcgcccgggctgtacttacccggagaagcctgacttcaactagtgcaaaaactgaggcacgtcatgagagggactgttataggcacacttaattgttaaccagtgcgtggttcggtgtctacacaccctgtattcttccgaggcttctcttctgatccggccaatatttttgccgtgaaatttgtgttctgcgactatggacgtctcctttgtcgctgtataaggcatgatttgccatcattctgttgcttcggtgatgcttgcaatgcaatgagaatgtgttggaacgat

SEQ ID NO: 938 - DNA, 803 bp, Zea mays
  Clone ID: 700096958_FLI
aagaagcgaagtcgtcgccggagcaggaggaagagcgaggagcaacatgtcgtggcaggcgtacgtcgatgaccacctgctgtgcgacatcgaaggccagcacctcagcgccgccgccatcgtcggccacgacggcagcgtctgggcacagtccgagaacttccccgagttaaagcctgaggaggttgctgggatgataaaggacttcgatgaacctggaactcttgcaccaactggtctttttgttggaggtacgaagtacatggtgatccaaggtgaacctggagttgtcatccgaggaaagaagggcactggaggcattactatcaagaaaactggcatgtccttgattatcggtatctatgatgagccaatgactccagggcaatgcaatatggtggtggagaggctcggcgattacctgatcgaacagggcttctaagggggtgtttggtttgaggaatcactccatccaaaatgtggtggtgcatcatggatccattcctcaaatttggtgggatgaccccattcctcatattagtactaactaactaactataaggaatgaggtgatgatggatcaactcattccattccacaaaccaaacaaaaaaagtgaggagtgagaagatgattgactagctcattcctcaaaccaaacagtctataagtttgtcataatgctattttggtcattgggcacttaagtttgcacctcatttggttctgtaatatgtgggcttgtgcatgtgcttggcgtattgcatgcagtgaataatttatcttcgcgttgggttgctgac

SEQ ID NO: 939 - DNA, 1861 bp, Zea mays
  Clone ID: 700096960_FLI
gagtcctcccatccacaagttcttagcttttgcgagattgagatccggctggggacagaccgacagaggaaggtgaattgtgggaaagaggacagaaaaatggggattggagatggatcttcaaatgggaaccagcaaccggtgcataaggaaatacgagatgagaccacaccacttcttccagtcaaggtggaggaggacgaggggtttcatgagttcaatggagcttcattctctggggcagttttcaatctgtcgaccaccatagttggggctggaattatggctcttccagcaagtatcaagatgctgggcatcatcccggggattctgttgatcatccttgtggcactgctcacagaggcatccatcgacatgcttgtaaggtgcagccaccagggcaagattacatcatatgggtggctgatgggcgaggttttcgggcagtgggggagaattgcgctgcaggcctccgtcatcataaacaatgttggcgtgctaattgtttacatgattatcattggtgatgtattatctggaacaacatcaggcgatgttcatcatcgtggtatattggagggctggtttggagctcatttgtggaattctcgtgccattgttcttcttgccacagctcttttggtgttcgctccgttggtgagctttaagcgcttggattcattaagatacacatctgcgctatcagttgccctggcagtagtttttgtcgtaattactgctgggattgccatcatcaaactcttcaatggaactgtagcgatgcccaaactttttccagaattagatggtcttaattctatctggaatctttttacagctgtccctgttcttgttacggcctatatctgccactataacgttcacagcattgacaatgaacttgaagacagaacacagatcaagccgattgtgcgaacatcgctgttcctgtgctccagtgtttacattgccacaagtttctttgcttatctcctcttcggtgaaggcacactggacgacgtgctcgccaactttgacgcaaatcttggcattccattcagttcagtcttcgatgacatagtgcgagtgagctatgcagcacatgtcatgcttgtctttcccattgtcttctttgccctccggctcaacttggatgggttgctcttccccacgtcaaggcacatctctcgtgacaacaagagattcgccatcatcaccgtctctctcctcgcagtaatttatcttgctgccattctcataccaagcatctgggacgcgttccagtttactggtgccacagctgctgtcctgattggttttatatttcctgccatggtcatacttagggattcttacggaatcgcgagcaagcgcgacaagattctggctgtaaccatgatcgtgcttgctgtcctgtcaaattctgtcgccctatacagtgacgcgatgaacatcttccgtaagaaggaagtggcctgatctcagatttcaaaagtagtcagtgctggatgaagaatggtctcgcaatgcaagactcgatggtacgaaggaaaacgatgcgcttggattccgtgaaggaacgatttctttgtcagcacctcagaatttggccacttgaaagaatctgatgcttgaagtttcctggttctgtgtacacaagtcggctcaatgtcagaattgagccgcttgaaatatatttagttatattctatgcggagagtaggtcttggaaacagccttttccacaataatgtacagttattatgccaatttctgagttcagttaaattttgtgaaatatggacatgggcgtcttgtctcgattaaaattgagaatggtatgattgcacattacgtcgct

SEQ ID NO: 940 - DNA, 761 bp, Zea mays
  Clone ID: 700096970_FLI
tcaaagggctgcagcaatgtaaaggaagggactggtttgactacatttctgcacttcctctttcagacttaggacttccatttatgtccattgatgaggttatcaccgtcaacagtgatgatcttatcttagaagctttcaagtgcatgaaggataacaagattggtggtgtcccagtagtagaaggccccaaaagaaaacttgttggcagtgttagcataagggacatccgctttctgttgcttagacccaacttattttcaaatttcaggcagttgacagtcattgaattcatgaagactctaggctccactcttcctgattcagagagcaattgcctggtgaagccaccacccacttgcactcctgacgcttcccttggtagtgttattgacagcattgcatcaagaataacacacaggatatatgtagtggatgatgaccttgaggttgttggtgttgtgactctgcgtgatgtgatctcatgctttattcatgagccacccggttattgcgacaactatttggcttcagcgatggagaagcttgaggggaaaggagtcagatcagtggagaaaatttgagcttttctgtagcgtgaatgttgataataacaggtcagtatgtgaggaaggtttatttggttggaacggtgcattcgtgtcgtgttaatccagcaaatcctgtgtaggttaagtaacaaggcttctgtgctgttaaaaatattttactatgtcatttctttggacggttttctgaac

SEQ ID NO: 941 - DNA, 1335 bp, Zea mays
  Clone ID: 700097023_FLI
cacccctagcgatgcgccactcccggcgctcgtgatccatggcctcactccccgttcctcacactcttccgcgggcctcgccagcgatagtgggcgccgcgagggggagggccgcggtgcgcgtacgcactgccaccgcggcattgggcggtaggtgcggcggcggcggcggaatggagcagcgccacggggaggccccgcacagcccagtgaaggagaagcctgtaatgtcaaacattgggaaatcgactaatattttatggcacaattgcttgattggacaatctgatagacagaaattgctgggacaaaaaggctgtgtcgtatggataacaggactcagtggttcagggaaaagtactcttgcatgtgcactgagtcgtgagttgcattgcagaggccacctcacgtatgtacttgatggtgacaacctcagacatggcctaaatagagatttaagctttaaggcagaagaccgtgcagaaaatatacgaagagttggtgaagtggcaaagcttttttctgatgctggtgtcatatgcattgctagcttgatatctccatacaggagagatcgtgatgcatgccgtgctctacttccacattctaactttattgaagtatttattgatttgcccctaaaaatttgtgaagctcgtgatcctaaaggcctgtacaagcttgcacgtacaggaaagattaaaggtttcactggaattgatgatccatacgaaccaccaattaatggtgagataaggcataagttatatacatctggcattgttttcaaggattaactttgaactcagaacgtctttcctgcagtttaagatagtaattacgatgaaagatggggaatgcccttcacccaaagcaatggccaagcaagttctatgctaccttgaagagaacggatatttgcaagcttagcatatgtattttgagaagattgatctgattcttgtgtccattacttgtggacacaatacgatctgttgttggtcacatgaataaaaggcatcaacacgtaggaagtaacagaaggtacggttcattcagaaacggatatagaaacggatatggattcattcgtttcattgttgatgatatttgtttcgcgtgtattttgcctgcatagctgcgattcatctgcatcagcaattcaggatgcattcggttaactcgcgttgaccgttcgcgtcaaattgggtagttgttctgtgcttgcgagctgggttcgctgttggcaatgtatttgttacaagtaaatacggataatgtgtgtaatttctgtatcacttttttcctcttggaataaaaaccgaggaacattgt

SEQ ID NO: 942 - DNA, 1613 bp, Zea mays
  Clone ID: 700097070_FLI
tataactgcagggctctccagtctctcccccaaggactgcatcgccttccttctctccatgaaataactatccttgggcctcaaaacatcgtatcactgcctaaggagggcctccccgattcactacgactactacatataactgattgctgtgccgagatttatgaggcatgccagcgattgaagggaacaaggccagatatacgtgtagatgcctccaaagctcgtgtgcaaaattgaatacctgcttctgcatgtctttcgcacagtcagctctgcttcagcatgcctttcactctacaggtaaatactgtgaaaacctcttctaatacatgagatagttgaccttcatcgattctccagccaggatgatgttttattggatgatgtgttggtcgtggttggcacaaaattcagtagtcctgtaactatcgttaatcatttgaaaaccactggaagacaggagatgtaacaccacaagccatacctttgatcatttgaaaaccattgcgtctctttctgattatatcaaccagttgagtggatgaaagaccaaaaaatgctttgaagggctcacaattgtggataataaggcatccagtattatagtggaaacaaaggaaattcaaattagacggaaacctgctagtccaagttcttatatgccaaattcagcagtttggattcgtccatcatgaactgatcatgtacgatgaaggatcagctcgtccaacatttttcaaggaacgaactcaatctgaggaattaccttttcattggtcacctgggggtactacgaggaatgacttcacgatagacgactcggttttgcgacgcaaaccaaacgccatggttaggctcagatgttggatcagatgattcctcatggctttgtgacgcaaaccaaactccatggataggctcagatgattcctcgtggcttcgtgacgcaaaccaaacagcctgatgctctagccaaaggcatgatcgccctcgttctgaaacaaaagaaaatgctgcattaaaccatgtgtattcctttcagtgagcagcctttgcatgctgcatgagatcaagcaagccgccgactggcgacgctccacctgccattcggttcgttggtgaggtattaatcaccagccatgttggcgtcatgcagatggagcagaacatccaggtgaagcggacagatacatgatcgatcatgagttggcgcagacagaggccaggcaaccagaggccatactacaattcatacatttcatgatagcaaaggaagatccaagactacatataaatagttagttatacgagcaaaaacttttgggtcttgttgtcctgtgcctcccattttccagtccagaattaatatgacgatttttcactgaaactggttggatcagagaccaggaaaaaaaggaaaatgacaaatgcagttgggttttttttgcaaagaaggcagctgcacttgaggatttcctctgccttttcagtgacactgcttcatccttttcagagccagatgaatctctacctcatttcactgcacatacttccaaactgatttgttgtaacatacttgggtttcggtatgacattaatccttaactgat

SEQ ID NO: 943 - DNA, 908 bp, Zea mays
  Clone ID: 700097075_FLI
agcaaccttcacgagctgcgtggtgaggttgaccaggactccttccggatcctgaaataaggccaccgctcgtttcctctccacctccctcctccttcactccctccccttgcgtttagcctcccgctgttgtggagccgcgggccattcccaaccatcgttgcggtggtggccggtattggccgagacccatgggcatccaggtcgcggcggtcgtgatcccgccgccctgctcttctccttcctcctcctcctcctctccggcgtcgccttcgtcctcggccattgccacgtcgccgcagcatgccgttcttggcgccaggctggcgaggagccagtcgtcgctggcttgctggaacgccgccggtctcggccggcggcgcggcggggagcacacgatcaggcgcgctctcagcgcgagcatcgacagcgtcgggagcgacggcggggacgacgaggagttctcgaggaggatccaggagctcgcggtgggtcagcacccgggcgccggcggctgcgggtggccggcgagcgtggagcggagcgcgagcagcgtcgggctgccgctgtccctgcggatgctcaaacggaggaagcagcagcagctggagcaggggcggtgggacgagcggctggtcgacagcgccggcgagtccgcgcgcgccgcggtggggcgcgccttctcctcgatggtgctcatcatccgggagctccagagcttcacgctgcagatgcgggagacgctcttgtacgaggacctgcagggcgtcctggcgcgcgtccacgccgagatgcacgcctccttcgtctggctcttccagcacatcttctccggcaccccggcccttatggtctccctcatgctgctcctcgccaacttcaccgtctactccatgggcgacagcgtc

SEQ ID NO: 944 - DNA, 1408 bp, Zea mays
  Clone ID: 700097114_FLI
gaagaagacaaacgccggcacgcgcacgcagacacgatggcgatctgcagcgcgcacactaccacctccctgcgctccccatgcacgaccgtctcgaacgcaggtctgaggcagaagcaagtcatcttcgtcaccagcaacaggaggagcggcggcggcaggaggcacggaggggcaaggagcttccaggtctcgtgctccgtcgacaagccggtggtgattggcctggcggcagactcagggtgcggcaagagcaccttcatgcgccggctcaccagcgtcttcggtggcgccgcggagccgcccaagggcgggaacccggactccaacacgctcatcagtgacaccacgacagtgatatgcctcgacgactaccattccctggacaggaacggcaggaaggagaaaggtgtgaccgccctcgaccctagggccaacaactttgatctcatgtatgagcaggtgaaggcgatcaaggaaggccaggcagtcgagaagcccatctacaaccatgtcactggcctcctcgaccctccggagcttatcgcgccaccaaagattttcgtcattgaaggtctgcacccaatgttcgatgagcgagtgagggacctcttagatttcagtatctacttggacatcagtgatgaagttaagtttgcatggaaaatccagcgggacatggcagagcgtgggcacagccttgaaagcatcaaggccagtatcgaggccaggaaaccagattttgatgcctttattgatccgcagaagcagtatgctgatgctgtgattgaagttctgccgacccagttgattcccgacgacaacgaaggaaaggtgctgcgtgttaagctcatcatgaaagaaggggtgaagaacttcaacccggtttatctctttgacgaaggatcgaccatcagctgggtgccttgtggaagaaagctcacatgctcttaccctggcatcaaattttcctatggcccggacacttacttcggaaacgaggtatctgttctggagatggatgggcaattcgacagactagatgagctcatctacgtggagagccatctaagcaacctttcaaccaagttctacggagaggtgacacaacaaatgctaaagcatgcagacttcccaggtagcaacaacgggacaggtctcttccagaccatcattggactgaagattagagacctctatgaacagattgttgctgagagggctggtgtaccagcggaagcagcaaaagtttaacgatctatgcattcagatgtcctaaaactacagctctccgaactcaatgggagtaacaaccttcgcatctgttgggatatatggcgagctaggaggtatagaaatgtcattgcagaactcaggaaaacgtgcaatggaatttcttgaaatccct

SEQ ID NO: 945 - DNA, 1206 bp, Zea mays
  Clone ID: 700097170_FLI
gcgtccccgtcccgagtcaccaccgacccaagcaaaaccgcacgcaccctgccagcggccccccaactcccaacccaacccctactccagctagctcgcggcggcggccagcggccatggccttccggctgagcaacaacctgatcggggtcctaaacttcgtcaccttcctgctctccgtcccgatcctgggcgcgggcatctggctgggccaccgcgccgacggcaccgagtgcgagcgctacctctcggcgcccgtcatcgcgctgggggccttcctcctcgccgtctccctggcgggcctcgtcggcgcctgctgccgcgtcacctggctgctctgggcctacctcctcgccatgttcgtcctcatcctcgtccttttctgcttcaccgtcttcgccttcgtcgtcaccaacaggggcgccggcgaggccgtctccggccgcggatacaaggagtaccgcctcggggactactccaactggctgcagaagcgcgtcgagaacaccaggaactgggaccggatcaggagctgcctccaggactccaaggtctgcaagagcctgcaggacaagaacgagaccgtcgcccagttcatgagttccagcctctcccccatcgagtctggctgctgcaagccccccaccagctgcggctacacctacgtcggcggcacggactggacgccggtgaccaccaactcgacggacccggactgcaagacctggagcaacgacgcctcggcgctctgctacaactgccagtcgtgcaaggccggcgtggtggccacgttccagcggaactggaagcgcgtcgccgtcgtctgcatcgtcttcctcgtcttcatcatcatcgtctactccgtcggctgctgcgccttcaggaacaaccgcagagacaacgcctaccgcggcgggtggaagggcgggtacgcttgatccaccatcgcgtcgtttaggagcggagccatgcacgcgcgctcggtgctctgctctgctccctgcccgccgctgtcgtcgtacgtacatgtttagtaggctcgttgtagctctgtacaggtgatggagatcgttgttgcggattcttatcgtcttcctggttacatacttacattattgttatgatctgatcagcggtaggttttgtatacgctgctcattgattcgtctgcctgctattttcgtatatcgatgcacttgttttacc

SEQ ID NO: 946 - DNA, 2283 bp, Zea mays
  Clone ID: 700097217_FLI
ccccaacagcaatggacgccgcccagcgccgcgtcggtacccacctccagcgcccgccgccgcccgccgggggctacggcctcaccgtcaaccccaccgcggccgagtacgtccacgcgcagggctacagtgtcctcctccctgagaaattgcaaaccggcaggtggaacgtgtaccgatccgcgcgttcaccgttaaggctgataagtagataccctgataccccagacattggaacgctgcatgataatttcacgtatgcagttgagacatttacagactgtaagtacctgggaacaagaatcagagcagatggaacaattggagactacaaatggatgacatatggagaagctagcacgagcaggactgcagtaggttctggccttatctatcatggagttcgtgagggtgcatgcattggtctgtattttgtaaacagacctgagtggattatagttgaccatgcttgttctgcatattcatatgtatctgtgccactttatgacacacttggcccagatgctgttcaattcattgtgaaccatgcagcggtggaagttatattctgtgtgcctcaaactctaagcactctgttaagttttatagttcaaatgccatgtgttcggcttatagtggtagttggtggagatgatgcaaatctgccatcaacgccagtaactactggagtgcaaatcataacttactccaggttgctcatccagggaaaggctagccctcaacctttttgtcttccaaaacctgaagatgttgccactatctgttacactagtggcactactggcacaccgaagggagctgttctttctcatgggaacttaattgcaaatgtagcaggatcaagcctaaacattaagttttacccctccgatgtgtatatctcatatctgcctttggctcacatttacgagagggttaaccagattgcagcactgcactgtggtgttgccattggattctaccaaggggataatttgaagctcatggatgatctggctgctttgagaccgacaatattcgcaagtgttccccggttatataacagaatttatactgcgattacaaatgctgtgaaggagtctggtgggctgaaagaaaaattgtttcatactgcatacaatgccaagagacaagcaatccttaaagggaaaaatccatccccagtgtgggataagttggtatttaacaaaataaaagctaggcttggtggacgagtgagacttatgagttcaggtgcttctccactgtcagcagatgtcatggaattcctgaggatatgctttggtggtgaagttcttgaaggctatggaatgacggagacatcctgtatcatatctgcaatggattttggtgacagatcaattggtcatgttggatccccaactgcatcttgtgaggtgaaacttgtggatgtcccagaaatgaattatacatctgatgatcaaccttatcctcgtggagaaatttgtgttagaggacctataatattccagggttactataaggatgaagttcaaacaaaagaagtcattgatgaagatggttggttgcacactggagacataggtcagtggctacctggaggacgtttaaagatcattgataggaaaaagaacattttcaagttagctcaaggagaatacatagctccagagaagattgaaaatgtctatgccaaatgcaagttcattgcccaatgttttatatatggcgacagtttcaactcttccttagttggtattgttgcagttgaaccagaggttatgaaggcttgggctgcatctgaagggatccagtgcgaagacttgagacagctttgtgctgaccctagagcaagagctgcagtcctggccgacatggattctgttgggaaggaagcacagctaagaggttttgaatttgctaaagctgttcggcttgtcgctgagccattcacagtggaaaatggtctcctcaccccaacattcaaggtcaaaaggcagcaagcaaagacatactttgcaaaggaaatttcagatatgtacgcggagctgcgggaggcagaggcacccaggtcgaagttgtaatccccgccatgtaatgatcaattcaaggagaagcgacatatacaggcatacagatcatatgtctagaagaaacgtaatctttttactggcgtagcaaataatggttcctgtaatggtcaggaagagtcgagacttataccagacggaggcagtgcttggtgcaaatcatatagatgaatgctgttttcccttgtcc

SEQ ID NO: 947 - DNA, 1037 bp, Zea mays
  Clone ID: 700097238_FLI
cagtgcctgatcgatggcggcccaggctctcctctccggccggcagctgctgggccgccccgtgcagtcggccgtctctaggtcgtcggcgaggaaggcgcccttcgtcgtcagggccagctccagccctccagccaagcaaggtgccgacaggcagctgtggttcgcgtccaagcagtccctctcctacctcgatggcacgctgcccggcgactatggcttcgacccgctgggcctctcggacccggagggcaccgggggcttcatcgagcccaagtggctggcctacggcgaggtgatcaacggccgctacgccatgctgggcgcggtgggcgccatcgccccggagatcttcggcaagatgggcatcatcccgccggagaccgcgctgccgtggttcaagacgggcgtcatcccgcccgcgggcacctacaactactgggccgactcctacacgctcttcgtcttcaacatggcgctcatgggcttcgccgagcaccgccgcctccaggactggtacaacccgggctccatgggcaagcagtacttcctcggcctcgagaagttcctcgccggctccggcgacccgtcctaccccggcgggcccctcttcaacccgctcggcttcggcaagaccgagaaggagatgaatgagctcaagctcaaggagatcaagaacggcaggctcgccatgctcgccatcctcggttacttcatccaggggctcgtcaccggcgttggcccgttccagaacctgctcgaccacctcgccgaccccgtcaacaacaacgtgctcaccagcctcaagttccactagaacgttggtgcatcagcatacctgctgccgccgccgccagttgtttgctgtggaaagctagatgcatgcgtgttgtaaaggaacctgaagcgttgcatcggtcatgattcatgcatggccagcctgctgcctgtaacaacaaactagtattgatcttattgagaccggaaactgtattgcacatggtaaatcaatgtacaattcctccctagatgcggac

SEQ ID NO: 948 - DNA, 347 bp, Zea mays
  Clone ID: 700097261_FLI
ctcaccatggtcatgggcgacgacatggtcaaggtcatctcctggtacgacaacgagtggggctactcgcagagggtcgtcgacctcgctgacatctgcgccaaccagtggaagtgaagcgttgcattgtaatagcactttgtaactcctcaccctccacagggctttgggattcaccccgaaatgactcactttcggtgaaattcacccgtttcggcgaggtcgtccgaatataccggccaaatgtttccattggatttcaattattagtcaactctagagttgaaacaaacatacaagttcttcattcaataatcaatatagaagtgcatatctgtttcctcttc

SEQ ID NO: 949 - DNA, 1095 bp, Zea mays
  Clone ID: 700097272_FLI
gccatcgacacgatcgcgagcgcaagcacgtacgttgtcggaagctcaagttagaagaagcaccagtgcctgatcgatggcggcccaggctctcctctccggccggcagctgctgggccgccccgtgcagtcggccgtctctaggtcgtcggcgaggaaggcgcccttcgtcgtcagggccagctccagccctccagccaagcaaggtgccgacaggcagctgtggttcgcgtccaagcagtccctctcctacctcgatggcacgctgcccggcgactatggcttcgacccgctgggcctctcggacccggagggcaccgggggcttcatcgagcccaagtggctggcctatggcgaggtgatcaacggccgctacgccatgctgggcgcggtgggcgccatcgccccggagatcttcggcaagatgggcatcatccccccggagaccgcgctgccgtggttcaagacgggcgtcatcccgcccgcgggcacctacaactactgggccgactcctacacgctcttcgtcttcaacatggcgctcatgggcttcgccgagcaccgccgcctccaggactggtacaacccgggctccatgggcaagcagtacttcctcggcctcgagaagttcctcgccggctccggcgacccgtcctaccccggcgggcccctcttcaacccgctcggcttcggcaagaccgagaaggagatgaatgagctcaagctcaaggagatcaagaacggcaggctcgccatgctcgccatcctcggttacttcatccaggggctcgtcaccggcgtcggcccgttccagaacctgctcgaccacctcgccgaccccgtcaacaacaacgtgctcaccagcctcaagttccactagaacgtggtgcatcagcatacctgctgctgccgccgccgccgccagttgtttgctgtggaaagctagatgcatgcgtgttgtaaaggaacctgaagcgttgcatcggtcatgattcatgcatggccagcctgctgcctgtaacaacaaactagtattgatcttattgagaccggaaactgtattgcacatggtaaatcaatgtacaattcctccct

SEQ ID NO: 950 - DNA, 2209 bp, Zea mays
  Clone ID: 700097286_FLI
aacaggttgagaaggccttcagggaaggtacggcacagcaaaatgcacatagtatttttgtgtcccttgctctaaaacttttggaacagcgagttcatgtcgcatgcaaagaaattattacgttggaaaaacagaacaaacttcttgaggaagaggagaaagaaaagcgtgaagaacaagagcgcaggttgaagaggagaacaagagagagagaaaagaagaacaggagaaaagaaaggctgaaagaaaaggaaaataataaagggaaaaaactagttgaatcaaagtcacgaaatgatattccatcttcagctccaagcaactccacaacatctatcaatgattattcgacaaatactctggactcaagagattcagttaaggaagatgaagatagtgctgaagttgtgaatctgtgctctcctgacagcttagtgacctttgtacatcagatcaatccaagtcttcgagacggggtccaaggtcaagggaggattttcctcaagatcagtccttggtatgatgactgcggagatgagtctggaagaattggtgaattacaatggaagtcaagggaaaggacaagaagtattaatagaagtcgcaacgcagcatccacctcaaacaacaggacaagagagaggcaatcatacaattcttgcagctgcggccatctggaagactatggagtcatggacagctgtttcttgccaacagctagatctggcaaagagacgaagatagcaagaaaatcaggagttgagaaacctagggtgcagtaccacagatgctatacattggatagctttatagtgtcaaaaggaaaccgtgctggttctacacagaaaaatgctatcccaaagcaaatatgggagcctatggatgctcgaaggaagactaaattacacaatacagttcatgattcaggttcagttaacgatgttgattcactgaaacatgtggtttttgataacagtggatctcaaaattttggagtaggatgtgaatcacagcctcaggcttctgaaagttccagggatgaatgtaattcagatcaaccatgtgcaaatggtgggagaaatcaaactatttcatgtgctagtagtactcttatggtgaaccaacaaaactgttgcgcaggaaatgatgaaggctccaggcatgatgaagagctgatgatgaactctgctggttctgatagctcctcgtcatgcatgagcgagggagatagggaaagcagctccagcagtacaacctcttcaagcgctcaaaatccggaatcatcttctgagtctgaggaatcacccgagagaataaatagcacagtaggtacacaatcatcaagagctgcttcacggtctttgcttgaagcatgtgcaggtaatggtttcagagaataccaacccaaggcaaccggcctagctcacaatgacatgtttgggtacaatgtatcccctgtccaggaccagctgctgcattaccaaagcatgtatccacctcaacatcggccaataacaatggggtttcatgacggttcttgggctgcaccaacgaatggaaactttcagtatgctcgaccatcccacttatattctagtccactcgtattcggaatacctgggaatcattttattgattatccttacatggctcccgccttcagccatatacctccagagcctattcacaaggccgcatccagctttagagccatgcctctgtcactgccttttcaaaacggacatcggcaggctgctagtcttactcagagagacatgaatctagaaaggcgccctgcaaagttgactaagccgacaggcaaggatcccccagaaaacaagaacaagtcgggcctaaaggatctcccagaagacaagagcaaatcatgggatgcggatgcatccttctcgttgttccaattcaacttgccaatagcttcgcctgtaacaccatcatcaaaagataagagcggagagctggccgcaaggacgccactgactcaggtgcaagctcagctttgctcgagggaacaagcagatgtgaaggagtatagcctgttctcctcgaaagataatggcatattttcgtttatgtagataaaagaaaaactgtgacaaacctgctacccttcgtttctggtgtctcttgctgcacttcgtgaatgctttgtgttctccgaagcaaaataaaggatgttgccattttcttc

SEQ ID NO: 951 - DNA, 3241 bp, Zea mays
  Clone ID: 700097293_FLI
agcagcacgccgtgccgctccaaccgtctcgcttccctgcttagcttcccgccgcgccatggcgtcgaccaaggcacccggccccggcgagaagcaccactccatcgacgcgcagctccgtcagctggtcccaggcaaggtctccgaggacgacaagctcatcgagtacgatgcgctgctcgtcgaccgcttcctcaacatcctccaggacctccacgggcccagccttcgcgaatttgtccaggagtgctacgaggtctcggccgactacgagggcaaaggagacacgacgaagctgggcgagctcggcgccaagctcacggggctggcccccgccgacgccatcctcgtggcgagctccatcctgcacatgctcaacctcgccaacctggccgaggaggtgcagatcgcgcaccgccgccgcaacagcaagctcaagaaaggtgggttcgccgacgagggctccgccaccaccgagtccgacatcgaggagacgctcaagcgcctcgtgtccgaggtcggcaagtcccccgaggaggtgttcgaggcgctcaagaaccagaccgtcgacctcgtcttcaccgcgcatcccacgcagtccgcccgccgctcgctcctgcagaaaaacgccaggatccggaattgtctgacccagctgaatgccaaggacatcactgacgacgataagcaggagctcgatgaggctttgcagagagagatccaagcagccttcagaaccgatgaaatcaggagggcacaacccaccccgcaggacgaaatgcgctatgggatgagctacatccatgagactgtatggaagggcgtgcctaagttcttgcgccgtgtggatacagccctgaagaatatcggcatcaatgagcgccttccctacaatgtttctctcattcggttctcttcttggatgggtggtgaccgcgatggaaatccaagagttaccccggaggtgacaagagatgtatgcttgctggccagaatgatggctgcaaacttgtacatcgatcagattgaagagctgatgtttgagctctctatgtggcgctgcaacgatgagcttcgtgttcgtgccgaagagctccacagttcgtctggttccaaagttaccaagtattacatagaattctggaagcaaattcctccaaacgagccctaccgggtgatactaggccatgtaagggacaagctgtacaacacacgcgagcgtgctcgccatctgctggcttctggagtttctgaaatttcagcggaatcgtcatttaccagtatcgaagagttccttgagccacttgagctgtgctacaaatcactgtgtgactgcggcgacaaggccatcgcggacgggagcctcctggacctcctgcgccaggtgttcacgttcgggctctccctggtgaagctggacatccggcaggagtcggagcggcacaccgacgtgatcgacgccatcaccacgcacctcggcatcgggtcgtaccgcgagtggcccgaggacaagaggcaggagtggctgctgtcggagctgcgaggcaagcgcccgctgctgcccccggaccttccccagaccgacgagatcgccgacgtcatcggcgcgttccacgtcctcgcggagctcccgcccgacagcttcggcccctacatcatctccatggcgacggccccctcggacgtgctcgccgtggagctcctgcagcgcgagtgcggcgtgcgccagccgctgcccgtggtgccgctgttcgagaggctggccgacctgcagtcggcgcccgcgtccgtggagcgcctcttctcggtggactggtacatggaccggatcaagggcaagcagcaggtcatggtcggctactccgactccggcaaggacgccggccgcctgtccgcggcgtggcagctgtacagggcgcaggaggagatggcgcaggtggccaagcgctacggcgtcaagctcaccttgttccacggccgcggaggcaccgtgggcaggggtggcgggcccacgcaccttgccatcctgtcccagccgccggacaccatcaacgggtccatccgtgtgacggtgcagggcgaggtcatcgagttctgcttcggggaggagcacctgtgcttccagactctgcagcgcttcacggccgccacgctggagcacggcatgcacccgccggtctctcccaagcccgagtggcgcaagctcatggacgagatggcggtcgtggccacggaggagtaccgctccgtcgtcgtcaaggagccgcgcttcgtcgagtacttcagatcggctacaccggagaccgagtacgggaggatgaacatcggcagccggccagccaagaggaggcccggcggcggcatcacgaccctgcgcgccatcccctggatcttctcgtggactcagaccaggttccaccttcccgtgtggctgggagtcggcgccgcctttaagttcgccatcgacaaggacgtcaggaacttccaggtcctcaaagagatgtacaacgagtggccattcttcagggtcaccctggatctgctggagatggttttcgccaagggagaccccggcattgccggcttgtatgacgagctgcttgtggcggaagaactcaagccctttgggaagcagctcagggacaaatacgtggagacacagcagcttctcctccagatcgctgggcacaaggatattcttgaaggcgatccattcctgaagcaggggctggtgctgcgcaacccctacatcaccaccctgaacgtgttccaggcctacacgctgaagcggataagggaccccaacttcaaggtgacgccccagccgccgctgtccaaggagttcgccgacgagaacaagcccgccggactggtcaagctgaacccggcgagcgagtacccgcccggcctggaagacacgctcatcctcaccatgaagggcatcgccgccggcatgcagaacactggctaggcggcttctcttcactcacctgcagagtgcaccgcaataatcagcttccggatggtggcgttttgtcagttttggatggaaatgccgaactggcagcgtctgttttccctatgcatatgtaatttcctgcctctttatattcactcttgttgtcaagtccaagtggaaaatcttggcatattatacatattgtaataataaacatcgtacaatctgcatgctgttttgtaataattaattaatatcccagcccattggatggacttgttt

SEQ ID NO: 952 - DNA, 1281 bp, Zea mays
  Clone ID: 700097321_FLI
gcgtcagtgcagtgcgcgtgtggtcgggtagcgatccgaggagcgcgcagcgatggcggcggcggccgtggcgactgtggcctccccatccctcacctccaggcggctgttcccctccgccggcccgtctcttctccggctcccaaggtcgaccgcgcggctcaggcgcgccctgcggttcgccgctgcgggggatgaagcggacgtgctgcctggcccgggggccgagggggaggccgtggtgcccgggaggctggaggagcagcgggacgagcagctgggcggaagccagctcgacatcggagggctcgccttccagggcgacgtgggcgggggcttcaccggcggcggtgcgggctccggggcctccggcggtggcggcggcaacaagatgctggaccggggcatcaacacggccatcgtgctcggggccagcacctacgctctcaccaagctgctcaccgtcgaccaggactactggcatgggtggacgatcttcgagatcctgcgctatatgccggagcacaactggtccgcatacgaggaggccctcaaagccaacccggttctagccaagatgatgatcagcggtgtcgtctactcccttggtgactggattgcacagtgctacgaaggcaagccgatatttgatttcgaccgtgctaggatgttccggtctggccttgttggtttcacgcttcatgggtcactttcacattactactaccatatatgcgaggcactgttcccattcaaggattggtgggttgtccctgcaaaggttgcattcgatcagaccatctggtctgcgatctggaacagtatctactttgtggtcttgggtttccttcggttggaatcacctaccactatctacaacgagctcaagtccacattctggcccatgcttaccgctggatggaagttgtggccttttgcgcacttagttacatatggtgtggttcctgttgagcaaagacttctatgggtcgactgtgtggagcttgtctgggtcacaatactgtcgacttattcaaacgaaaagtcagaggcaaggaattctgatagtacctccacaccagcggcttcaaaggacaactccacatagcaaccccaaagatcttggaaagttgcttcgcccttccctcacttcaggggttatgtaaattgtacagttagctgcagcaactatgcaggtgtaacctttttttttgtagctatatattcatgaaacatgaactgtgcagcatgtgctatagaataccatgaagaaattagcgt

SEQ ID NO: 953 - DNA, 854 bp, Zea mays
  Clone ID: 700097324_FLI
ggcgtatcaggctatcagctaacagatcggtgacggagttgcaccggtcataccaacataccactgcttgtgctagtttagattgctgcttgcttggatcggaagatactttgtggtttgtacgcttctagtaagcgtcaggcgtacgcagggttgatcctttgcttaccagaagatgcagttgaaggggggattttggatgcaacggagtttggaaacttcttgcgtggatacgcatggactgctcgagagctcattcgtcttgcagtagcgggcaggcaagtcgcatggaatggtggcggcagttgtcgggcggcagcttagctgcctaggttattagtagatctataggagttcgccggtggggttagcagcggctctagaccgtgtcttcttcctccgggccgatgatgtgcccatgggaggcgccgccggttctccttcccgagccagccgtcgacgtgcttgacggggtcggatttctctatgcccggctcggcgaggtcacccgaaccattcatcttcctaacgcacccctggttgcgggatgttgcccttggtgactgctaaaagtgtaacggccattactggcccctcctcatcggtgcagatttgagttatgtttcctccggtcatgtctggcgatggtggattggattggagatgaagctctgcctgttgggagccatgtttttttatcgtacattatgtgtgtaccagtgttttccattgtagattttgtgtgtaccaggttcctgttatgtaatatgcatgctattcttgatctaatataagtcacctcatctaaaaaaaaggaagaaaaatcacaaatttagatgaggttttttctttcc

SEQ ID NO: 954 - DNA, 1470 bp, Zea mays
  Clone ID: 700097332_FLI
ttcagctacaaattgtctcgtgggctacgggctacattccatctagccagcccaatccacatcaccagcccacctcgtcgaactcgtcgtcttccgtccatccatcgtcgtcggcggcggcggagagagagcagatgacgtcctcggggacggtcgcgcagcagctgccgcggacggaggcgcggtcgctgtcgggtcacgagggagcggtgttggccgtgcggttcaaccgggacggcaattactgcctgagttgcggcaaggaccgcactctccgcctctggaatcctcacacaggcgcccaggtcaagacctacaagtcccacgcccgcgaggtccgcgatgtgcactcttcctcggataacgccaaactggtgtcctgcggtgccgacagacaaatcttctattgggacgttgcctcgggccgcgtcatccgcaagttccgcggccacaacagcgaggtcaattcagtgaagtttaatgagtacaatgctgttgtagtctcagctggttatgaccgtacggtgcgtgcatttgactgcaggtctcaaaacaacgaccctattcagacaattgatacttttcaagatagtgtaatgtcagttaacctaacaaagacagaaataattgctggcagtgttgatggtactgtccgggcatttgacattcgcatgggtagggagactgttgataatctagggcatcctgtgaactgtgtatcattatcaaatgacaacaattgccttttagctaactgtttagattctactgtgcggcttctagacaagtcatctggagaactgttacaggagtataagggacatacgtgcaagtccttcaagatggattcctgtctgacgaatgatgatgcatttgttgttggcgggtctgaggatggttatattttcttctgggagttggtggatgcacctgttgttgcaagattcagggcacatagttctgtggtaactagcatcagttaccacccaacaaaggcctgcatgttgacgtcttctgtggatggctctattcgtgtttggacctgaagactcttgaatggttgatgtgctattcgtactgttcctccaaatcatccagttatctagcagcaaggattcgacagtatgaaagatgaacgcatgtctaacctaatgggattcatacacgccttgctgcagagagaagaaaatgcgctgctgttgggctgtgtagcacacagctctgaggccaaaaccttttgaagccggtattctgtcatctatgaagtttgtgagccttttagatgattttggattgtacctgaagacaacttgtgagttgcatgaaaagtaacatttgttacgaagtttcttactgcaagtgtcttgtctccatgttactgaagacaacttatgggggttgagaaatgtatcttctagttcctttttttttgttttgatttggaatggaatgactaatgagttcattgtc

SEQ ID NO: 955 - DNA, 1903 bp, Zea mays
  Clone ID: 700097336_FLI
gttcgtgtgaagccattgagttcagaagttgaagttgatttgagtatcaatacacagagtgaaaattatgaccaagaggcacctttgaggctgacaaaacagacactatcgtcatccaaggcagttgatgttactaattacgcggttggagttcttaatggcaacttggtccatttgaatcatattgatgcagtggtgcaaatgcgaccatcaatgtcacatattatttctggccgagcacatactaggcaggcttcacaaccccgggaaatgaatgggggagctagtacctcgatggattcatctcataagggaaatgagcgccctgaagattccaaggaccgagcagaagattctgagccatggatttctctcatctaccaaccagcaggaagcaatactgcaactaagtaccatgataagatgatagcaaatgagggtgtgcctattgatttcacaatgagctcctcttgttatttgacgtccttgtgtcctggggcctctactagcagaaagcgtatcaacaaattccaagcaataagggagatgcttttgctaccactggaagaacgcctcaaaaaatggtttactgaggtttcaggagtaaatcgatttgatgctctgaaggaccttgctccaacctgttcagaggttgaaattttgaaaatgcttccagagtgtgcatatttggtgcgtggattgtgggtctgcaaaagttctttgttgtttgatggtgtatattctggtcccatggatagaattcttcttgagtttacaaaaagggatcccgtcccatcaaatattctggaaccatttatcaatctgattggcaatcgtgctatgagagactggatactgtctccattgtgtaaaagacgtcaaattctgaaggaccataaatttatatcggcagatttgtctttcataaaacgctatccgcatatagtcaatgaacaagagtgtgcttggtctgctcgggagaccactctccgtgagtccctagaaatgagcactactttggcaaagaagaccatgaattcaaccagacctaatgttgcttctaaagggcctcattcaaatatgagcaagggcagggatggcccatctcaaggaagtgatgaccttgcgcgatctgttttgggcactgttttcactgccaataaagttcgcagcatgcaggcagttgttagagacttgcgccagttggctgcaaaatatgcttccaatagaaaggatggatccaaactgcaagctctgtgcaatgctgcaaaaaattgtgcatcgctgcctcatgatgagctgaatcgaaaaatacatctagttgctgttcctgttcatagtgtttttgttgcaaagcatgaggataagcgagctctacgaaacatatttattttgctcttccgtcacaaagaacccaatggaacattgactaagcaggaagttgttgctgctgctgcgaaacatataaaaagagagattactgacagagagtaccatcaggttgtgacggagatctgcatttctacagaagatgggcacttgctgttgaaaaatggtgatgagccctgagttcgctatgatatgccctgtgaaggtccaccaaggtcgaatcgtctctgatgcgtagaatagggtcattcggagtttgggatttggccggtgagaatgagtattgatcaggcagttcaagatagctacagcaaactgttctaggtggctttgtcagccatttttggctcagcagtttttgctgggtgctaattgagcggtgtttttcggttagtcgtctttatttgtgtccattgaatccttgctggtctagcttggcgtaattcagttagggatgttattttgtcttttaagtgctgatattgtctgccttcagtaaagtaaagtggaaacc

SEQ ID NO: 956 - DNA, 1145 bp, Zea mays
  Clone ID: 700097342_FLI
tcccctcccctcccctttcccgcggactgatcccaccaattctgcacccgcgcagttcctgattcgattggcaagcgcaattggccgctcctgaccagacgccggatagggctggatttgattggattggatccccaattgtgtttgccacgtccgtgcgttcgggcgggcgggggagttactttagggtttcggcgggtgcggtcgccgtgtaggcggtagggttttgccatggcggagaagggctgcctcaagcggctccagaaggagtaccacgccctctgcaaggagccgcctccgcagatcgttgctcgcccgctgcccaacgacatactggagtggcactatgtactggaaggaagtaaaggcacaccctttgaaggtggatattattatgggaagctcaagtttccaccggattatccttttaaacctccaagcatcagcatgacaacccctagcggcagatttgcgccacataaaagaatatgcttgtcaatgagtgactttcatcctgaatcttggaatccaatgtggtctgttgcaagcattctcactgggcttctgtctttcatgatggacgatgcactgacaactggaagcatcaagacgtcagatgcagaaaagagacgtttagcaaaagcttcccttgcttacaattgtgagagcaaaaactgtccgcacttcaggaaacttttcccagagtatgttgagaagtacaatcaacagcaacaattggagaatactgctgcagagccggtgccacaggagaatcctgcacctgttccatcccttgctgtccagcaagctccggtcgtcgccaatagggcgcaaccactggctgaggtacgccgtgacaagaaccagaagaaggcggtgcccttctggatggtgctggtcatgttttcagtttttggtgccgtgatggcgttgcccctaatgcaactttgacaacaataaagaccatgaggacgtgtgataccggggcagtaattttgtatagttttccattggttcgtgagtgtaacaaagttgccccctagacttacctaccaccttggagtcatattgatgaacttgtgatggtaacatgtgtagaaccgttatctatcttgactagtagcgtcagaagctcgttcgtattt

SEQ ID NO: 957 - DNA, 1094 bp, Zea mays
  Clone ID: 700097352_FLI
ggcagcgacacgatcgcgagcgcacgcacgtaagcacgttgtcggaagctcaagttagaagaagcaccagtgcctgatcgatggcggcccaggctctcctctccggccggcagctgctgggccgccccgtgcagtcggccgtctctaggtcgtcggcgaggaaggcgcccttcgtcgtcagggccagctccagccctccagccaagcaaggtgccgacaggcagctgtggttcgcgtccaagcagtccctctcctacctcgatggcacgctgcccggcgactatggcttcgacccgctgggcctctcggacccggagggcaccgggggcttcatcgagcccaagtggctggcctacggcgaggtgatcaacggccgctacgccatgctgggcgcggtgggcgccatcgccccggagatcttcggcaagatgggcatcatcccgccggagaccgcgctgccgtggttcaagacgggcgtcatcccgcccgcgggcacctacaactactgggccgactcctacacgctcttcgtcttcaacatggcgctcatgggcttcgccgagcaccgccgcctccaggactggtacaacccgggctccatgggcaagcagtacttcctcggcctcgagaagttcctcgccggctccggcgacccgtcctaccccggcgggcccctcttcaacccgctcggcttcggcaagaccgagaaggagatgaatgagctcaagctcaaggagatcaagaacggcaggctcgccatgctcgccatcctcggttacttcatccaggggctcgtcaccggcgttggcccgttccagaacctgctcgaccacctcgccgaccccgtcaacaacaacgtgctcaccagcctcaagttccactagaacgttggtgcatcagcatacctgctgccgccgccgccagttgtttgctgtggaaagctagatgcatgcgtgttgtaaaggaacctgaagcgttgcatcggtcatgattcatgcatggccagcctgctgcctgtaacaacaaactagtattgatcttattgagaccggaaactgtattgcacatggtaaatcaatgtacaattcctccct

SEQ ID NO: 958 - DNA, 272 bp, Zea mays
  Clone ID: 700097360_FLI
ctgatgagggcaaagaagccccgaaaggtgaggctggtgacggacagtaatcttgggagagcgcatattgttcgagcccattgttttagatgctctatgctgtcgaagctgaagctgtgccgtgctattattgtagctgatttcctgttccctcacttctttttttatattagtaggctggtagtgttcgaattagttccccattgctttgtgttgccgctagttggcattaagtccgtgtggactggtattattcactggatttgagaagc

SEQ ID NO: 959 - DNA, 1360 bp, Zea mays
  Clone ID: 700097370_FLI
gattgttgcagcagaggattcactgggcagtgctgccacattcgttgtgtattcttatgggtcggcgaaggagtctctaccaccaaatgttagagatctgttgagctcgtctgaggagaaagctagtctagtcttgagaccaatcggaaatgctctgcaacaggtctatgtagttgttgaaggtgttgagaagaatgttggtttggatccaagtgatcctattgttcaattggcagttgtgcttggaggttcagtgacaatagggacaacgtactggctcttcacatacagtggctattctggagacttgtcacctgaatcagcgtttgacttattgaaaaacgatgacaaagccgtacttattgatgttcggcctgaggatttgagggaaaaagatggtgttcctgatctacgcctcagggctaggtctaaatatgcaagtgtagcttcgcctgagatcaaagatccagtaaagagtatgctcaaagatgaaagagagtttgatgatgctttactggcagttgtcatccgaaacttgaaattggtgaagggcgattcaaaagtcatagttatggattctaatggagctcgatcaaaagccattgctaggttactgaagaagctcggtgtgcagcgaccttaccttgttaaaggtggtttccaagcatggtcaaagaaccttcgtgtcaaagaactgaaacctgagactgcattaacgtcaataaatgaggatgttgaggaaatcctagaacaaataaagcccactccaactcttgtgtttggatctcttctgggcctctcggcactttcctatgctttacttgaatgggagatgactttgcaatacatcgctgttttaagcgttgggctgactatctacttgcgattctctacatatgaggactccgaggatttggagaaagacctaaagctgttgctgtctccagtaagagtaggcgcagacgccttgtcatgggcagctaagaagatagagccaaacaaggtgggcctgccaacgtctccttccacgacggcggtgaaagaccgggttcttcaggccgcggcgaagcacgagtcgcagccatcggatgccgacgagtcgtcggtccaaacagccgaggcatgacacgcgccgaaagcttgggagccagtcgagcggtcccgccgaatcctcaataagagcactcggtgggcgctccctggtaatttgtgaagtccatgtcgtttatgatgtaaagcactgtaaagcggttgtaaattaattgcgtgagcagcatctgtaagttgacatcaacttggttggttgtgtgtgtgtagattatagagaaagaggtgtcaatgtaacgttaattcctgagcc

SEQ ID NO: 960 - DNA, 1018 bp, Zea mays
  Clone ID: 700097371_FLI
ctctgatggaagcttacagccgcgcagggctgccgcaaggggcgtcggagatcttctctttgatggaacacatggggtgcgagcctgatagagcctcttacaacatactggtggatgctttcggacgagctgggcttcaccaagcggaagcagcgttccaagagctgaagcagcagggcatgcggccgacgatgaagtcgcacatgctgctcctgtcggcgcacgccaggtccggcaacgtggcgaggtgcgaggaggtgatggcgcagctgcacaagtccgggctgcgcccggacaccttcgccctcaacgccatgctcaacgcgtacggccgggccgggcggctggacgacatggagcggctcttcgcggccatggagcgcggcgacggcgcgagcgccggcgccccggacaccagcacgtacaacgtgctggtgaacgcgtacgggcgcgcggggtatctggaccggatggaggcggcgttccgctccctggcggcgcggggcctcgccgccgacgtggtgacgtggacgtcccgcatcggcgcgtacgccaggaagaaggagtacgggcagtgcctgcgggtcttcgaggagatggtggacgccgggtgctacccagacgccggcaccgccaaggtgctgctcgccgcgtgctccgacgagcgtcaggtggagcaggtcacggccattgtcaggtccatgcacaaggacgccaagacgctctttgcattgtgaaatccgcgcaggctaaattccgatcctgctgcgtgatcacatacgaaccttgacgagagtcacctagcttgcatactcgttaacaagtcacaaggccccgtttggttagatatagaataatctagtttttagtcccgtttagtacttagtacttaattgtatttagtctctagcccctcacatgggtgctaaaggggactaaaggatatcatttactctaattaccattgcacggagaatctgcaccgtatacatgcaataaaaagagaggcatttcagtc

SEQ ID NO: 961 - DNA, 1333 bp, Zea mays
  Clone ID: 700097373_FLI
cccactcccacgtctgtccgcgcgcggtgtggtcacactactacggcaccgcccaacgccatacttgccttctccatcctcctgcggtcccgccgtcctctcttctagtccaggccacttctcatggctgtgcacacgcagtacttgtcccatgccttcccctacgaccacagcaccatcaggccggcgctggataacgcaaggaacgcgtccgttttcatcagctcggcggtggtcacccgctcgcggccaaactcagtgctcagcgacctcaccggcaacaacaacaacagcaacggttgcttcttaccgaggaagcgcgcgcgggttggcgacttggccggcgcgaccttgaacttggacatgcaaggtcaacgcgctctgctgccgctagtgtcggcgccggtgccgctgccgctgcccgcgggggacgtgcagaacaggttgctctgctctgcctccgcgtctaccagtgggcacccgacgcccagcgtcgcgccggtgtcgcagggcctcctgtcgcacctctaccgccacggcgtcgagattgacgcgctagtccgcatcgagaaggagaggctgcgagcggggctgcaggaggcgcgacgccggcacttccggacggtggtgctggcggcggaacgtgcggcggctcggcgcctgcgggcagccgaggccgaactggagcgcgccatgctgcgcaacgtggcgctcgaggagacgctccggcacactggagccgagggccaggcgtggcaggacatcgctaggcgccacgagggtgtcgcggcgggcctacgcgccacgctggacaacctcacgcagatgcagtcgccatgcgccggcgcagaggctgcaggcgcggctgccgacggcgacgccgaggacgcacagtcgtgctgcttcgagttggagcaggaacagggcgagggcgccgaggcgtacggcgggcgggcgagggcgtgcaggtcgtgcggccaggcagaggcatgcgtgctgctcctgccatgccggcacctatgcctgtgccgcgggtgcgaggcgggcgtctgggcgtgccccgtgtgcgcggtcaccaagaatgcctcgctccacgtcctcctgaactgacatgacaacatgtggcgtggcaatgccaacacatgagtaatgggttcgaccgacccatggaactcctgtcttaagcctatctccagcacatcagtttatccatactaatacatatattttgatatttaaactacactatacgaatagtacatcgtatagtacaatctactgtgcagaacagtgcaaaataatacttttatgtaaactttgaaaaaactgttgc

SEQ ID NO: 962 - DNA, 1583 bp, Zea mays
  Clone ID: 700097375_FLI
tccgatcccacccggcagcggcgctgcgcaatggccacccacgcagctctcgccgcctcccgccggcgtcgtccaggcacggcgtgcagaggctggacttcgccgacttctccgggctcaggccggggtcgtgctccgtgagcgctgccgcgcgggaggcgtccttctccgacgtccttggcgcgcagctcgtcgccaaggccaccggggagaacgccgtgagggcgcccgcagaggcgaagctgaaggtggcgatcaacggcttcggccgcatcggccggaacttcctccggtgctggcacggccgcgaggactcgccgatcgacgtcgtcgtcgtgaacgacagcggaggcgtcaggaacgcgtcccacctcctcaagtacgactcgatgctcggcaccttcaaggccgacgtcaagatcgtggacgacactaccatcagcgtcgacggcaagcccatcacggtcgtctccagcagggacccgctcaagctcccatggggtgagctcggcattgacatcgtcatcgagggcaccggagtcttcgtcgacggccccggcgccggcaagcacatccaggccggcgcgaagaaggtgatcatcacggctcccgccaagggcgccgacatcccgacctatgtcgtcggcgtcaacgagggcgactacgaccacagcgtcgcggacatcatcagcaacgcgtcctgcacgaccaactgcctcgcgccattcgtcaagatcttggacgaggagttcggaattgtcaaggggaccatgacgacgacgcactcgtacaccggcgaccagaggctgctggacgcgtcccaccgcgacctccggcgggcccgcgcggcggcgctgaacatcgtgccgacgagcacgggcgccgccaaggccgtggcgctggtgctgccgcagctgaaggggaagctgaacggcatcgcgctgcgggtgccgaccccgaacgtgtccgtggtggacctggtgatcaacaccgtgaagactggcatcacggccgacgacgtgaacgcggcgttccgcaaggccgccgccggcccgctgcagggcatcctggatgtctgcgacgtgccgctcgtgtccgtcgacttcaggtgctccgacgtgtcctgcaccatcgacgcgtcgctcagcatggtcatgggcgacgacatggtcaaggtcgtcgcctggtacgacaacgagtgggggtacagccaacgcgtggttgatctggcgcacctggtggcggccaagtggcccggcgcggcggcggccggcagcggcgaccctctggaggacttctgcaaggacaaccccgagaccgacgagtgcaaggtgtacgaagcatgaggccacggttctttccacgacggaacgtacagcacgggcgcgagggttctttccatagagaataatatacagattattcgcccaaagagacgtatgttatatatatatgagttgtatgcagtcaccgaactggtacaggtttccgctttccatttcctgttgggagtcttgtagtgtaatcctggggtgtgtatttgtttcatcaatcatgcctgccgattggaatctcgtttcacc

SEQ ID NO: 963 - DNA, 898 bp, Zea mays
  Clone ID: 700097379_FLI
ccccaagaagcgcaaggccacggcgcgctggaccagccagcaggtgcgcgtcagcgccgacgacggccacagctggcgcaagtacggccagaaggacatcctcggcgccaggcacccgcgggcctactaccgctgcacgcaccgcaactcgcagaactgcctggccaccaagcaggtgcagcgcgccgacgaccaccccgcgctcttcgacgtcgtctaccacggcgagcacacctgcaggcccgccgccgccggcggcgggtccaagagggcgcagcagcacaacccgcacgcgcaggccgcgctgcagggcctcgccgcgcggctcacggtggccaccaccaccacggacaacgccgccgggctcccgccgatgacgcccgagagctgccccgtgcggggcgcctcgtccccgtggtccctcgcgtcgcccgtcggctccgacttcaacggctgcctgcaccagggcatctcgccttgcccggtgcccgggtacagggactggacctcggacgtggacctccaggaggtggtgtcatcggcgttcgccgccgtctcgtcggttgcgccccttccggtgcctgacgacgaattcatgcctctcgaatgcgtcgaatacgtattcgaccagaacttcgacattgacaccgcaatgccaagcctctactatccatgagaagagcaactgatcggcagcactgtccacttctccaagacaggagggaggagcagagctgcagcagaggagcctattcctgagaactgtgcagtagcagaagccagcaaagcttttaggatacattttaatgtctcattatcttttctttctttctttctttccctttcatgggttgggttttgttgatttcactcagcaagagaaaagttaatttttact

SEQ ID NO: 964 - DNA, 1463 bp, Zea mays
  Clone ID: 700097461_FLI
tccaaagagctgcatagcagcgcttctcccagccacgtcttcatcacacacggtcgcggcgcgaagcaatggcgaccacggcgccgctgctctcgccccagcgcgcttgccctacccatctccggcgccgcctctcgcccctacatctcgtattccccctcgacgcgtcagcgaggcggctgcgccttcgccgggcgccgccaccttgttcggccaagttcggcaagttcgacgcctccgacgccccggcggaggccgaggaggcggggggcgcgacggatggtgggctggcgcagcccgtggaggaggacgacagttgcttgccatcggatttggagggcgcgattcggcagtcagggaaggcgagcgcagatttcgtaaactccggaggcatgcgagctatcgcagaactgctgatccctcagttggaattcctcaacgaggaaggagcacaggctgaactctgggcgttgtcaaagattttcctggacacacttgtacaagagacaggacagaaagttactgccattttccctgacgctggagcagctgcccttctcaagcatcaatggaaagatgcacaattcaagtgtgccagtttaggtgaccggaagccagttggtcctgaagatgaggtcgcagttatgattatccctgatcatcagatgctggaagctgttgaacgcatcacatctcaactctctgatgatcctataagacctcttgtcatgtggaacccacggcttgttagtggagatgttggagtaggctttaatgtacggaatctgcggagaaatttcttaagcacttttaccactgtttactcgatgaggccattgccaactggtgcagtctttagatgctttccagggcagtggaaagtgttttatgatgatccaaataggccaaatcggtatttgcttgcccgagaactcacaagtaggcccgatgcaactgatattgagagaatatttggtggtgccgatgagcaatctgaagaggcaccatcgttgatgaacaatgtcatgggcgtgttcagttccgtgagtcggtttatgagggtcatctccaagtgagagtcgaagcaaacattgttcacacttgaagccatcaacaaccatcatgatgcttgagttatacaagaagattattttagtgcatccatgttgttttcagtctgtaattactccatggtactgctattcggaacagtatagtttggcgttccggcacatgccaccaaatgtgtgcacataccataccgtggattcctggagtcatctgctgatcctacaccgtgaggtcaattatgtaagtgtgacttagaaaaaaaatgtagatagatcctcattctggaaaaagccgggtatttgattgtaattcaatactgtgcttgatatatcacaatcagctcgcattttgtaattcaatactggacgaatataaattcaatcctttgtttt

SEQ ID NO: 965 - DNA, 911 bp, Zea mays
  Clone ID: 700097592_FLI
gataggtactagaggactatagctactagtaggactaggagaggatccgagggagagagagtaagcaggccaagatgatgcgcgcgaaccgggagcagagagtggccttctcgtcgacgaaggaggccgccgcggtgcccaaggaggaggtgtgggaggtccggcccggcgggatgctggtgcagaagcggagccccgacgcggacccgccccccggcggcgcgcccgtgcccaccatccgcgtcaaggtcaagttcaacggcgtctaccacgagatctacatcaactcccaggcatccttcggtaataatgcctcctcatccgtcctccgactgtgcatgtgttgtagctgtttctttctactgagtgaattcgagccggtgaatgcgtgttcctgcaggcgagctcaagaagctgctgtcggagaagacgggcctgcacccggacgaccagaaggtggtgtacaaggacaaggagagggactccaaggcgttcctggacatggccggcgtcaaggaccgctccaagatggtcatgctcgaggaccccgccgccaaggccaagcgcctcctcgaggagcgccggaccggcaaggccgagcgcgccgccaaggccatcgcccgcgccgccctcgacgtcgacaagctcgcaaccaaggtgtcggcgctggagacgatcgtgagcaagggcggcaaggtcgtggacgcggacgtggtgacgctgaccgaggcgctgatgaacgagctggtgaagctggactccgtcgccgccgaaggggaggtgaaggcggcgcggcgggcgcaggagaagcgggtgcagaagtacgtggagacgctggacgccatccgcgccaagaacaaggcggcggcggcggcggcgccggccaaggcccgcagcggcagcaacaaggc

SEQ ID NO: 966 - DNA, 593 bp, Zea mays
  Clone ID: 700097712_FLI
gctccccaacgaagtgcgagcgacccacgtccacacgacacgaaccaccaccaccaaccagcagccgcaccacgcacccagcgcaaagcgatggcgtcgctcaccatgatggcgtccttcgccgccgtggcggtggccgcgccctcgcgccgcggcaccttcgccgtggtcaggtccgccaaggtcgaccgctgccaggagcccgccacgctagcagcaaccgaggccaggcccgccgccgacggacgccgcgccgtcatgctcgcggctgctgcggcggccgtggcagccatcggcggcgccggcgccgccatggcgggccccaagaacgggacccccgaggcgaagaagaagtacgcggccatctgcgtcaccatgcccaccgccaaggtctgccacaactgagcacgcccgcgttgcatgcagctgcagggccggggggtggtatataattaatgtacgtgccacggtgttgttgtccctattgttggttcgagctttagatgcatgcctgacgtgaggccgcttaattgctttctgacggcctcggagctgtaagaatatcaagtgcactgcaaaactgaattcggttg

SEQ ID NO: 967 - DNA, 1149 bp, Zea mays
  Clone ID: 700097731_FLI
tacgtggaggagcagccatggcttcatcggtggccgccgcggcgagcacattcctgggcacccgcctggcggacccggcgccacagaacgggcgcatcgtggcccggttcgggttcgggttgggcggcaaggcgaagcctgctccgaagaaggtggcgaagacatcgacctcctctgaccggccgctgtggttccccggcgccgtggcgcccgactacctggacggctcgctggtcggcgactacgggttcgacccgttcggtctcgggaagcccgtggagtacctgcagttcgagttggactcgctggaccagaacctggccaagaatgaggccggcggcatcatcggcacccggttcgagtcctccgaagtcaagtccaccccgttgcagccctacagcgaggtgttcggcctccagcggttccgcgagtgcgagctcatccacggccgctgggccatgctcgccaccctcggcgccctctccgtcgagtggctcaccggcgtcacctggcaggacgccggcaaggtggagctggtggacgggtcctcctacctgggccagccgctgccgttctccatctcgacgctcatctggatcgaggtgctcgtgatcggctacatcgagttccagcgcaacgccgagctcgacccggagaagaggctgtaccccggcggctcctacttcgacccgctcggcctggcggccgaccctgagaagaaggagcggctgcagctggcggagatcaagcacgcgcgcctcgccatggtcgccttcctcggcttcgccgtgcaggccgccgccaccggcaaggggccgctcaacaactgggccacccacctgagcgacccgctccacactaccatcttcgacacgttcggagggtcctcttaagcccgccattgctccgccccgtccatcgaccggaacgtgttcttggattaattaactacgatctctatgagcctggggatggatcaacccgtcgtgcgtggtctcgttttgtgatgagtgggagagagaggatgacaagatcgatcctttgttaatggagatctcgttaattaggagagctaccgctgggacttggtggtttgtaatatatgatccaaccagtgatgaatcaatgcattcacttgtgtacacatat

SEQ ID NO: 968 - DNA, 2105 bp, Zea mays
  Clone ID: 700097743_FLI
tctggaagcaaattcctccaaacgagccctaccgggtgatactaggccatgtaagggacaagctgtacaacacacgcgagcgtgctcgccatctgctggcatctggagtttctgaaatttcagcggaatcgtcatttaccagtatcgaagagttccttgagccacttgagctgtgctacaaatcactgtgtgactgcggcgacaaggccatcgcggacgggagcctcctggacctcctgcgccaggtgttcacgttcgggctctccctggtgaagctggacatccggcaggagtcggagcggcacaccgacgtgatcgacgccatcaccacgcacctcggcatcgggtcgtaccgcgagtggtccgaggacaagaggcaggagtggctgctgtcggagctgcgaggcaagcgcccgctgctgcccccggaccttccccagaccgacgagatcgccgacgtcatcggcgcgttccacgtcctcgcggagctcccgcccgacagcttcggcccctacatcatctccatggcgacggccccctcggacgtgctcgccgtagagctcctgcagcgcgagtgcggcgtgcgccagccgctgcccgtggtgccgctgttcgagaggctggccgacctgcagtcggcgcccgcgtccgtggagcgcctcttctcggtggactggtacatggaccggatcaagggcaagcagcaggtcatggtcggctactccgactccggcaaggacgccggccgcctgtccgcggcgtggcagctgtacagggcgcaggaggagatggcgcaggtggccaagcgctacggcgtcaagctcaccttgttccacggccgcggaggcaccgtgggcaggggtggcgggcccacgcaccttgccatcctgtcccagccgccggacaccatcaacgggtccatccgtgtgacggtgcagggcgaggtcatcgagttctgcttcggggaggagcacctgtgcttccagactctgcagcgcttcacggccgccacgctggagcacggcatgcacccgccggtctctcccaagcccgagtggcgcaagctcatggacgagatggcggtcgtggccacggaggagtaccgctcggtcgtcgtcaaggagccgcgcttcgtcgagtacttcagatcggctacaccggagaccgagtacgggaggatgaacatcggcagccggccagccaagaggaggcccggcggcggcatcacgaccctgcgcgccatcccctggatcttctcgtggactcagaccaggttccaccttcccgtgtggctgggagtcggcgccgccttcaagttcgccatcgacaaggacgtcaggaacttccaggtcctcaaagagatgtacaacgagtggccattcttcagggtcaccctggacctgctggagatggttttcgccaagggagaccccggcattcccggcttgtatgacgagctgcttgtggcggaagaactcaagccctttgggaagcagctcagggacaaatacgtggagacacagcagcttctcctccagatcgctgggcacaaggatattcttgaaggcgatccattcctgaagcaggggctggtgctgcgcaacccctacatcaccaccctgaacgtgttccaggcctacacgctgaagcggataagggaccccaacttcaaggtgacgccccagccgccgctgtccaaggagttcgccgacgagaacaagcccgccggactggtcaagctgaacccggcgagcgagtacccgcccggcctggaagacacgctcatcctcaccatgaagggcatcgccgccggcatgcagaacactggctaggcggcttctcttcactcacctgcagagtgcaccgcaataatcagcttccggatggtggcgttttgtcagttttggatggaaatgccgaactggcagcgtctgttttccctatgcatatgtaatttcctgcctctttatattcactcttgttgtcaagtccaagtggaaaatcttggcatattatacatattgtaataataagcatcgtacaatctgcatgctgttttgtaataattaattaatatcccagcccattggatggacttgtttacc

SEQ ID NO: 969 - DNA, 2427 bp, Zea mays
  Clone ID: 700097775_FLI
aagttgggcttcgttctcgagtactcttcgttctcaggcggcccccggctgcttctgctggtcgccgcccagctccagttattagagaaataagggccagcctggttgcccgaggctgacccagcacctgcgatggaggagaaggctgtcacaaatggagcggcagctgctgatgttgctgctcctgataataaggataacaccaaggaagaggttagcaagagcaaggagccagtagcgaataaggatgctgaagagcagaacaaaggctcggaaaatggtgctgagggccattcaggtggagatgtcaatatggcagaggccgagatcactgaggaaggtggtggtggtgatgctggtgcggcaaagcaggtggattctggagatgtcaaaacggatgccgatacaaaggaagatgccaatgcgagaacagaagaaggtgaagatgccaagatgactgaggctgacgtaggaagtacagaggtcaaagataaagaagagaaggaagatgaagttgagaacacaaatgagcaggatgaatcgaaggagcaagagaaaggtgcttcggctgagcaagaggaaaacgaaggaaaagaaacggatgctgatgagaaccaagaagaagaggaagcagaagaaaagggttctgctgataagaaagatgaagctgaagctgaaggtgacaagaagacggaagagaataaggagactccgaagaacaagaaagcaaggagtgccagggatagaagccagggaaaagataaggagcaggatggatccaaatccaaggaagccaaaagtttgctgaacactccaagcccatatggtaccaatcgccctcaacgtgagaggaaaatagtggagaggttggttgaggtgattgataaagagccaaacaagaatttcgtggttgagaagggacaggggactcctctgaaggatataccaagtgtggcacacagaatatcaaggaagaagccttctgatcttaaatttcttcacagtattctttttgggaggaaaggcaaggctgtcgattttaaaggacatatactccaattctctggatttgtttggcatgagagtgatgaaaagcagagagccaaggcaaaagagaagcttgataagtgtgtaaaagacactctgctggacctctgttggacccttggtattccaactccgaaagcaaacattagaaaggaagatattgtgtcaaagctgttggacttcattgctgaacctcactctgcagctgaatcttggggctctgatgatcagggatcaaattctaaaaaacgcaagagaggaggtgaaagtgcaagtaagacgcctgatggcacacctagtaggtcgaggaagaaatttgtcgatgacggtacttctagtaaaaggcagaataaagcgctccagtatgatactgaggaggatgaatccatgaagtctgacagtgaggaaaacatagatgaagattcagatgaagctgctgacaaacaggaagttgactatggatctgggaaagaaaaggcagggaagaagttatcggaggtaaaagaatcttcaggtaaaaagaagtcaaacacagggagtggccacaaatcaggtcctccaaataaaattataaaaaatctggtaaaaaaagtatcatccaagattcacgaggaaaaagaaagccccaatggtagtgccaaggttttttcgagaaagaagaaacccacagcagaaaaggagatcaaagagaaaaagtcgtcaggaaaaaaggtgacaaaaggtaaaggagaatcagctgaagcagttcttcccagcaaggacgatctgaggaagaccattactgaaatcctcaagaaagttgacttcaacacggcaactttcagtgacattctgaagaagctcgacaatcactacaaaatggatctgaccccaaagaaagaagccatcaaagttatgatccaagacgagttgaccaagctatcagaggaggatgaagaaggagagggagacgaagacgccgggaagaaacagcagcagcctcaggcgcaggagatcgaggcatgagggatccgcggaaccccgtagctgtagtagccactgttaattatcctgtacttagtgcgtatgtgtcgcatgtacaggcatcctttgttgatttcagccaccaacttgagaacctcaccccctgattgtgtatgctaaaagacatgatgtgtaggcagcctccacaccttttagctgactgatcggagagttactcttaggcaacaacttgtgtttctagatttgcaaatggtgtctgaaagactgaaactctgcattcgctgtggcagggcgtgtacttaattgttcgtgataggtctgaataacacatggatggaccctagttgttcgtgttgccttgagcttttactcgatccgtttcttctgtggactccc

SEQ ID NO: 970 - DNA, 640 bp, Zea mays
  Clone ID: 700097784_FLI
catcagtgttgtcaggtgctgttgcaaatctgagaggttgtggaaaagaatcagctgcaattttgttctgggttcacatttttgctgtgttctccatggcgggatggattatattctatctgagtttgctcttctaagtatgtcacgccctgctaccacaacaatctgcaatttgtgcccgcattccagcctgtcagatgtaactgcattttcttgctagataatgttacttgatctgatttcagtcagctggttcagatgccttactgcgcaggaatatctttgagatcaaatatggtccaaaacgttgaggaagaaaccagtatcatgaactgtacagatatatcgttgcagaggtacaagtgtatctgtacagatatatggatacggtccctcctataatcccatattaccgtggtctcctgctgctacaagccgtgagcgatgggaacactttccctttccctccacgtatcaacaggttcacgcccaaccctagattgggatgctggccttcttagttctccataatattatttcatttgtacttcctgtatattgtaaaccttgagatggctgtgttcaaatagtttcttattgggcgagggctgaagtagtagtatagatgtattatactatt

SEQ ID NO: 971 - DNA, 2203 bp, Zea mays
  Clone ID: 700097822_FLI
gtttgagctctctatgtggcgctgcaacgatgagcttcgcgttcgtgccgaagagctccacagttcgtctggttccaaagttaccaagtattacatagaattctggaagcaaattcctccaaacgagccctaccgggtgatactaggccatgtaagggacaagctgtacaacacacgcgagcgtgctcgccatctgctggcatctggagtttctgaaatttcagcggaatcgtcatttaccagtatcgaagagttccttgagccacttgagctgtgctacaaatcactgtgtgactgcggcgacaaggccatcgcggacgggagcctcctggacctcctgcgccaggtgttcacgttcgggctctccctggtgaagctggacatccggcaggagtcggagcggcacaccgacgtgatcgacgccatcaccacgcacctcggcatcgggtcgtaccgcgagtggtccgaggacaagaggcaggagtggctgctgtcggagctgcgaggcaagcgcccgctgctgcccccggaccttccccagaccgacgagatcgccgacgtcatcggcgcgttccacgtcctcgcggagctcccgcccgacagcttcggcccctacatcatctccatggcgacggccccctcggacgtgctcgccgtagagctcctgcagcgcgagtgcggcgtgcgccagccgctgcccgtggtgccgctgttcgagaggctggccgacctgcagtcggcgcccgcgtccgtggagcgcctcttctcggtggactggtacatggaccggatcaagggcaagcagcaggtcatggtcggctactccgactccggcaaggacgccggccgcctgtccgcggcgtggcagctgtacagggcgcaggaggagatggcgcaggtggccaagcgctacggcgtcaagctcaccttgttccacggccgcggaggcaccgtgggcaggggtggcgggcccacgcaccttgccatcctgtcccagccgccggacaccatcaacgggtccatccgtgtgacggtgcagggcgaggtcatcgagttctgcttcggggaggagcacctgtgcttccagactctgcagcgcttcacggccgccacgctggagcacggcatgcacccgccggtctctcccaagcccgagtggcgcaagctcatggacgagatggcggtcgtggccacggaggagtaccgctcggtcgtcgtcaaggagccgcgcttcgtcgagtacttcagatcggctacaccggagaccgagtacgggaggatgaacatcggcagccggccagccaagaggaggcccggcggcggcatcacgaccctgcgcgccatcccctggatcttctcgtggactcagaccaggttccaccttcccgtgtggctgggagtcggcgccgccttcaagttcgccatcgacaaggacgtcaggaacttccaggtcctcaaagagatgtacaacgagtggccattcttcagggtcaccctggacctgctggagatggttttcgccaagggagaccccggcattgccggcttgtatgacgagctgcttgtggcggaagaactcaagccctttgggaagcagctcagggacaaatacgtggagacacagcagcttctcctccagatcgctgggcacaaggatattcttgaaggcgatccattcctgaagcaggggctggtgctgcgcaacccctacatcaccaccctgaacgtgttccaggcctacacgctgaagcggataagggaccccaacttcaaggtgacgccccagccgccgctgtccaaggagttcgccgacgagaacaagcccgccggactggtcaagctgaacccggcgagcgagtacccgcccggcctggaagacacgctcatcctcaccatgaagggcatcgccgccggcatgcagaacactggctaggcggcttctcttcactcacctgcagagtgcaccgcaataatcagcttccggatggtggcgttttgtcagttttggatggaaatgccgaactggcagcgtctgttttccctatgcatatgtaatttcctgcctctttatattcactcttgttgtcaagtccaagtggaaaatcttggcatattatacatattgtaataataagcatcgtacaatctgcatgctgttttgtaataattaattaatatcccagcccattggatggacttgttt

SEQ ID NO: 972 - DNA, 1825 bp, Zea mays
  Clone ID: 700097841_FLI
gcctagagtcaaagcaacctcaagaccctcttaccacatcatatacatgtaatggcagttctagtctgactccaagttcgaaggaggctttgctaaagaacatatcatcaggcaagaagggcggtagtgctggcaaagtaacaaacaaggataacagactacacaaattggtctttaatgttttgcttgatggcacagaagtagcttactatgttgatgggcagagaaaggttgacgggtatattaaggatcaaagaatctactgtaatcactgcaacaaagtggttagcccatcagcatttgaagctcatgcgggtgagggatcaaggcgcaaaccgtatgataacatattcacatcaaacggagtatcattgcatgagctggcaatgaaaatatcaaaggatatggaactgtcagaacgtgagactgatgatctgtgcagagaatgtggtcagggtggagatattttcccatgcaaaatctgtccaaggtcatttcatccagcttgtgttggactctctaaagtcccctcagaatggtactgtgataattgtcgcaatcttgtgcaaaaagaaaaggctttagcagagaacaaaaatgctaaagctgctgggaggcaagctggagttgattccattgaacagataatgaagagagctatacgaattgtccccatctctgatgatcttggaggctgtgctctatgcaaacagaaagatttcaacaatgctgtgtttgatgagcgcactgtgatactctgtgaccaatgtgagaaagagtatcatgtaggatgcttgaagaatcaatggcaagtggaactaaaggaattgccagagggggagtggttctgttgcagtagttgctctgagacacgatcttcattagacaagataatctccgacggagctcaactgttggtggagccagatcttgaaatcataaagaagaaacatgtgacaagaggtttatgtatggacaccagtaaagatctcaaatggcaattactttctggtaaaaggactactgaagacggaagcatattgctctctgctgcagtgccaatttttcatcaatcttttgatccgatccgtgaagctctcactggtagagacctgattccagagatggttaacgggaggggacctaaggagggaatgcctggacaagattacagtggaatgtactgtgcactgttaactgtgggctctactgtggtgtcggcagcacttttgcgtgtgatgggaggtgatgtggccgagctgccactagttgctacaagccaggatgttcaggggctgggctactttcaagccttgttctcatgcatcgagaggatgctagtttcgctgaagatcaagcactttgtgcttccagctgcacacgaagctgaagggatctggatgaagaaatttggattctctaggaccactccggaagagctggaagcttatcttaatggggcacacctgactatattccatggaacatcatacctgtacaaggctgttccaatgtcatgatatatgggatgaaaaagatatgggtgttgcaatagctagcaggattttgtcttgtcttttctggagtcgctattgtgatgtacataaagagttgatgaggaaacaaagcattggcaagacaatgaaaggttggtatacaggagctggaagccaaggggaagaaaagagctacaagaggtctggattagttttctttctttgtttactcttgaatcgagtgtagtggcgctggggttggcaagtggtggcacacctagcaaattttggtgtaatactagatgcaatgcaattgaagcagttccgtg

SEQ ID NO: 973 - DNA, 1288 bp, Zea mays
  Clone ID: 700097856_FLI
ccaaatcgcttaccgcccccgaagcgtctcggttcgcatagcagagctgctcttgcaacaagccaaacaacccagtggctgctagccgagacaggggatagattgagagagaggcgcgcagatggcgacgccgtcgtcgtcgctttgctccagcttcgcctccctgcggaccgcctccatcggccacccccgtggcatcgcctcctccacgcccaggaaggcattccatgtgagggcatcagctcgggttgacaaattctcaaagagtgacatcatcgtgtccccttcgattctgtctgcaaactttgcgaagcttggtgatcaggtaaaagctgtggaggtggcaggatgcgactggattcatgtcgatgtcatggacgggcgctttgtgccaaacatcacaattggacccttggttgttgatgctctgcgtccagtgactgatcttccgttggatgtacatctgatgattgtggaacctgagcagcgagtccccgattttatcaaggcaggtgctgatattgttagtgtccactgtgaacagacatcgaccatccatttgcaccgaacagtcaatcagattaaaagtctaggagcaaaggcaggagttgttttgaatccagcgactccactcactgcaattgattatgttcttgatgttgttgacctggtgctgattatgtctgtgaatcctgggtttggtggccagagctttatcgagagtcaagtaaagaaaattgcagaactgagaaggttatgtgcagagaagggagtgaacccctggattgaggttgatggtggtgttggtccgaaaaatgcctacaaggttattgaagctggcgcaaatgccattgtcgcaggttctgcagtttttggggctccagactacgctgaagctatcaaaggaataaagaccagccaaagacctctagctgtagccgcataaggagctggacgtgtaatcatttactctgtgcaagtttaccagtgatgcaatctgtatagatgtgtgtcttgtccagccatacgtataccggagatgaaaggagacggaggcagtgaagaaatatccttttttttcttctcatttttcacgaggatgcggtgcactgctcccagaatgctgtgtccaatttacaaacgcacaggtggcacatgaactagcagagtagctttatcttgaaaggaaactgtatttggggtcgatgaaccctctggtgttattcttcagactggtaaacgatgtaacatgtttgataatcaataaagtgcgtcgtatggctttcct

SEQ ID NO: 974 - DNA, 869 bp, Zea mays
  Clone ID: 700097860_FLI
gaagttggaatgaccacttttttctactcaaggttgagcatgatgcatattacattatcgatacctttggagaaaggctccatgaagggtgcagccaggcatacattttgaagttcgacaagaatacgacaattcacaaggtacctggggaaaagaaatcttgtagccccgactcaagtggaccaatgaaggattcttcaggttctgagaactctacgactgaccaggacagtgggaatgatactgaagaggaggtgcttgtgtcgaagggcaaagaatcatgtaaagagtacatcaagagtttcttggcagccataccaatccgggaactacaggcggacatcaagaaaggactgatggcatcaaccccattgcaccaccgcctccagattgagttccagtacacccagtcgtccccaaaagagactgcatcagccactcagcttcttaccatggaggccccctttgagttctcatggcctgaggcaccgccaacaatggaagtcacactaacatctgccgtctctgttgtgtagcttgtcaccctggtggcgaagaacccaaagacatgagacaacggcctgccctgatgttcggcatggagaacccttttttccttggttccctgcatggagggggagcctagatgaagattttggttcttctgtttgtactaatttgtttaatatgaactgactactacgggttattcctcctgggcgtaggagcgttctacctgcttttttttagaggtatcttccctcacctgctcgcttgtaatcttttggaaccctgtatgactaatcgaggaggaattcccctttgttataatgaactagatgccggcttatctgtagatgtaacatgat

SEQ ID NO: 975 - DNA, 1220 bp, Zea mays
  Clone ID: 700097896_FLI
cgcagatctagaacagctagcgcttatagcttgtcagccatggccaccgccgccgcgtctagcctcctcaagtcctccttcgcgggctcccggctcccggccgccacgcggaccacaccggcgtccctcgtggtggccaccggcccgcgcggcgccggcgcggggcccatctgcgcgtccatgtccatgtcctcctccaacccgccctacgacctgacgtccttccggttcagccccatcaaggagtccatcgtgtcccgcgagatgacccgtcgctacatgacggacatgatcacctacgccgacaccgacgtcgtcatcgtgggcgccggctccgcggggctgtcctgcgcgtacgagctctccaaggaccccgccgtgagcatcgccatcgtggagcagtcggtgtcgccgggcggcggcgcgtggctgggcgggcagctgttctcggccatggtggtgcgcaagccggcgcacctgttcctggacgagctgggcgtggcgtacgacgaggccgaggactacgtggtcatcaagcacgccgcgctcttcacgtccacggtcatgagcctgctcctggcgcgccccaacgtgaagctgttcaacgccgtggccgtggaggacctcatcgtcaggggagggcgcgtcggcggcgtcgtcaccaactgggcgctcgtgtccatgaaccacgacacgcagtcctgcatggaccccaacgtcatggaggccaaggtcgtggtcagctcctgcggccacgacgggcccttcggcgccaccggcgtcaagaggctccaggacatcggcatgatcagcgccgtgccggggatgaaggcgctcgacatgaacaccgccgaggacgagatcgtgcgcctcacgcgcgaggtcgttcccggcatgatcgtcaccggaatggaggtcgccgagattgacggcgcccccaggatgggcccgacgtttggcgccatgatgatctccggccagaaggcggcgcacctggcgctcaaggccctgggcaggcccaacgccgtggacgggaccatgtcgccgccgttgcgcgaggagttgatgattgcgtacaaggacgacgaggtcgtggacgcctgagtgcggcaagcagagaggaggatcgacgccagcagcgtcttatcttaattgccttgttgttcaatgatgaatcgatcgaattcccttgggttagctttattattgttgttgttatt

SEQ ID NO: 976 - DNA, 2055 bp, Zea mays
  Clone ID: 700097948_FLI
ggcagtcctcatctcattctcatccaaccgggaggttgggaacgagatcacagctacagttacctgagtagtaggatcctcctcagatcggcttcaaaaatcaaagtgggggggacaacaaggcaggggatgagtgcagctgcaaccaaggtgaagagacgtgtgggcaagtacgagctcggccgaaccataggcgaaggcacattcgccaaggtcaggttcgccaagaacaccgagaccggggagccggtggccgtcaagatcctcgacaaggagaaggtcctcaggcacaagatggccgagcagattaagagggagatttcgaccatgaagctgattaagcaccctaacgttgttcgcatatatgaggtgatgggaagtaaaacaaaggtctacattgtgctggagtatgttaccggcggcgaacttttcgacacaattgctaaccaaggtcgaatgagggaaggcgaggcgaggagttacttccaacaattaatcaacgcagttgattattgccatagcaggggtgtgtaccaccgggatttaaaaaaaatctactgcttgactcatatggaaatctgaatgtctctgactttgggctgagcgcgctgtcccagcaaatcaaggatgatggattgctgcacacaacttgtgggactccaaactatgtggcaccagaggtcctagaagatcagggctatgatggtgcaatggctgatctgtggtcatgtggagttatcctgtttgttctgctagctgggtatttaccttttgaggactctaaccttatgacgctgtataagaaaatctcaaatgcagaatacacatttccaccatggacatctttccctgccaagagggttgattttgcgtccatattatagctgagcaactctttcattcctagcagattcatctcgggcgtactgtaagtaacataggatcaatgacgtaaagaactggcactaatttaacattaggatcagatactaatttaaacggtccaaccaatagatctatatgcttttttaaacggcgctggaatgcataactctaatcttaggttccaaatacagttaaatttgctgactagattggtcgaacaaagcagaagaaaattcgtgtgacttcagaataacaatccctgaaatactggaggatgagtggttcaaaaagggctacaagcgcccggagtttgacgagaaatatgacacgccattggatgatgtggatgctgtcttcaatgactcagaagagcaccacgtgacagagaagaaagaagaagaacccgtagctctcaatgcatttgaactgatttcaaggtcagcaggcctaaatcttgggaacctatttgactcggagcaggaattcaaaagagaaacgaggttcacgtcaaaatgtccaccgaaagaaatcattcgcaagattgaggaagctgcaaaacctctaggatttggtgtccagaagaaaaactacaagttgaggctagagaaagtaaaagcagggaggaagggaaacctgaatgttgctacggagatactacaggttgcgccctcccttcatatggtacaagtccggaaagcaaaaggcgacactctggagttccaaaagttctacaagaacctttccaagaccttaaaggacgttgtctggaaatctgaagacctgcaaatgcgagctgcttcttagcatccactagatggcgagatgttcgtacgtgtcagattccattcccgtagcatgatgtgtcgtcagccgtttctgttcactgcactctgcatggtccggtgggcgcgtggcttggcattttcagagaccgcgttgctcgttgcagcccgggatgaaggcgatgcagtaggttttgtggatgtggtgagctctgtatatgcctattgatgagtcatgttgcaagctgtaacgacactatgatccgtgaagtgtagaagcagccaagtatgttctttctatgctgccccatttcccggcagtttccatgcattttgaagaaaaaaatagtggctaactcattgatatttgtatttggtcatcattaat

SEQ ID NO: 977 - DNA, 1141 bp, Zea mays
  Clone ID: 700097958_FLI
tggcgatggagggaccagttttatgccgccctgcaatgcaagccaaatcgcctgctgctgcgctggtcaacaactccctgaccagattcgggcagcttgggaccatttcaaaatacaggaacgtttcaagattcatttctcccatctctcagccatctacgaagaacataggtccatgctgtagcttcagctcgtcttctgatggcaatggatacatggctggaaactttagcgacagtgatgaagattatgttaattctactgtgctagaagcagttgaggtgagaagtggatcggaaggatatgtgataaagatgcgagatgggaaaaacttgcgttgtgtccataacaattctcaagggagaaatattccagagagtgcaccccaacctgctattgttttgaggattgaagatggaagcgaaactttacttccaatcattgttttggagatgccaagtgtacttctgatggcggctattcgtaatgtccacattgcacgaccaaccatatatcaagttgtcaaggaaatgattgataaaatgggctatgaggtaaaacttgttcgggtaaacaaaagaattcaagaagcgtactgtgctgaactttgtctaacaaagattgatgattctacagacagcatcaccttcgatcttcggccttcagatgccataaacattgctgttcgttgcaaggttcctgtacaagtccatagaagtcttgcatacagtgacggcatcagaccagtcgagccagcaagaatggcagtagcagctggcctatcagatgggttgttatttacagagcttgacagacccgatggacaggcatctgttgaggctcaagagtttggattggtgaagaacatgctcattgcagccgtagaagagagatacaaggatgctgcatcatggaaggacaaactgatgcggctgaggtctaagcggaagaactgggcctgacagcgttgcatgtctggatggtgtaaataaagatgatgcccagctgaattccagtacgcattccagataattgatgctgggttatggctatgtaactagctgtacatattgtatggacccgaggatggtcttctgtaaattcagactaagctttgaagtgaaacactaatccttcggag

SEQ ID NO: 978 - DNA, 1334 bp, Zea mays
  Clone ID: 700097971_FLI
gtccgcagtcgccatggcgctcgccgtcgccgtgctcgtggccggcacgccccggtacaggtaccgccgcccgcagggcagcccgctgacggcggtcggccgggtgctcgccgcggcgtggaggaagcgccggctgccgctgcccgccgacgccgccgagctccacgggttcgccgcggccaaggtcgcccacactgacaggctcaggtggcttgacaaggccgcgatcgtggaggccgagctggcggggaagcagcgggcgagcgcggcggcagcgtcgacggtgacggaggtcgaggaggtgaagatggtggcgaagctgctgcccatctggttcacgtgcatcctcttctggacggtctactcccagatgaccaccttctcggtggagcaggccacgcgcatggaccgccacctccgcccgggctccggcgccggcgccggcggcttcgccgtcccggccggctccttctccgtcttcctattcctctccatcctgctcttcacctcgctcaacgagcgcctcctcgtgccgctggccgcccgcctcacgggccgcccgcaggggctcacctcgctgcagcgcgtcggggccgggctcgcgctctccgtcgccgccatggccgtctccgcgctcgtagagaggaagcggcgcgacgcggccaacgggccggaccacgtcgccgtcagcgccttctggctcgtcccgcagtacttcctcgtcggcgccggcgaggccttcgcctacgtgggccagctggagttcttcatccgcgaggcgcccgagcggatgaagtccatgagcaccggcctcttcctcgtcacgctctccatgggcttcttcctcagcagcttcctcgtcttcgccgtcgacgccgccaccgcgggcgcgtggatccggaacaacctcgaccgcggcaggctcgacctcttctactggatgctggccctgctcggcgtcgccaacttcgccgtcttcgtcgtcttcgccaggcggcaccagtacaaggccaccagcttgccggcgtcggtggcgcccgacggcaccgggcacaaggagatggacgacttcgtcgcagtcacggaggccgtggaaggagtggacgtgtagggcgcgcatgtcaggctcacacttcatcggtgggtggcctctgctgtttaattttgcctttgggtagtgtgtatgtgtatggcgaagttttctttctcttgccagtttccagtttgctgctacttcggcctgctctcctgtaaataacataggagacatgctaattgaggccaagtctttatccagttagatcaacaagatattgaattgggcatgaaggctg

SEQ ID NO: 979 - DNA, 1318 bp, Zea mays
  Clone ID: 700097976_FLI
tttctctatgtacatacaccaataataactacgagtgactgtgaaggtgctggtgagatgtttcaagtgacaactttatttagccaggctgagaaaactgagaaggaattgagagagaacccaaaaccttctgattctgaaattgaggcagctaaagttcttgtcaaggaaaaaggtgatgtggtcgcacagcttaaagctgcaaaagccagcaaacaagagatatcaactgctgtcgatgagcttaatagggcaaaggaaattgtttcaaaactggaggagaggttcaagttaaagcctgggattccacgcaaggatgatggttcaatagcttttgaaaatgacttcttcaaacgtcaagcttttttgacagtgtctggacagcttcaggttgagacatatgcatgtgctcttagtagcgtttatacctttggaccaacattccgggcagagaactcacatacgtcacgacatttggcagagttttggatggttgaaccggaaatcgcatttgcaaacttgcaggatgacatgaactgtgcagaaaaatatgtacagtacctttgcaagtggctgcttgaccattgccaggaagatatggagtttatggtgaaaaattatgataagagtgcaattgaacgcctggagcttgtttcgtcaactccttttgtgcggatttcatacacaaaggctgtggagctcttgaaaaatgttaccgacaagaagtttgacaacaaagttgaatggggaattgatttagcctctgagcatgaaaggtatttaacagaggatatatttaagaagccagttattgtctataactatccgaaaggaataaaggcattttatatgagactcaatgatgatgacaagacggtggctgcaatggatgttcttgtgcctaaggttggtgaattgattggtggaagccaaagggaggaacggttagatgttctgaaacagaggatacttgatgctggcctgcctttggaaccctatgaatggtacttggacctccgtcgctttggatctgtaaagcacagtggttttgggttgggttttgaaaggatgattctatttgcaaccggaatggagaacatcagagatgttatacccttcccaaggtacccaggaagggctgatctgtgatctttggagacattggttaaacagatgcgagttgaattcaacacgcgactagtgattttgatatgttttcaccgttaagtttctacttcctaatttgcacattttaattataaattgtggaactggtacggttgtcaaaaatcatgtaattttctggttgtattttatt

SEQ ID NO: 980 - DNA, 999 bp, Zea mays
  Clone ID: 700097992_FLI
gcgcgccattccggaccctccactccagctccactctcccatggcttcctccgccctgccttccagaaccttgcaccgccgcgcgctcccctcgtctaccccgtgccaccctgcgacggagaccttcgcccccggcgccgtctcccggcggcgagcagccgtgcggctcctctccgcggggttcctgaccgccgtcgcgccgccgccgtcgctcgccgcgaggaggggacgcgttgtcgtgcctccggaggactacgccactgcacccgatggtctcaagtactacgatcttgtcgaagggaaggggccaactgctgagaagggctcaaccgtcctggtccacttcgactgcatttaccgtggcatcaccgcggtgtcgagccgtgagtcgaagctcctggcggggaacaggagcatcgcccagtagccttacgagttcatcgttgggtcgctgcctgggaaagaacgcaagcgggatttcgcggacaacgccaacgggctgtactcggcgcaggcggctccgaagcctccggccgccatgtacaccataaccgaggggatgaaggtggggggaaagaggagagtgattgtccctccagagctggggtatgggaagaggggaatgagtgagataccgcctgacgctccttttgaactggatatagagctactggaagccgtttctcctgccaaagaatgagcttttctgtttccagcagacaggggggcacttatggagtgtgccagatttcagaggaatggattacataatctactgacattttgaggtccatactggctagatatgcaattgaaggcagccgcaattgaaataacctatgattagatgcatgctgagatggtggttgctgggacaatattatttttttgggttcaaggcacagcaatttctttttggacaataagcagaaatgtggtgtgtaaattgtttcccctcctcgaagtaaaatacgtgtataaatttccttcattattttc

SEQ ID NO: 981 - DNA, 1407 bp, Zea mays
  Clone ID: 700098003_FLI
cccagccgcgccccgtctgcctcctgcttctctctccgcttccgcttcctgcgcctccaggctccacttctccgctcggcagtcggcactggaaggacagcatgtcggtctcggcgtcgtcaccggcggcggcggcgggcgatgagaagcaggaggcggcgcccgtcaggcgctgcaagggcgtcaacgacctcgacaaggtcgttctccgcgaggtccggggcagctccgcagaggtgtacttgtatggtgggcatgtgacatcatggaaagatgagcatggagatgaattactttttgttagcaataaggctattttcaagcctccaaaagctatacgtggaggaataccaatatgctttccgcagttctccaactttgggaatctggaaccacatggatttgcaaggaataggacatggagtgttgatgatgatcctccaccatttccagtgccaacctccaatagcgcttatattgacttgatcctcaaacctactgaagatgatttgaagatctggcctcatagttttgaataccgcctgagggttgcacttagtcctggtggtgatttgatgctaacttcacgtataagaaacactaatgcagacgggaagccattctctttcacttttgcataccacacatacttcaagatttctgatatcagtgaggtgcgagtagaaggattggaaactctggattacctagacaacttacaagatagagctcgttccactgaacaaggcgatgcaattgtttttgaatccgaactggacagaatatatctgggcacaccatcgaaaattgccattattgatcatgagaagaaaagaacatttgttgtgaggaaaggaggccttcctgatgctgttgtttggaacccctgggataaaaaagcaaaggctatgtcagattttggggatgatgaatataaacgaatggtatgcgtggaggcggctgctattgaaaagactgtcactctgaagcctggtgaagagtggactggaaagttggaactttctgctgtgccatctagctattacagtggtcagctagaccctgaccgtgtgattcaggattccactgtcccggaggactccatcagctagtccttattctatttttgcaggtagagcattgtatcattatgcataagagatgctggcaacaagggctgtccacatgtttcttccattctgttcaaatcttcggtgtttttttattccgaatgcatatccgaaccaaggaatgtgaaattggtttcccctttttgaggatctatgtagcataatggataagtcggtgtttcgtaccctatttagggatgcttgaagcaagaaacatcttcatgggttgtaaaataaaagaaaaattatctttatatttgaccaattcttttgcctt

SEQ ID NO: 982 - DNA, 1267 bp, Zea mays
  Clone ID: 700098028_FLI
caaaagcactcattctctaatacaaagtctcgacatactaaaccacagaaaaggaagaatctaaatatcttgctgaaggatgatgatgatggacaagctcttgcaggcggacctgctttggctgacggggaaactgatgtgcatatgataggtgctagtaggagtactgaagaaagaagtggagagtgcaatcactcgatggacaaagccatcacagtggacctactgttgggtactggcaattccataacaaatagtgatattggggatttatacaatgtaaacactgatgatgtcctcatagccaatcaagcagccgttgaagcttgtcagcagtttcatgaggcaaagcatctgccttctggaagtccttccaaagacaagatcatttctgctccagcagaaatgaagaataattctccaccagtggaggtgaagaacacttgcggtccagtaaaaattgagagcttttgttctccagttgaaggagaaaacacttctgatccagcattggagcaagaatcgttccttgaaaagtcaccctcgaggcagcctgtatccccggggaacaagcaggagctgaaacctaagaaaagacggaagaagaaaggctctttatttactaagaagcagcggaaggtggactccagaacacctgatgcaaaggaaaaaactgagggcacgccctcagctgcaaagaaccaaaggagcacgccctctgatgtagcagaggaaactgagagcccactctctggtgcaacaggaccaggaaccatgaggtcttgctgtgctggaaagaagcgcaaatctggaaatgaacctgcagatgcaaataaaactgggaagccatcctcagcagtgaagaagcagaaaactgaaaacccgactgcagctgcaaatgcgacaaagaagcgggccacggagaagaagctagagagcgcgagtgcctcccagaagctgcaggttgagaaagctgtgcttgtcgctgtaaatagcaggaggagccaaagggtccgtaagcccaaagtttttgctgactgaagaagcaggtagaaagtcttaggctctctattgtgtatgtatcttgtagccccgtcatcaaaatcggtggccatagcaacataggaagtgcctggatcgcctcataagttagtgtacatatatcagctatgtctcacccaaattgtagatttgttagtttgttgttcttaacccttctcttctgggctgccagattaacaatgtcatgctgtgttaccgttatatc

SEQ ID NO: 983 - DNA, 977 bp, Zea mays
  Clone ID: 700098037_FLI
gcccggacaagatccccttcgtgcccatctctgggttcgagggtgacaacatgatcgagaggtcgacgaacctggactggtacaagggccccaccctccttgaggcgctggaccagatcaacgagcccaagcggccctcggacaagcccctgcggcttcctctgcaggacgtgtacaagatcggcggcatcggcaccgtcccggtcggccgcgtggaaactgggctcctgaagcccggcatggtggtcacctttgcgcccacgggcctgacgacggaggtcaagtcggtggagatgcaccacgagacgatgcaggaggcgctgcccggcgacaacgtcggcttcaacgtcaagaacgtggcggtcaaggacctgaagcgcggctacgtggcctccaactccaaggacgaccccgccaaggaggctgccagcttcaccgcgcaggtgatcatcatgaaccacccggggcagatcggcaacggctacgccccggtgctggactgccacacgtcccacatcgccgtgaagttctcggagctgctcaccaagattgaccggcggtcgggcaaggagctggagagcgcccccaagttcctcaagaacggtgacgccggcttcgtcaagatgatccccacgaagcccatggtggtggagactttctccgagtatcctccactggggcgcttcgcggttcgcgacatgaggcagacggttgcggtcggcgtgataaagagcgtggagaagaaggacccaacgggagccaaggtgaccaaggcggctgccaagaagaaatgatgatgattctgcatgtaatccatggttcctggtttctttgctggtcggagtattttgttgggtggtgctagtagtagttaacaaaaaaataattttcatgggttcattgtgtaggtttggactgttgtgttcgtgattgcgtaccacactatatatattgggttttgcttctatagtaatatt

SEQ ID NO: 984 - DNA, 2254 bp, Zea mays
  Clone ID: 700098043_FLI
ctcctctgcagccaactcgtcccctcgggccaacgcgaggccaaaaccaatcacatctcctccccctgaccccctcccaccaccgaggacccttccccaagaactgccccgagtcctggagcgggagagaggtcgagggaggagtccaataagagtttctcctcgcctctctctctttctgctcgaaaaattattgtcgcattggtttggttcccttgccaaaggaggcggctttctgtcctcgctgatctaacatgatggcgagcaccgcgtcagcgaccgccgccgccgccgtggcattcggggcagccgccaagccgcggggaccggcggcggcgctccgcgcaagagtgcctgccggcggcaggcggcgctccggcatggtggtgcgctgcgacgccggcgtggaggcccaggcgcaggcggtggccaaggccgccagcatcgccgcgctcgagcagttcaagatctccgcagaccggtacatgaaggaaaggagtagcgtagctgtgataggtctcagtgtacacacagcaccagtggagatgcgtgaaaaacttgcggttgcagaggaactatggccccgtgctattcaagaacttactagtctaaaccatattgaagaggctgctgttcttagtacttgtaatagaatggaaatttatgtggtagccctatcatggaaccgaggtatcagagaagtagttgactggatgtcaaagaaaagtggtattcctgcttctgagcttaaggagcacctattcatgctgcgtgacagtgatgctacacgccatctgttcgaggtatcagctgggttggactctttggttctcggtgaaggacaaatccttgctcaagtcaaacaagttgtgagaagtgggcaaaatagtggaggcctggggaagaacatcgacagaatgttcaaggatgcaattactgctggaaagcgtgtgcgctccgagaccaacatatcatctggtgctgtttctgtcagttcagcggcagttgaattggccctgatgaagcttccaaagtctgaagccctttcagctaggatgcttttgattggtgctggtaaaatgggaaaactagtgatcaaacatcttattgccaaaggatgcaagaaggtggtcgtggtcaaccgttcagtggaaagggtggatgccatccgcgaggagatgaaaggtatcgagattgtgtacaggcctctttcagagatgtacgaagctgctgctgaagctgatgtcctattcacgagcactgcatctgaaaccccattgttcacaaaagagcacgcagaggcacttcccacaatttccgatgccatgggtggtgcccggcttttcgtcgacatatctgtcccaaggaatgtcagcgcgtgcgtctctgaaattgactccacgcgagtatacaatgtcgacgacctgaaagaggtggtggaagccaacaaggaagaccgtctcaggaaggcgatggaggcacaaacaatcatcgccgaagagctgaaacggtttgaggcgtggcgggactcgctggagaccgttccaaccatcaagaagctgaggtcttacgccgacaggatccgggcctcggagctcgagaagtgcctgcagaagatcggggacgacgctctcaccaagaagacaaggagagccatcgaggagctaagcaccggtatcgtgaacaagctcctccacggcccgctgcagcacctgaggtgcgacggcggtaacagccgcacccttgacgagaccctcgacaacatgcacgctctcaatcggatgttcggcctcgacaccgagaaggctatcgtcgagcagaagatcaaggccaaggtggagaagatccaaaactgaggacaggaagcagtttttcttccccgtgtatacataccataccctccaatctgattccattttttttgaccctttcacttactgagctcctcccctgctcgctgagacgtggactgtgccgtgaattagcgccatggcagcagctcaatctgttgagagagagcggcaaattgtctctactccagctgcttttctttcttcatttttgtttgagctgctgtggcaagagcccccattcttaagctatatacttcattctaacggaacaggaatgtatcaatgtgtcagctgatgtcgttttcatttgtcattatacttgtaaggtttactgatactgtaatacattttacgctatccctgtattcagattgtcgagcattatcttttccagagagttc

SEQ ID NO: 985 - DNA, 645 bp, Zea mays
  Clone ID: 700098056_FLI
atcgaggagcgctgggaggacctcgtcggcgagatgcccgtcaagatatgctacccggccatcgaggggcacgagtggcagatagtcacgggctgcgaccccaagaacacaagatggagctaccacaacgggggatcttggccagtgctgctgtggctgctcaccgcggcatgcatcaagaccgggaggctgaagatcgctcggcgcgcgatcgacctagccgaggcgaggctcgcgagggacggctggccagagtactacgacggcaagctgggtcgctacatcggcaagcaggcgaggaagctccagacgtggtccatcgcggggtacctagtggccaagatgatggtggaggatccgtcccacctcggcatgatctccctggaggaggagaagccgaccaagccggtgctcaggaggtcggcctcttggacagggtaaggtagtggcggccacaaagacggcagcaggacccgagttctggttctttgagctaacatctcgaatttctctgcaacttcttgctttacggctggggaagtaggcgtgtccaatgttttggtgggtcttccatgtatgaatctttatacgtcccgtcggtgaaataaggaacaacgaaaagatttttcgtgttatttccagggc

SEQ ID NO: 986 - DNA, 573 bp, Zea mays
  Clone ID: 700098059_FLI
gcagcgccgtgcccgggatgaaggcgctcgacatgaacgccgccgaggacgagatcgtgcgcctcacgcgcgaggtcgtgcccggcatgatcgtcaccgggatggaggtcgccgagatcgacggcgccccgaggatgggcccgacgttcggcgccatgatgatctccggccagaaggcggcgcacctggcgctgaaggcactgggcaggcccaacgccgtggacgggaccatccccgaggtagtcgccggcgctgcgcgaggagttcgtgattgcgtccaaggacgacgaggtcgtggacgcctgagcgagcatccacgcgccagcatgcaagcagcgtcttatctgggccggcgccatcacggggtttcttcttttaatctgggactttgttgttgttggacgaatgaattcccttcgatcggttagctttaatctgtctcgttagtgtgtcgtgttcgtgtagcaccatgccacagctacgccatgccgtgtgctctgtcacgtgggggccactcgtggggtctcctgctgctgtcagaacgaataagagaagatggaattgtggtgaaac

SEQ ID NO: 987 - DNA, 570 bp, Zea mays
  Clone ID: 700098075_FLI
gggggactactaccacttcgacccgacccctgttgccaaggcgacctggcgcgaggccagggagtgcatctacgtcgagcccgaggaccgcaagggcgtcttctggtacaacaagaagttctagccgccgccgctcgcagagctgagaggacgctaccataggaatgggagcaggaaccaggaggaggagacggtactcgccccaaagtctccgtcaacctatctaatcgttagtcgtcagtcttttagacgggaagagagatcatttgggcacagagacgaaggcttactgcagtgccatcgctagagctgccatcaagtacaagtaggcaaattcgtcaacttagtgtgtcccatgttgtttttcttagtcgtccgctgctgtaggctttccggcggcggtcgtttgtgtggttggcatccgtggccatgcctgtgcgtgcgtggccgcgcttgtcgtgtgcgtctgtcgtcgcgttggcgtcgtctcttcgtgctccccgtgtgttgttgtaaaacaagaagatgttttctggtgtctttggcggaataacagatcgtccgaacgac

SEQ ID NO: 988 - DNA, 1661 bp, Zea mays
  Clone ID: 700098077_FLI
gtacacattgcccgtccgcgccaccacatccagcatcgtcgccagcctcgccacccccgcgccgtcctcctcctccggctccggctccggccgccccaggcccaggctcatccggaacgcccccgtcttcgccgcccccgccaccgtcgtgggcatggaccccaccgtcgagcgcttgaagagcgggttccagaagttcaagaccgaggtctatgacaagaagccggagctgttcgagcctctcaagtccggccagagccccaggtacatggtgttcgcctgctccgactcccgcgtgtgcccgtcggtgacactgggcctgcagcccggcgaggcattcaccgtccgcaacatcgcctccatggtcccaccctacgacaagatcaagtacgccggcaccgggtccgccatcgagtacgccgtgtgcgcgctcaaggtgcaggtcatcgtggtcattggccacagctgctgcggtggcatcagggcgctcctctccctcaaggacggcgcgcccgacaacttccacttcgtggaggactgggtcaggatcggcagccctgccaagaacaaggtgaagaaagagcacgcatcggtgccgttcgatgaccagtgctccatcctggagaaggaggccgtgaacgtgtcgctccagaacctcaagagctaccccttcgtcaaggaagggctggccggcgggacgctcaagctggttggcgcccactacgacttcgtcaaagggcagttcgtcacatgggagcctccccaggacgccatcgagcgcttgacgagcgggttccagcagttcaaggtcaatgtctatgacaagaagccggagcttttcgggcctctcaagtccggccaggcccccaagtacatggtgttcgcttgctccgactcccgtgtgtgcccatcggtgaccctgggcctgcagcccggcgaggccttcaccgttcgcaacatagccgccatggtcccaggctacgacaagaccaagtacaccggcatcgggtccgccatcgagtacgctgtgtgcgctctcaaggtggaggtcctcgtggtcattggccatagctgctgcggtggcatcagggcgctcctctccctccaggacggcgcacctgacaccttccacttcgtcgaggactgggttaagatcggcttcattgccaagatgaaggtaaagaaagagcacgcctcggtgccgttcgatgaccagtgctccattctcgagaaggaggccgtgaacgtgtccctggagaacctcaagacctaccccttcgtcaaggaagggcttgcaaatgggaccctcaagctgatcggcggccactacgactttgtctcaggagagttcctcacatggaaaaagtgaaaaactagggctaaggcaattctaccggcccgccgactcctgcattatcataaatatatatactatactatactatactactacgtacctaccgatatgcacccgagcaatgtgaatgcgtcgagtactatctgttttctgcatctacatatatatatatataccggatcaatcgcccaatgtgaatgtaataagcaatatcattttctaccacttttcattcctaacgctgagctttttatgtactactatatcttatatgatgaataataatatgaccgccttgtgatct

SEQ ID NO: 989 - DNA, 1316 bp, Zea mays
  Clone ID: 700098096_FLI
tatttctctggatccttgtagctttggccaggctaatactctgtcatttaactctttgttgcataagctgaacaagtatgtaccacgtagttcaacagttgttgatttgtactctggggctggtgttattggcctatcagttgctgcttcaaggaaatgtaggtctgtgaaatgtatcgagattaacaaacagtcaaagatgtcttttgagacatcagcaagccgacttccagcgaacctgggttgcaccattacttggcacaataccgatgcttcagttgaaccttcgcactggcttgaagggtcaagtgttgttattgtggatccaccaaggaaaggattgcacccatctgttatcagcgctttacagaaagttgctttgtctgagcgcaaggcatacaaggctaaaagttcgcttgcaaaggttaaggatgagaagagaccatggatcttacgggcaagggaggctgcagttcatgttgataatacaacaactgaagagggcaatgaaacgtggcctgaaactctcatatacattagctgtggatgggaaagttttaagagggactgcaaaagcttgatatccagcaaggcctggcagttggaaaatgctcatgcttttaacttcttccctggcacagatagcattgaaattctggctatcttcaaacgggaatcagaagctggtcaaaagaaaaagaagaaagcaaaaaagaaggctaagtagattaacaaaaggctgatccaccttgcggattttgtatttttgtgaatcttaggcattgatccagaacttcagaatgagtgctcatgtctgttatgaggaattttgcatcgtccgaaccaatcaagtgaccaatatgacacaggtcactcaaaatgtagccgtccaaaagcgtcggctcggaatgaaagggtcttttttgctaatcataccggggacttggttttgcgtaccacccgtggtgacattgtgacaggcaagtgggtgtttgcacacaagctgcacgccgatggctctttccaccgatacaagtctcgttagatccttggcgggtcagtggcttggagttaactatgataacactttcagtcctacggtgaagttagccactatgtgcactgttctatctatggctctatctggttttggcttgtctatcaattggacgtcaagaacgtcttccttcgtggcactctgactgagataatgtattgcaaccagcagatcgtttttgtagattcagctcatttgaacattgtatgcaaactcaacaagtcattgtatgatctgaagcatgcaccttgagtttggt

SEQ ID NO: 990 - DNA, 1479 bp, Zea mays
  Clone ID: 700098106_FLI
actcctccccgccactcgccgccagcgaccaaccatcgcccgcccagcagcagcacggccccacgccaggactcgacccacgcgcggctagctaagctcccgccgccatgatcacggccctgcaggtctccggcggcggcctgccgctcctgttcgcccggcgccggcgccgggcgttccggccgccccaagcggtggcgtccgacgccgccgccgccgccgagggcacggcgagggaggatggcgggaaggtggccctgggcgggtccggcgtctccgtcaccaagctcggcgtcggggcgtggtcctggggcgacaccacctactggaacgagttccggtgggacgatacgaagctgaaggcagccaaaggagcgtttgacgcgagcatcgactgcggaataactttcttcgacaccgccgaagtgtacggagcaggggtatcgggagcgattaattcagagagtttactaggaaggtttatcaacgagaggcagcggaaggagcaggtggacgtggctgtcgcgaccaagttcgcagctcttccatggaggttcggtcgtgggagcgtcatctgcgcgctcaaggcctcgctggatcgcctcggtgtctcgtcggttgagctctaccaactccattggccagggatatggggcaacgaagactacctggacggccttggagacgctgtggagcaagggcttgtgaaggccgtcggggtctcaaactacagcgagaaacgtctccgagacgcgtacgagcgcctcaggaagaggggggtcccgctcgcctccaaccaggtgaactacagcctgatataccggaacccggaggagaacggggtgaaggcggcctgcgacgagctcggcgtcactctgatcgcgtactccccgatcgcccaaggtgctctgacgggaaagtacacgccggagagtcctcctaaaggccctcgaggacggatatacacgccggagttcctgacgaagctccagccacttatcaaccggatcaaggagatcggaggaagctacgggaggacttcaacccaggtggtgctgaactggctggtgtgccagggcaacgtggtgccgatcccgggcgccaagaacgccgagcaggcgcgggagttcgctggcgctctcgggtggagcctggcgcccgacgaggtggaggagctccggtccatggcgcgccaggtcaagcccgtcatcggcttcccggtggagaagctgtgaccacccccatggcactggtatatatcaggccactgtagtagtgtaatgtatagtaggactgtaggtacgtagatgggcaaagcataccatttccatcgcgagactgcggacgatgtatgctacattgctactgaacgtagcgtcacgccgtcgaccagagatcacagtagctgtctgcgctaaggacgtggttcactacttgcgaaagtcagtgttttaattacatggaaaaaattataaaatt

SEQ ID NO: 991 - DNA, 1179 bp, Zea mays
  Clone ID: 700098124_FLI
accaaggagagtacgtggaggagcagccatggcttcatcggtggccgccgcggcgagcacattcctgggcacccgcctggcggacccggcgccacagaacgggcgcatcgtggcccggttcgggttcgggttgggcggcaaggcgaagcctgctccgaagaaggtggcgaagacatcgacctcctctgaccggccgctgtggttccccggcgccgtggcgcccgactacctggacggctcgctggtcggcgactacgggttcgacccgttcggtctcgggaagcccgtggagtacctgcagttcgagttggactcgctggaccagaacctggccaagaatgaggccggcggcatcatcggcacccggttcgagtcctccgaagtcaagtccaccccgttgcagccctacagcgaggtgttcggcctccagcggttccgcgagtgcgagctcatccacggccgctgggccatgctcgccaccctcggcgccctctccgtcgagtggctcaccggcgtcacctggcaggacgccggcaaggtggagctggtggacgggtcctcctacctgggccagccgctgccgttctccatctcgacgctcatctggatcgaggtgctcgtgatcggctacatcgagttccagcgcaacgccgagctcgacccggagaagaggctgtaccccggcggctcctacttcgacccgctcggcctggcggccgaccctgagaagaaggagcggctgcagctggcggagatcaagcacgcgcggctcgccatggtcgccttcctcggcttcgccgtgcaggccgccgccaccggcaaggggccgctcaacaactgggccacccacctgagcgacccgctccacaccaccatcttcgacacgttcggagggtcctcttaagcccgccattgctccgccccgtccatcgaccggccggaacgtgttcttggattaattaactacgatctctatgagcctggggatggatcaacccgtcgtgcgtggtctcgttttgtgatgagtgggagagagaggatggcaagatcgatcctttgttaatggagatctcgttaattaggagagctaccgctgggacttggtggtttgtaatatatgatccaaccagtgatgaatcaatgcattcacttgtgtacacatatacatttctaccttgc

SEQ ID NO: 992 - DNA, 996 bp, Zea mays
  Clone ID: 700098221_FLI
ccacggaggagtaccgctccgtcgtcgtcaaggagccgcgcttcgtcgagtacttcagatcggctacaccggagaccgagtacgggaggatgaacatcggcagccggccagccaagaggaggcccggcggcggcatcacgaccctgcgcgccatcccctggatcttctcgtggactcagaccaggttccaccttcccgtgtggctgggagtcggcgccgcctttaagttcgccatcgacaaggacgtcaggaacttccaggtcctcaaagagatgtacaacgagtggccattcttcagggtcaccctggacctgctggagatggttttcgccaagggagaccccggcattgccggcttgtatgacgagctgcttgtggcggaagaactcaagccctttgggaagcagctcagggacaaatacgtggagacacagcagcttctcctccagatcgctgggcacaaggatattcttgaaggcgatccattcctgaagcaggggctggtgctgcgcaacccctacatcaccaccctgaacgtgttccaggcctacacgctgaagcggataagggaccccaacttcaaggtgacgccccagccgccgctgtccaaggagttcgccgacgagaacaagcccgccggactggtcaagctgaacccggcgagcgagtacccgcccggcctggaagacacgctcatcctcaccatgaagggcatcgccgccggcatgcagaacactggctaggcggcttctcttcactcacctgcagagtgcaccgcaataatcagcttccggatggtggcgttttgtcagttttggatggaaatgccgaactggcagcgtctgttttccctatgcatatgtaatttcctgcctctttatattcactcttgttgtcaagtccaagtggaaaatcttggcatattatacatattgtaataataaacatcgtacaatctgcatgctgttttgtaataattaattaatatcccagccc

SEQ ID NO: 993 - DNA, 1029 bp, Zea mays
  Clone ID: 700098233_FLI
ctggcccttctggtaattcgttcgcgaacatatcaaacagcacacaactggttacgacaaacaacttgccattacagtctcttgagccaagcaaccaacaacaccttggtcggctgcattcctctgcagaccctttcaactcatttgttggtgagcccccccagtttgcagatcttggaaggtgcaacaccacctggccaaccgcggtctcatcatccaatgttcaggagattggccagaaggacaggatcgtgaataggcccaagcttgagcctctctcaagctttacagaagcatccagtcagatccctttgctgggaagtgaaatgcagagccaccaagtagcatcactagccagcaacggtcttccgatgccgttcactcaggaagcggtgcccttcgcttatggaagcagcacgaactcgagagagatgctgaataacaaccttgcgcttagtaattcaggcgtcaactctacattgccgaaccttcgcatagacggttctgttgttccagggcagacactgggtggtagcaattcaggtggttgtgttgtcccccctctgcaagatggcaggattgatcaccaagctgtcagcagtcatctaaactacaacaacgaactcatggggacaggtaggctgcaaaggggacttagtggtggtctggatgacattgtcgtggacatgtttaggccggaccgcgcagacgatggcgtctccttcattgatggggactgggaactggtctagcaagtttcagttctctacatcaagtctgccttcgtgtgagattttccgcatttgtggttgtggaggggttcggcgcttgattggtccaaagttgtttatagtagcaagattgcatcacaaatgccctttgcatttggtttttcagtttagcgaccaggttccagtgtcacgtccgaatatcaactatgtggtatttgctaccttaactcgtatggctatgttttcaagtcaggtgttaactgtggctatcgtgatatatacagcatggttatgagcc

SEQ ID NO: 994 - DNA, 333 bp, Zea mays
  Clone ID: 700098248_FLI
ccaggacaagatgatctgccgcaaatgctatgcacgactgcaccctagggctgtcaactgccgcaagaagaagtgtggtcacagcaaccagctgagggccaagaagaagatcaagaactgaggtgctgctcctagtcagtttcatggacaatgttgggctgtattgctgtgtggttgttgaacggtgtttgtttacccaacatttgggccttctgttatgttttaccttgttgtcgatgacactactatatgacaatagcaactctgttattgtagttttggtcactgttcacctgatatgtgccatatttcggtaaagtatcgttagtgggc

SEQ ID NO: 995 - DNA, 950 bp, Zea mays
  Clone ID: 700098270_FLI
ctgcgcagctcggcctacagcacggcggtggcgccggccggcggtacgggtacggacgagcacgcgtggggcgccacgctcgtcgtccccgtgggcgcgggcttcctcgagggccgcgccgacgtccgcgtctccgtgctgtcggagcccgccgcctgctgccggctcgtcggcgccacgccgttgggctggtgcggcatccccgcggccgacgtgctcgacggcctccgcccgccgcgcgcgctccgccgcctcagctactcgctgcgctgcccgcgccgctgcgggggcgggggcgcaccagggcggggccacggcgtcgtgcacctcgccgtgcgcgtgctcggcctgcgcgacgacgcgccggcgaggacggctgcgacagcgccgctggccgcggccactgcgccggtgcagcggggctggtgccgcgtcgcgatgggcatccccgtgtccggggccgcgtcggccgtcgtcggggtgcccttgtcgtcgtggggcgccagcgccacgtcacggtgagggcgcgcggcggcacaggcgcacagcaggaggtttggatggatgaaaggaggatcggcggagacgacgaccagccgtggaaaaccgatggaaaatgtccatcagcgagctcggtagaccaggtcctgatcgcggcttcagtcaaagcggggatatttgtggccttcgctattttggaactaatactgaaggtaccacgtgtccaaatcaaagtcagcgcggctacgtgcctcgactaaatacgacaagattcatttggttaatcatgaacttgtttatggcttctaactggccatcagcttgtcgggagtcgggacagcttcccccatgcatgcatagaactcttgtttattggtagacattttaaaaccgaactccaaacctaaacttgaatatatcgaattgtcggtctattcgggtttttgggt

SEQ ID NO: 996 - DNA, 1109 bp, Zea mays
  Clone ID: 700098323_FLI
ccagagtgctctgctctcgctggaggccgtggttcattcacgttcatggaggccgccgccattcccaccagtgccccggaaaccaggattgccgttgtcaccggcggcaacaaagggatcgggctagaggtgtgccggcagctggccggcgccggcgccaccgtcgtcgtcttaacagccagggacgagacgaggggtgcagccgctgcacaagagctcagagaatctgggctctccgatgtcatcttccatcagctggacatcaccgacgctgcgagcgtcagtcggctggctgagttcctcaaggctcgttttggaaagctagatatcctggtaaataatgccgcagttggtgctgttgagtacgtccaagatcctgctgacagttcaacgagcgaggaagagctgagtggcatggatatggtccaaaggcttcagtgcatgcttaagagagtccgggagacctacgacgctgcgacagaaggcatcaagacaaactactatggcataaagcatgtgatcgaagccttgctgcctctgcttcaagcttcctccgatgggaggatcgttaacgtctcctctgacttcggactgctaaggctgatcaacaacgaggaagctaaggcaggagctaaacgacgtggagaagctcaccgaggagaggctggacgaggtgctggccgcgtacctgagagacttcgacgccggcgaggtgggggcgcgcgggtggccggtggacttctcggcctacaaggtggccaaggtggccatgaacgcgtacacgaggatcctagcgaggagccacccggggctgcgcgtcaactgcgcgcaccccggctacgtgagcaccgacatgaccgtccacaccgggcctctcacgcccgagcaaggcgcggccaacgtcgtgaaggtggcgctgctgccggagggcggcccgaccggcgcgtacttcgcgttgggagaggaggcgtcctttatgtgacgaaagcaccgtcgtcgttaagttcgtcgttgttcgccaactccctgttagtcgatttctaaatcgacgtacaatgaaatacatcatcgctgcaaactcacaaatgaaaacaagggaaccttgtagc

SEQ ID NO: 997 - DNA, 435 bp, Zea mays
  Clone ID: 700098357_FLI
gcggcgcgccgcacgacaacaacatcatgctctggaacgccgtcatattcgggccggatgatacgccgtgggacggtggcacgttcaagcttaccttgcagtttacagaagattacccaaacaagccaccaactgttcgatttgtctctaggatgtttcatccaaatatatatgctgatggaagcatctgtttggatatcctacagaaccagtggagtcctatatatgatgttgctgcaattttaacttctatccagtccctgctgtgtgatccaaacccaaactcccctgcaaactcagaagcagcaagactgttcagcgagaacaagcgggagtacaaccgcaaagtccgtgagatcgtggagcagagctggacagccgactagtgcataaggatgctcgtcgtgcccgataggggcacaataagaaagcgtg

SEQ ID NO: 998 - DNA, 1465 bp, Zea mays
  Clone ID: 700098507_FLI
cccagatctcatctgcgacgacctcctccctcccgatcccgctccgtctccccccaccgccaccgctgccgctgccgcctcccccaccgaggtcttgtcttcggcgatccagccggagcccgcggcggcgacgatgtacgggtgggagatgctgtcgttcaacatacacgatgggttcctggaggccatcgtgcggggcaaccgctcgggcctcctcaccgccgccgactacaacaacctctgccagtgcgagaccctcgacgacatcaagatgcacctcaccgccaccgagtacgggccctacctccagaacgaaccttcacccttgcacacaacgacaattgtggagaagtgcactcttaaactagtcgatgagtacaagcacatgctgtgccaggccactgaaccactatctacgtttttgcagtatataacttatggccacatgattgacaatgttgtccttattgtaactgggacactgcatgagagagatgttaacgaacttttggagaaatgccacccattgggcatgtttgacagcattgcatcacttgctgttgctcaaaacatgcgtgagctttatagattggttctagtcgatacaccactggccccttacttctcagagtgcattacatctgaggatttggatgacatgaatattgagattatgaggaacactctctacaaagcatatcttgaggacttctacaaattttgccagaaactaggtggtgcaacagctgagatcatgtgtgatctcctttcatttgaagctgacagaagagctgttaacattacaataaatagtattggtactgagttgacaagagatgaccgcaggaagctgtactccaactttggtttattgtatccatatggccacgaagaattggccgtttgtgaagatgttgaccaggttcgtggtgcaatggagaagtacccaccataccagtctatattttccaggatttcatatggagaaagtcagatgttggataaggcattttatgaggaggaagtcaagaggctatgcttgtcctttgagcagcagttccactacgctgttttcttcgcttacatcaggctccgcgagcaggagatcaggaacctgatgtggatctctgaatgtgtcgctcagaaccagaagtcccgggtccatgacagtgtcgtcttcatattctgagaacccccgccactatatatgtatgtacaaaatgcctgctttgatgatggcacaatcgctcgacaattataaatctgggacttattattattcccattccctctgttagacgccggcgtaaaaaatgccagacctggagttgatgtattatttgttttgtagtcaaataaaggtgtgattatctggcacacaaaataaaatcttgtgtattttggaacagaccttcatcgtcaatgcacagtatgctgtcaatgcacaatatgtgtgtgcaaaagc

SEQ ID NO: 999 - DNA, 1003 bp, Zea mays
  Clone ID: 700098513_FLI
ccttttttatcgggctcccccaccatccgtggcccgacgacgtccccatttccaagctcctcctcgcgattccaatccacgcacgcctcctccgcttccgcctcgctcaggcttatagtcagtgatggaacacaaggaggcgggctgccagcagccggagggcccaatcctatgcatcaataactgcggcttcttcggcagtgctgcgacgatgaacatgtgctccaagtgccacaaggagatgataacgaagcaggagcaggcccagctggctgcctcctccatcgatagcattgtcaatggcggtgacggcgggaaaggacctgtaattgctgcatctgtaaatgcggcagttcctcaagttgagcagaagactattgttgtgcagcccatgcttgtagctgaaaccagcgaggctgctgctgtaatccccaaggccaaggaaggcccagaccggtgcgcggcctgcaggaagcgtgttgggctgacgggatttagctgccgatgcgggaacatgtactgttcggtgcaccgctactccgacaaacatgactgtcagttcgactatcggactgcagcaagggacgcgattgccaaggccaatcctgtggtgagggcggagaagctcgacaagatctgaggcgggcattgggggagcgaaatggttgcaatctgcaagaattcaacatgctgtctttgctgcgttatcattgaaacttgccattcttgtctgctgctgcgtcccgtgaggttcaatactgtgatgcacacagcatccaggcagccgcaagaatttcatcaaaatggtttcccgtgttggctatgtcgtgtaagcttaattcagttattcatggtggtttcggtcggtattgtggtattcccatttaggtagctctgtaatgtattgctgtctcaagcgtgttacattccaattagtaatagtaatcagcaattgtctgccccatatattttttaaaaagtatgttcttgtgatgtcccagca

SEQ ID NO: 1000 - DNA, 2268 bp, Zea mays
  Clone ID: 700098530_FLI
cccaaccgaaggtaactctatgcctcactatcagtttcactgtcttttcttttacgtccgtctaatctctgtgtaacgacatgcgcctttattacactctatgatttttaggaacaatcggcacatattagtacttagattatgctctatgaatttttgcagtgttacgcctgtttagaactttagatcttcaagtatgaacagaacaaatatatgctagaactgtacaataacttcaactgggaaaaaacaagatctgaattttttagctgtccgttttccaagaataaagtttttgtttttttaaaaaaaatggaagaaaaaacagaattcttagctgtcacaagagtataaatgtgttttgtctttcttctgctagaaaagaagctgatgagctgtaacacgctcaaaacatctccacatgcatgtgtggtgttccgctcctttggcataactatgggtccgcaacatttttgtttgccagcaaagaatcctcagctgttatttccaatcacctttgtatctttgcgagtgattgcatggcatgtgcgctacaaaacaatatagacagaattatgtataggagtgaagagaagaaacctgtatgctagccaacggttcggtttctttaaccatcgcctgattcagttgagctgtagaaagcgatagagtgtggtcagctgatcgttctgttgaagtttgaaatagatctaggcatgatcggtacgaccgagtgtgttagaggggtgaccctgcagctcatctgaatcagacgattttattaccttcagcagaggagtgactgagagcaaggctaatagaagaattaactaaaaggcttcgtactcttgccatagccaataataatacccgatacatatagtgagcttattcttctatgactcttaagttagagagagtcatcatttagattgacagaaaaaaaagaaagagtcatctttaactcacgcaagcaagctctttctccccctagaattctagggagccataagcactcactttcttctctccctctatgttcccacctaggattttggtgacatagagctgtttgaagcctgcctagttagcctcgttatgatggcactattattattaggccatctcgagcatgtaaaatatattgaccagagtttaaagtagagagttgaatatagagtttgaaataaagagtgagatatgagatgggtaaggattctgttgttggagataacttgctactctaggtttagcattccaacatgaaacatttcatcgcctgtccttcagtactagaccatgggtcgccgtgcaaaagtatcattacttaattcctggagacctgcagccgtttctctggcacagttgtcacgggcacagtctgactggcaagtcacgggagtactcggccagcattttttttcttctctttaatgcctgtggaataatgtatgttgactacactacacacctttggccaaactagtggatggactggagtggttttgttcgttcgtggaaccatcctgaaatgggcgttcagtaatacagttgctgttatgatccaactgtaataaagctgtggtgggttctgagtttctgaccaccaagctgttgtcattcgcagcacctgcaccgtccgccgccggggggtcatcgagcggtggcgcggcggcatcttcaccgcgcgccgcggcggcgagctctcctccgatgacggcgaccgccctgttggctgccgtggcggctcccctgctcgcctactactgctgctacctcttctgagggtttccttctgctgctgctgccgtctaggctgagtgacctatttctatgtatgtgacgattcaagttaacttgtggagcgcggctgcgcgtgcgtttgtgcttgtgcagtcgccactgttgctgtgttcttgcgatactcttgtcacttgagaggtggtgttgtatggactggtttagctggctcccccgtgcttccatcgacccgcttcgcgcttcatgtttactacttgcgatactgttgttacttgtgattgatgatgataaaagccacggcctgtgttactactgctgtaacaagtccgacagaagaaccatccaatgcaggcccacgaaggggatccaggctgcgccggcctagtactcggcttagggagtttgtgtgagttgtaattgagatataagggaatattgattagggaaaaggcatcagacttgtaataagaattctggacagactgtcgctctgcctatctactctgc

SEQ ID NO: 1001 - DNA, 1182 bp, Zea mays
  Clone ID: 700098538_FLI
gacattttcattacagacggagcaagtcctggggtccacatgatgatgcaattactgattaggaatgagaaagatggcattctgtgcccaattcctcagtaccccttgtactcggcctccatagctcttcatggtggagctcttgtcccctattaccttgatgaaaaaactgggtggggtttggagatctctgatcttaagaaacaactcgaagatgctcggtcaaaaggcattgatgttagggccttggtggttatcaatccaggaaatccgactgggcaggttcttgctgaagacaaccaatatgatatagtgaaattctgtaaaaatgagggccttgttcttctagctgatgaggtatatcaagagaacatctatgttgacaacaagaaatttaactctttcaagaagattgcaagatccatgggatacggcgaggatgatctccctctagtatcatttcagtctgtctccaaaggatactatggagagtgtggtaaaagaggaggttacatggagattactggcttcagtgctccggtaagagagcagatctacaaggtagcttcagtgaacctgtgctccaatatcactggtcaaatccttgcgagcctcgtcatgaatccaccaaaggttggggacgaatcatatgcttcctacaaggcagagaaagatggaatccttcagtctttagctcgccgtgcaaaggcactggaagatgcattcaacacgcttgagggattttcatgtaacaaggctgaaggagcaatgtaccttttccctcagatccatctgccacataaggcaattgaggctgctaaagctgccaagaaagcacctgatgcattctatgcgctccgtctccttgaatcaactggaattgttgtggttcctggatctggatttggccaagttcctggaacatggcacgtcagatgcacgatcctgccgcaggaagataaaatccccgcggtgatcacccgcttcaaggctttccatgaggcgttcatggctgagtaccgtgactgaactgttacagtggctgagtaccaccgtgtagaccgaaacaaaataaagctcccccctctctctgtgtctgtgcgtgtgtgtgaactgatctctgaatggacgaacaatgtactctgttggcgcctttaatggcaattgaggaaaattttgatc

SEQ ID NO: 1002 - DNA, 2034 bp, Zea mays
  Clone ID: 700098547_FLI
cgtgaccacagacagccagacggctgagagcctgagacgggcgatgaccgcacgcccgcacaagctgctccgggctccgctgctatgctagggtttggactttggattgcagccgccccgccgcatcggcaccgcagccgccgcagtgccgcacagccgccactctcgtcttggtcttgcagccagttgccctccggtcgcggtcgtcggcccctcgcccgcgcgccgagacaccgagtcagcgtcgaccgtcgtcgtgtctcgccgagtcgctgtcgtcaccgaggtccagcgcccagcggcccagctccaagcctccagccatcggcgaccgccctcctccgccgagacgccgagtgccgagcgcccgagcaccccagtccccagcgcccaacaggctagcaagctacaagtatgcgctctttgttgatgcgtccaaggagttgagctgaatgcccagcaggctagcaggctgcagaaactgaaggaaaagccggcattcaggaacccggatgagttctattttaaaatgatcaatagtaggactattggtggaattcatagacctaagcctgaagataataagtatactaaagaggaacttcttctgttgaaaaataaagatatgagatatatccttcagagcgttcaaagtgaaaaaaagaaaatcgaaaagctaagctcaacacttcatgaagttgataacatgcctcaaaacaagcatgtttattttcctgaagacagagaagaagcgaaagaaatacaatcaaggataggacaaagcagcagcatgcctgatcctttgtttttactgtttatggagagtcatttttactgtttattagtcttaacatttatatttgtgtccatttaactaggaccaatatggttggaatgggattatgatattaatatattatgcagttagttagttgactggtttctcatgttgtctaatcctttgtttttccccaggaaaattgcacgcgcggtgttctagtctgtttattttgccttccctttttctgattaattcgcgggagtttggtggactacggttagtcggtttattttctaggtagagggacaattatgcatgactaataataagggtttcattccatggctaaatataccatttgcatgatgctagttggagctagcgtccttgttcaaacaaagcatcgtataactgtttggatctacatattaaattgatggctaagtgcacgcatatgtacttgaacagcagggcttttctgaacttctaatcagcagaatccagcatctgtttttctcaaactgttatgcttttagatcgcgggtacttgttagtatccatgcatagcacacggtgtggccgtgtggtgaacaaatctcttttctgatttgcgctcagctcattgtgtgtggtgtacctaattaagcttctgtttcttttctgtattatttctttcctttttttataagggcgctcgtgttaaatcggttgaaacagaagcgacatcattggttattagcaaatcctggagaatgcatgcaagttcttctttatttgtatcactatctcttagcacagttctctaactttcgatgcatgtacaagtctatttttttataaaaaattgtctatatatggcacacaaaattatgtggacgtgcgcatcaatcatcacatgctgttatgcctgatgtcctgtggattggtgttcgatctcgtgaattcgagctatcctccattcctcctgcatgacagatatactagacatttggaactgttatttttgcagctacatatataccaactgacagacatttggaactgtttttatgtgtgtgttcaggttactaaattggaacgggaaaatccataaagtgctgaagactaagtggatcgagcgcgcgtgagggttgccgtaaaatgtccaccattattaagagggctaatgaattcccagttgattgtagctacatgcatggagtgcacacacatgcatatgttgtttgaattaatcaaattgcttgtttgttagt

SEQ ID NO: 1003 - DNA, 1085 bp, Zea mays
  Clone ID: 700098560_FLI
gtggcgaactcttctctgtactagctttcttcttcttcctcctcttcctcctcccaaacagactggatttcatcaagataatcctgaaactggagccaacaagcagacagagaaagaagagcaagaagaccggctcccagccgatacaaggtaggagtgagcagcgttagatcagttttcatcacaggatcgatatggtgacagtgagagaggagactcgcaaggggccatggacagagcaggaggacctgcaactgggctcaaccggacaggcaagagctgccggctgcgctgggtcaactacctccaccctggcctcaagcgtgggcgcatgtctccccatgaagagcgactcatcctagagctgcacgctcggtggggaaacaggtggtccaggatagcacgccgcttgccagggcgcactgacaatgagatcaagaactactggaggacacacatgagaaagaaggcacaagagaggaagaggaacatgtctccatcgtcgtcttcgtcttcgctgacttaccagtcaggctacccagatactccatcaaccattggagttgagggacaggagcttcatggtggcagtggctgcatcacaagcatcctgaagggcacccctccggacatggatggctatcccatggaccagatatggatggaaattgaggcgccacagatgccctcggaggagagctttgttggggggaaccataatgtgtgcagcagccttgccaccccgctgccaccaccaactgtctgggaatactacccagaggcctgctggaaggttgacgatgagatcaagatggcaccacaatttcaatttggttatagtgaaggagttgggccctgcttctgatgccataaatattgggtcagattactaagttatacacctacctagcagaagtgaagtgcttttgtagaaacaagctttagcatggatctgaatatttatctccgcgcttagaattgcaggtctatggatctatgcatggttgctatgtatctatctagtgtgcaagacaagatcatcttaatttgtccttgatgctatggaatacaagggcaaaggtact

SEQ ID NO: 1004 - DNA, 1053 bp, Zea mays
  Clone ID: 700098569_FLI
gccatcgacacgatcgcgagcgcaagcacgtacgttgtcggaagctcaagttagaagaagcaccagtgcctgatcgatggcggcccaggctctcctctccggccggcagctgctgggccgccccgtgcagtcggccgtctctaggtcgtcggcgaggaaggcgcccttcgtcgtcagggccagctccagccctccagccaagcaaggtgccgacaggcagctgtggttcgcgtccaagcagtccctctcctacctcgatggcacgctgcccggcgactatggcttcgacccgctgggcctctcggacccggagggcaccgggggcttcatcgagcccaagtggctggcctatggcgaggtgatcaacggccgctacgccatgctgggcgcggtgggcgccatcgccccggagatcttcggcaagatgggcatcatccccccggagaccgcgctgccgtggttcaagacgggcgtcatcccgcccgcgggcacctacaactactgggccgactcctacacgctcttcgtcttcaacatggcgctcatgggcttcgccgagcaccgccgcctccaggactggtacaacccgggctccatgggcaagcagtacttcctcggcctcgagaagttcctcgccggctccggcgacccgtcctaccccggcgggcccctcttcaacccgctcggcttcggcaagaccgagaaggagatgaatgagctcaagctcaaggagatcaagaacggcaggctcgccatgctcgccatcctcggttacttcatccaggggctcgtcaccggcgtcggcccgttccagaacctgctcgaccacctcgccgaccccgtcaacaacaacgtgctcaccagcctcaagttccactagaacgtggtgcatcagcatacctgctgctgccgccgccgccgccagttgtttgctgtggaaagctagatgcatgcgtgttgtaaaggaacctgaagcgttgcatcggtcatgattcatgcatggccagcctgctgcctgtaacaacaaactagtattgatcttattgagaccgg

SEQ ID NO: 1005 - DNA, 1278 bp, Zea mays
  Clone ID: 700098572_FLI
cacactgcccacgcggacacgctctgcaccaccacctgccggccgttcccggctcgccgctgccgttgcgccctcgcgctcacacctccgccagcccaggtccatcgagcggagaaacccatggccccctcgccgatcctcgtccggccgccggcgctggcgaattcaccccttccgcctccccgatgcgtggccgcggtagcagcggcgccggcggttcggacggctccagcggccccattctctaggctccgtaccaagtgtaggttcgccgcatcggatgtgagagaagactactcttccactccgatagatattgtcgctgatgttaagacggagaagattgtggtgttaggaggaagtggattcgttggttctgcgatttgcagagctgctgtatccaaaggcattgaggttgtgagcttcagcaggtcaggaagaccatcttactctgatccctgggttgatcaagtcaattggctgccaggagatgttttctatgcaagatgggatgaagtattggttggggctactgctgttgtgtctacccttggagggtttggcaatgaagaacaaatgaaaaggataaatggtgaggcaaatgtcatagcagtaaatgctgcaaaagaaaatggagtcccaaaattcattttaatctccgtccatgactacaaccttccatcctttcttcttacatcgggttacttcactggcaagagaaaggcagaatctgaagtcctttccaaatacccagcctcgggtgtcgtgttgaggccaggcttcatttacggtaaaaggaaagtaaatggcttcgaggtaccactcgacgctgtcggacaaccattggagaagttgctctcctctgtcgaaaacttcaccaagccgttgagctcgctgcctgcctctgacctaatccttgcaccccctgtgagcgtggatgatgttgcctatgctgtaatcaacggagtcatagacgacagcttctttggggtgttcacgattgaacagatcaaggaagccgcgtccaaggtacgagtgtgaacccggggtcttgttccacaatctctgaacgtgtgttgtaggtggaaagttcataaacttagcagtaactcattgatccttgtgttctttatttctcgctgaattttgaccatagtcaaccgttcaaaagtcagtgcagcattcttttttctgctggaatctcttgagaaaatatagtttccaaactagcccttaatgacttaaagagctagcaaaatatgtagtactgtgtgggtc

SEQ ID NO: 1006 - DNA, 572 bp, Zea mays
  Clone ID: 700098737_FLI
gtctggattcatggctagatacagaagcgatcttcagggagagctttcgtccctggacgacagcatggaggatccaaatggatacttgcgctttgatgtgggcgggattgaagagctcgagaactatttcatattcaatgatcggcatagaggaatgaggatggatatcgacggcatgtcctacgaagagttgcttgctttgggggagcgaattggtaccgtaaacacaggtctttcagacgacgcgttatccgcgtgcctgaacaggaggctctacatgcccacagcttcaggttctcatgaagattgtgaaagaaaatgcagcgtatgccaggaggagtatttagcaggcgaggaggtgggcgagatggcatgtaaacactactaccacctttcctgcatagatcactggcttcggcagaagaactggtgtcctatctgcaaatctgtcgccctgaaaatcaactagcaacgtgtttcatgtttcttcataaatgaagtgtatagattcttcatctcctgtattccttccccaccccactccttttcccttttggaattttttttctttc

SEQ ID NO: 1007 - DNA, 1023 bp, Zea mays
  Clone ID: 700098870_FLI
cccgaaactagtcttccctcctgctggcggcgtgcggagggccggaggccgggtcgacaagaggagatgacgttggcggcggggctgggttacgccctgatcgcgctgggccctgccttctccctcttctccggcgtcgtcgtcaggaagcccttcctcgtcctcaccctcctctctagcaccttattttggcttataagtttgatagtcctctcgggaatatggagaggatttcttcctataaagtcaggagcttggtgggcatatgtgattctgatccttacatctgtcgcattgcaagaaggcactcgtcttgtgttttggatgctttacaagaaaatggaagagatgctagatgcttttgctgatagaatatctaagccacgtcttagattgactgacaagatgctgatttctttagctggtggtttaggccatggagtggctcatgcagtctttttctgtctcagtcttttgactccagcgtttggtcgagccacattttatactgaaaggtgctcaaagctgccatttttccttgcgtcagcccttattgcacttggattcttggtcatccatacattctcaatgattattgcttttaatgcatatgacgagggaaagaaaagtgatcaagtctttgttccagtaattcatttggctgctgctgcgatgacacttgttaacctcgccccaggaggctgtctcattggtaccccgctgttgttggtcatggctgcgctgaccttgcagcactgctggcgagtggcatgccggagattaactgagcaccggcatcagcagcataacagcagctagttgtaggcttgccatcatgtaattttcccatgtatgtttgactgaatcttctgatgtactatgacagtaaaaatcaggttctgagtcgtgtcgtgtagttagacgaggggttattatagtttgactcgatgttttgcatatgcagtatgtcctccctttcctggagcacttttatatctatctatctatataaccatgattgtt

SEQ ID NO: 1008 - DNA, 2048 bp, Zea mays
  Clone ID: 700098889_FLI
tctaatgtaccttcttcagtcatatctagccaaagcatgcacctcggagtccttgcgactgcatggcacgccattaacacgaagtccatgttcactgtctactacaagcctaggacgagcccttcagagttcatcataccgtacgatcaatatatggagtcggtaaaaaataattattctattggcatgagattcaggatgaggtttgaaggagaagaggcgccagagcagaggtttactggtacaatagttggttgtgaaaatcttgacccactatggcctgattccagttggagatacttgaaggtgcgttgggatgagccttctactatcccgcggccagatagggtctctccttggaagatagagcctgcttcatcgcctcctgttaatccactcgtgcattcttctagagcaaaaagacctagacaaaacgttcctccaccttcacttgaatcatctgttctcacaaaagaaggtgcaaccaaggtcgaaatcgattcagctcaaacacaacaccaaaattcggtcttgcaaggtcaggagcagatgaccttgaggaacaacctgactgaaagcgctgattctgattccactgttcagaagccgatgatgtggtccccatcactcaatgggaaagcccacactcattttcagcagagacctgctatggataattggatgccattgggaaggcgtgaaaatgacttcaaggacacccgttctgccttcaaggatgcccgcaccgcctctcaatcatttggagatacacagggtttttttgtgcaagcttatgatgacaatcatcaccgtctctctttcaaaaatcagggttcaactcatcgcttcgcagatccgtacttctatatgcctcaacaatcgtcagtgacggttgaatcaagcacaaggacacaaacagcaaacaatgacttgtgtttctggggtgaccagaatgctatgtacggcaatccaagtgaccaacaacagggtttcaactttggacaaaacccatcaagttggttgaaccagccatttccccaggttgaacagccacgagtggtcaggcctcatgcaacggttgctccatttgatctggagaagactagagaaggaagtggcttcaagatttttgggttccaagttgatacaaccagtccatctcctgtccaattgagctctccattgcccgctatccaggagcatgtgttacaaactcgaccatcggcaccggtgaatgaattgcaacctgtgcaaattgagtgcttgcctgagggatctgtaagcacagctggaactgcaacggagaacattcagcaagccccgcagagttcaaaagatatccaaagcaagtcccagggtgcttcaacaaggagctgtacaaaggttcataagcaaggagtcgcacttggcaggtcggtggacctctctaaattcaccgactacggcgaactccaagcagagctggacaagatgtttgacttcgagggtgaattggtatctggcagccaaaactggcagatcgtctataccgacgacgagggcgatatgatgcttgtgggagacgacccgtgggaagagttctgcagcatagtgcgcaagatctacatctacacgaaggaggaggtccagaagatgaactcgaaatcagctgcgccaaggaaggaggaatctccggcagcgggcggcggaggaggttgcgccgccgccacaaacgagtagtatggtggtttgctcttggtggcaagttgaggccaaggttttactactgctattgttattgctgatttgctctccccgccttccggtgtaaatatctgtgtgtacccagtcccggccttgtgctagtaagtagcaagcagtgttaccttttggtattttaaccagcagctaagttcgcggcattttagtccctgtaagcggtaagcagctctgtagcgtgagatagatggccaagcgccggtacgtacgtgtagtgtctggtcttctcactgagtgtactataaagagttaatataggagctgaccctgtgaacccgcgtgatggatgc

SEQ ID NO: 1009 - DNA, 3014 bp, Zea mays
  Clone ID: 700098936_FLI
cgacccacacgcacgcacatccactatccccggaccccgggccagtctcacctccttccctcgatcgcacgccactcccgtaggaatcccgaatccccccacccaaattcccgtctagccgtctacccgatcgccgtccttctcgctgcccgtaaaccctagcccagccctctacccccgccgtcgttgcccgtgcgctgtcgtgctcgggctgcccccgcggcgccgcgagccaaaccctagctgcctcctccagatcccgattccgcagggaagccggagaggtgagggccgccccgccgcagatggagcccgcgggggcgcgcaaggagtggcgcgccgtccccgactcctcgctccgctccaatggcgccgaggatgccgcggagcatgggaagctggggcagtcggaggaacgagctatctacgaggaaggggcgggtggactgggcgacttctgtaccatcactattgatgggagcggagggctcagcgaggacatcctgcagcagcgcctgcaaagtgtcgcacggcagcgggaggagctgcagcaagtcgagatcgagttgcgtgcgcaggccattgcacacccgcagatcatcgaggcgcaacaaagcttccaggctgctgccaaggagcatgctgcagctgtggcaaagatcaaggagcaattgcatgagcgggagcagtacattcttgaattagaaatgaaactcaatgacaaggatagagaactaaatgctctgaagattgatcatcaaacggtgtgggcaaatcaagatcttctcagagaacagaccaaagagctggcaagtgtcagaagggaacgtgacaactctgaagctgaaagagcccaacatcttaaacaaatccacgatctccaggaacttttgcgagaaaaagaaagccagttcattgcaatagaggaacagcatagggctgctcaagagaacattctttacaaagatgagcagttgagggaagcccatgcttgggtttctcaagttcgagaaatggatgcattgcagtctcagtccctacaagttgagttacgtgagcgcatggagcaatttaatcaatattggattagttctcaacaacagtatgctgaaatgcagcggagccttctccatacaatacaacaactccagcaagaattagctgaggcaagggaacggtctggtgcacaaaaggatggcccacatgtttctagggagggatcagctgaatcatcacttgttcaaagcatagcgaacagcgtgacttcaaatggtagtgcaactgcagatgggagccagcaactgttgaaaaacaatggaagtgtggatgtctctcttaagggcaataatgcctcagctgtacctgttccatctttattgggaataggtggtccggctgcgcatattgctgcaatgcattcttttatgattcatcctcaaggcattcctcaacctttagcatcacccaactctggcattcctcagtttggcagttttcagacacagcctatgattcaaccaaactcacattggccaaatcagcaggaagtacaaattgtctcacaaccacaagatgaaacaaactatcagacatcccaatcaggtcagactgcattgcaacaagacactattaatactgatgagctgtcccccaaggcaagtgagggtggccatccagaccatcttaatgcccaggggaaacaacagcagagccctgcaagtgcacctactgaatcaactcatgaacttactgttgttgaaacaaacatagctgaacatgtaccttatgatgaacaacaaaaaaccttaaaagaacaggattcactatcaaatataaaaagccatgttggaagagttgagcctcaagagcaaaatgctgaatccaaggttgaaagagctgcatctgacaagcaacctgaacctcaatctagacagcataaaccttcaaacttccctccaactacccagcttaacttgaaaaacagtgcaacagagaatcctaatgttgtaaatcaggttgatacaatgaaatcagttacaggtggttttggttcacagttacctcgtgtacctaaggaacctgctctcctagatgagagatctctattggcttgtattgtacgtgcagttcctgctggacctgagggtggaatcaggattagctcaactctgccaaataggcttgggaaaatgttggctcctcttcactggcatgattataagaagcaatatgggaagcttgatgattttgtggctagtcgtccagagctgtttgtgattgagggagacttcattcaccttcgtgaaggagcacagcagatcatttctgctactacagctgctgcaaaaatagctgctgctacagcatcttctgccccttactcatccttactgccttctgttgctgttactcctgtggcacaaagcactcggcaaaagaggggccctgcagttgattccagatcatcaaatgcaattctttctggaaatggcttcacagatcaatttaacatcattcagggggttagtgacgtacctgtttcaggcaaagtaagaaacaccctagataatggcttcttaggtgaagttcgaactgggcagccatctgtgctcacagctgctgcgaatggagcaagacatgacaaaggtacaaataatgtcatacagggttatggtggaaagcaacaagggaggtcaactgggatggcttacctttccagaagatgaagtagttttcactcgacgcaattggttttgagggtggtgaagctgttggaaaccatacaagtggcattgttttggcctccaaacggccgatgctgaagatgacctggattaaagttattctagattttttttgttgcaccattgctattcacagcgcctgtatgagggccttgttgtggcgaagcctgctgaaattttgcgactatgtaactcgtctgtgcttgtattgtggtgcacttggaatgatgtgaatgttatagcaaatctgggaaatgtggtcacattttg

SEQ ID NO: 1010 - DNA, 794 bp, Zea mays
  Clone ID: 700098959_FLI
ccaccaccgagcccatggcggaccagctcaccgacgaccagatcgccgagttcaaggaggccttcagcctcttcgacaaggacggggatggttgcatcacgaccaaggagctgggcactgtcatgcgctcgctggggcaaaatcctacagaggctgagctccaggacatgatcaacgaggtcgatgctgatggcaacggcaccatcgatttcccagagtttctcaaccttatggctcgcaagatgaaggacaccgactctgaggaagagctcaaggaggccttccgtgtgtttgacaaggaccagaacggcttcatctcggccgccgagctccgccatgtcatgacaaatcttggtgagaagctaactgatgaggaggtggacgagatgatccgtgaggctgatgtcgatggtgatggccagatcaactacgaggagtttgtcaaggtcatgatggccaagtgagccacagaaccataatctgaaggcagagaagattatgcattgcatattagtcaagatgcaactttttattccatcgacttctagtgaaacattctgctagttgtagttgctgaaaaaggcaatgtagttcctgctttgttcttccctccagtgtgttttcagaactgttgtttcatgtgaacttgtaatgattgccctctctgctgtgtcttgattgcagttaaaatcatatgtagtttcaccccacccacacatcaacttctgtttcacgctgtttgtatcaatggatggcccgttgtttttagtgcaatgatctttagttaccgtggc

SEQ ID NO: 1011 - DNA, 1350 bp, Zea mays
  Clone ID: 700098979_FLI
cgcagctcaaggccgcgcgggaggacatcaaggaactccttaagagcacatactgccaccccatcatggtccgtctggggtggcatgattctggtacctatgacaaggatattaaggactggccacagcgaggtggagctaatggaagtttaaggttcgatgctgagctgagtcatggagccaatgccggcctgattaatgcattgaagcttatccagcctatcaaggacaaatacccaggtatcacttatgcagatttgttccagttagcaagtgctacggcgattgaggaagctggtggtccaaaacttccaatgaaatatggacgtgttgatgtcacagcagctgaacagtgtccgcccgaggggaggcttcctgatgctggcccacgtgatcctgctgaacaccttagggaggtattttatagaatgggccttgatgacaaggaaattgttgcactatctggagcacacacacttggaagagcaaggcctgaccggagtggctggggaaagctagaaacaaaatatactaaggatgggcctggtgagcctggagggcaatcatggacagttgagtggttgaagtttgataatagttacttcaaggacatgaagtttttgagccagcttccctggaaagagcagaaggaacaggatcttctagttttgcctacagatgctgcattatttgaggacccatcgttcaaggtatacgcagaaaagtatgcagatgaccaggaagcgttctttaaagactatggtgaagctcatgctaagctgagcgatcttggtgcaaagtttgatcctcctgagggattctcactcgacgatgacacaagctcttcaccttccgacgagaagacggaagaacctacactggtagcggtaggagcggcagtagcaacagcgacagcggacgacaacaacggcgcagctccgcagccggagcccttcgtcgctgccaaatactcgtatggaaagagggagttgtcggatgcgatgaagcaaaagatcagggcggagtacgaggggtttggaggcagcccggacaagcccatgcagtccaactacttcctcaacatcatgatcctgattgcggggttggcgttcttgacatctctgcttgggaactgagtgttatatcatcatatgattatgatccgatttctgaagtctacgagtgtccactattgcaaactctgtaaacgtatgaaacatatctacgactagcattagagctacgtacactgtgcaaacagttttttttttttttttcgcgaattttggagagagacgagcaaaagaaatgtataacgagtgttggagaaatagcgacctgactatcaac

SEQ ID NO: 1012 - DNA, 1301 bp, Zea mays
  Clone ID: 700099002_FLI
cagcctcatccccttgcccacttctacagcccctctgctgcagcaagaaggaaagaagctagcgcttatagcttgtcagccatggccaccgccgccgcgtctagcctcctcaagtcctccttcgcgggctcccggctcccggccgccacgcggaccacaccggcgtccctcgtggtggccaccggcccgcgcggcgccggcgcggggcccatctgcgcgtccatgtccatgtcctcctccaacccgccctacgacctgacgtccttccggttcagccccatcaaggagtccatcgtgtcccgcgagatgacccgtcgctacatgacggacatgatcacctacgccgacaccgacgtcgtcatcgtgggcgccggctccgcggggctgtcctgcgcgtacgagctctccaaggaccccgccgtgagcatcgccatcgtggagcagtcggtgtcgccgggcggcggcgcgtggctgggcgggcagctgttctcggccatggtggtgcgcaagccggcgcacctgttcctggacgagctgggcgtggcgtacgacgaggccgaggactacgtggtcatcaagcacgccgcgctcttcacgtccacggtcatgagcctgctcctggcgcgccccaacgtcaagctgttcaacgccgtggccgtggaggacctcatcgtcaggggagggcgcgtcggcggcgtcgtcaccaactgggcgctcgtgtccatgaaccacgacacgcagtcctgcatggaccccaacgtcatggaggccaaggtcgtggtcagctcctgcggccacgacgggcccttcggcgccaccggcgtcaagaggctccaggacatcggcatgatcagcgccgtgccggggatgaaggcgctcgacatgaacaccgccgaggacgagatcgtgcgcctcacgcgcgaggtcgttcccggcatgatcgtcaccggaatggaggtcgccgagattgacggcgcccccaggatgggcccgacgtttggcgccatgatgatctccggccagaaggcggcgcacctggcgctcaaggccctgggcaggcccaacgccgtggacgggaccatgtcgccgccgttgcgcgaggagttgatgattgcgtacaaggacgacgaggtcgtggacgcctgagtgcggcaagcagagaggaggatcgacgccagcagcgtcttatcttaattgccttgttgttcaatgatgaatcgatcgaattcccttgggttagctttattattgttgttgttattattaatttgactcgctatagtgtgtcgtgttcatagcac

SEQ ID NO: 1013 - DNA, 1567 bp, Zea mays
  Clone ID: 700099019_FLI
agatatggtggggaacaatactgttgcttccctcttctactattctttgctcatcatctgcgccgctgcttggcacgcggatgcgtcccaagcggatcgactgagagaattcatcaggtctaggaggaacagtcctagtgaggctgataagggcacgtttgaggttgccaacatggggcacagcgtagctagcagcctcctgagcacaagctactccgacagtgaacagagcgccctgaaggcagccgacaagatcactgcgctgccggggcaaccggacggcggcgtcgacttcgaccagtacgccgggtacgtgactgtcgacgagaagaatggccgggcactcttctactacttggtggaggcaccacaggatgcctcggcaaagccgctcctcctgtggcttaacggagggcccggatgctcatcgcttggctacggagcaatgcaagagctcggtccgttccgcgtaaacagcgacaacaaaacgctgagcagaaacaaggcggcttggaataacgtggctaatgtgatcttcttggagtcgccggcgggtgttggattctcctactccaacacatcctccgactacggcctcagtggagaccgaaggacagctgctgatgcgtacttgtttttggctaactggctggagcgctttcctgaatacaaaagccgtccgttctacatctccggggagagctatgccggacactatgtacccgaacttgctgccaccatcttaacccagaattcctacaacagcaagacggccataaacctccggggcatcttggttggaaatccacttctggattcgtatatgaacttgaagggtgcagttgcctactactggagccatgggttgatgtcggacgaggtctttgacaacataaccaggcactgcaagtatgacagttcagatggtgtggcatgcagtggcgctttggaggcggtagatcctggacagattgatccttacaacgtatatgctccgatctgtgttgatgcggccaacggagcatactaccccactggctacctacctggatatgatccatgcagcgattactacacctattcctacctcaatgacccagcagtgcagaatgctttccacgctaggacgacaagttggtcagcgtgcgcgaacttgaactggacggacgcaccgatttccatggtgccaacagtcgcatggctgattgagaagaagctgcccgtttggatttttagtggcgattttgattccgtgtgcccacttcctgctacgaggttttccatccatgatcttaacctgcacgtcaccactccatggcgcccgtggacagtaaacatggaggtcggaggatatgttcaacaataccagggaggattcacgtttgcctctgtcagaggagctggtcatatggttccgtcttcccaggctgatagagcattagtattattggactcctttctgaaaggggtgctcccaccatacgtacaggagcagtaataattcctaaatatgtagagtgtcttgtcaatggcaaactcaataaaaactatccgtttttgtattact

SEQ ID NO: 1014 - DNA, 1592 bp, Zea mays
  Clone ID: 700099042_FLI
gtcttgcaagcctacatagctcaatgttcactattcatattaaatatgctggcttcagttgtggtgatatagggagctagcttgaaaactcagattcagatagaagaagtaatagccataggattttaaaggcttgcaagattaaaatcctggttgatggaaagctgtattacttgaaaaatacctcgttcatcaatctatctctataaggaaaggctagtagcatgatactgagtgcagatcagccttttaatatttctgcaatctttcctgtaaacacttttatgataaaataggacattcttttgaattgtggcccccttttatgtaggcttttcacttcttgggccttccttgctacatagaagacaatgaaattgtaattttggagctggaatagttctgcaggaccctctcagaaatgaagacttttactgtgccacacgttcacgtactcagtattcatacaccaatgatggacgtcagaagtgcacaagatttctgtgcgtcatttgggcattggtgcatgaactttgaaacaacttgttggtctacatttgtgtgctttttgcaggtactgggctgttcctgagctgagaagatgggcatgtgcagaagcacaatggtgactttaaggatttggcttgataaaaaggaagcgaaaagacagcttcgtcagagatagagctctagtcctacgggagttgcactctgctgcacagcgcgagtcttgcattgggcaacaagaaattctggaaagagagaacctaccaagagctgagacgtctattcatggaatcgtgacaaacatcgatggttgcagctttctctttccagaaagacctgatctgaagtctgtagtgcttaaagagcaaccattctctttgcagagggaaacatcgatgaacaaaccatttttcatgctgttgacattaaatttcagtgatggttgcagctgtttgagctcctcaattggatggcctgttgattttcagaagcgaaaagacagcttcgtcagagatagagctctagtcctacgggagttgtactctgctgcacagcgcgagtcttgcattgggcaacaagaaattctggaaagagagaacctaccaagagctgagacgtctattcatggaatcgtgacaaacatcgttaggtatgacactgaagatgaaaagttggctccacccaagaatgatttgatgaatcacagccgcagcaaccctgcaaaacggcacgtggaaggcactgattgccactcgtcattgccaaagaaactgaagtactttttgaaagacaagaagctgaactgctaaaagtgtaaaaccgtagaaggtagatagagaatgctgtaggtttgtttattttggttattagacgagttatacatagcatagatgcatgggaagttcgcatgctaaggttgaactcttctgctgcataggaaagttggctgacttcttatattatgcgagcctagcttaggtacctcctgtggggagaagcgattgcaatacatggtagcatgttgtagagctcctcaccccagttagtcagtgatccagcaacgatagtggagctgcgaccggatc

SEQ ID NO: 1015 - DNA, 943 bp, Zea mays
  Clone ID: 700099110_FLI
tctcactccactaccccctcatcctgccatccaccagcagcagtgcaagcatatggcgcgccgtgccagcctgctcctcgccgcggcgctcctcgtcgccgtcgctgccgcggcggtgccgccgacgtgcgagcgcatcgagtgcccgccgtacgtggtggtggacagcgccaacgggttcgagatccggcggtacacggacgccatgtggatcaccacggcgcccatcgaggacatctccttcgtcgccgccacgcgcaccggcttcctccagctgttcgactacatccagggcaagaacgcgtacaacgagacgatcgagatgacggcgccggtgctgacgcgggtgtcgcccagcgacgggcccttctgcgcctccgccttcgccgtgagcttctacgtgccggccaagaaccaggcggacccgccgccggccgagggcctgcgcgtggaccgctgggccggggccaggtacgcggccgtgcgccgcttcggaggcttcgtggcggacgccgacgtcggggagcaggcggcgcgcctcgaggccagcctccagggcacccggtgggccgccgccgtcaacgacgcgcgcagggccgacccggcctcgccttacaccgtcgcgcagtacaactcgcccttcgagttcaccggcagggtcaacgagatctggatgctcttcgacgccgccgacgcggacgacgacgccagtatgtgatgcgattccaagcgtgctctcggggcactgaggcgtttagggaaggacgcgcatgcacctgtgcagctgtgctacaatgaagtatttcgtgctcttgtgcgctagcttcgtttactttcgagttttcgagtaaggaataaggtgcctcttgttgcaataatgataaagctaatcctgcttgtaattacatttcgtggcatgggccattccggcaacatgtccagt

SEQ ID NO: 1016 - DNA, 1057 bp, Zea mays
  Clone ID: 700099123_FLI
tcgagttcgccaacgctctgttgccgattcgaccgtcgtcgctgctgcgtgtctcgttgcgtgttcgtcgggtgtcatttgttgtaccccagcgcttgtgcctactcctggctcgcgttggcgctcgcgcgcctgctcgttgtctctgcggtgcacccgctctcatccatcaggtttcgcgcatgctcgcgtctgccgtcgagccgttgaacctgttctcccttgctcgacctcgtctttacccttctggtggccattgtcattatggtgttggactacgttccatcatctagtcgcactggctattgactttgttggtcctttccatgttaaaccagcaagctccgctatcgtcactcagctgctcgccccgcgtgtgcttgtcaattttcttggtcgtgtctgccgagctgaccaacgttttagctcgccgttatcgccaagtcccacgcagccgtgttgttctctcgtcgtcgtccattcctattttcccccaccatatgcctcctagtcatggcgcgtgtcgtcgtctttaatctcagtagctcttccgctacgtgcctcgccgtgcttcgcctcctcgtgatcagccccatctgggtcatggagggcggaagatctcaacacctgtcagatgttcgacgataagcccgaaccagaatttatcaacattttcacaagtattgagtcacgtttgatgctggtacgtgaattaactacgtgatgtggaaaaccaaaactaagttgacctcaagatggtacaaggagtggtcttcttcgtacaacgatgtcgtcagtcggaccaacctaaagggcagacggaacaagtgtcagaacaaaggctgatcggcaagtggtcgccacctaacaaacactaacctagtgttacccaggcaagccccggtgcatgtaaccccttccttgtgtttttaaattatttttacacactttaagtctagtgaatgtgcattaggtttataggagttgcttggaaaccctttgatgcattggctaccttgaaatccattccttatatagatacttctggtgaagtatc

SEQ ID NO: 1017 - DNA, 301 bp, Zea mays
  Clone ID: 700099139_FLI
tcgaggacgcccagtcgcgcgccacctccagagtcccgtctatttagctgtgcacatcgtcgacttccgcggaagacttgaagaaattctgttcacttgtcattacattcgtgtgggatttctgatggatttcaatgcttccacgttgaaccctctggacttgtttcaggataggaatctgatgtgaagaatgtacatatgctcgatctgtgtgtctgctgagcgtgtgtggatgtggactgctgtaggtaggtagatgctgtggatattggagggttctaagttgtcttcatttccatcc

SEQ ID NO: 1018 - DNA, 1090 bp, Zea mays
  Clone ID: 700099206_FLI
tgctgatagggccgcgcacgctcggggcctctctggtggccgcccgctgcgcctcctcctctgccgccgctgccgtcactgcctatgatcatgcatcgtttgtcaaggaaatcgccgcaaccgatcctccagagcatctcaactctctcctcaatgtgcttcaagcacgaggtgaaaagattgtttctcctggagcaaaaagagggttgattccatgtgttgttcccttatcagaaagtccagcaggtgatttgacatctctccttagatggccaaccgctccaactgggatggaaatgcctgttgtggaagttcgtaaacatgggctgtggtttttggctaagaatgtgaaacagtatatccacagaatacttgttgaggctgacttaactggtgatgatttatgggctgctgtgggcgaagctggtaaaaacctttacgctaaaggagaattcaaagagtcgcaggtggcagaccttgatgtctatttgttgaagaaggttggacttttccctgatgttatagagaggaaaacattgcgccatctcgaaaaaggagataatgtctcagctctcatcactggagaattctataccagagataaatttccaggatttggaagaccctttgtgttcaatgcagagatttttaaaagagttggacgtacatctgaagccaaagattcagctcgagtggctctgaaatcaccatggtggacacttggctgcagttacgaagaggctgctgaactagctgggtgggaggatgagcagctagagtttataagagagaaggtaactgaggagggtaagcgcgaggacctgaagagaggaaaggctccagaacaggtgattcttgacgaggcggcattcttaatggatttagcgtctgtggatggtaactgggacgaggttgtggatcggattgctgaatgttacagagaggctgggcttcatgacattgcgaatttcattgcctacagggaatagatgttagattccctatggtctagaatgttattcaagaaattttgattcatttgtgctctgataatatatattcttatatacgggaagaacgcacaaccgtt

SEQ ID NO: 1019 - DNA, 2489 bp, Zea mays
  Clone ID: 700099215_FLI
tggggccggaaatgatagagcaggatggatggtaggaaaaggaaggggaaattcaggaattctctcaggcgtatggctatggagtgcctgtgctctggtgagcagttgaaggcgtcagatgagaccatgcggtcatctgattctacgatcacaaaggatttctcggccagtgggtactcttctcggaatggagagattgagcagtaccttgataatggcaacatagaggaagccgagttgtcgctccgggagggcatttgcctaaattatgaggaagcaagggcattgctaggaaggctagaatatcaacggggtcatgtagaggcagcactccgtgtctttgatgggatagacatatctgcattagttcctaagatgaaaatctcaattgctagaaaaacagaccgtcggaagactcattcacagtgggattccccaccaatgcccttgcatgctgtcagccttctcatggaggccatatatcttaaagcaagagcacttcatgatcttgggaaagataaagaagctgcacaagaatgtagaatgatattggatattgtggaagcagctgtacctgagggcttgccagcaggctttgggaaaggctgtaaattgaacgaaataatatgcaaggctgtagagttgctccctgagctgtggaaatcaggggggttttcacttgaaaccatttcttcatataggaggtcacttcttaataattggaatcttgatggagagacaatagcaaggatacaaaagaaatttgctgtttttctcctatatagtggttgtgaagcacgccctccaaatcttcattctcagttggacggttcatttgtacctcgcaacaatattgaagaggctatccttcttttgatgattcttttgaggaagtccaatctcaagaggattgagcaagatccctctgtgatgcatcaccttacttttgcactgtccatgtcaggacagctaattccactggctggacagtttgaagaattgttacctggtgtgttagacaaaaaagaatggttgtacagcgttgcattgtgttatttagcagaagaagatgatctgagtgccctgaatctactcaaaattatactaaaatctggagaggactccgttcaactcatagaactgcttctagcttcaaaggcttgcattgagatgagtattcatactgaaggtgctttttatgcaaggagagccattgcaaatatgcagggaggatgcaaaccaatggcaggacttgcaaacctattgcttggtgttgcactttctaatcaggctagaagtgcaatatctgatacagatagagcttcttggcagtgcgaagcactggaagcccttgggaatgctgaaaaaaatatacatgggaaagattctagggcattatacagtctcagccttgaaaatgctgtgcagaggaaattagaattagctgccttttatgcaaagaggctggtgaaacttgaggctggatcagagttgaggagttggctccttttagctcgaatacttagtgctcaaaagctgtttgctgatgctgaaacagttgttgatgctgctctagatcaaactgggaaatggtgtcaaggagatttattgcgaaccaaagccagaattcaggctgcacaggggcaatttagagaagcggttgaaacatacacccaacttcttgctatcattcaacttagaacgaaaagtttaactgctggagtttgcttgccaaagggcaacaaggatgataaaggcctggaaacagagacctggtatgatctagctctcttatacctaggtatggcacaatggagggatgcagaggtttgtgtattgaagataagatccatcagtccttattctgcattggcttggcatgctacaggaaaaatatatgaagcaaaaggtcttagaaaagaagctttgggagcttttttcagagccttagatcttgatcctaaacatgtcccaagtttaatatcaactgccactgttctacaacaacttggtgacaggccattgccttctatacggtgcttcctgactgatgcattacaactggatagaactaatcatgttgcgtggttcaatcttggccttctttacaaagaggaaggtggcaggtcagcagctgaggctgctgaatgcttccaagctgctgcttttcttaaagaaactgcaccttcagaacctttcagatgacatctacaggggctatagatgtaagctgctgtatgtatttttgatatatttcactgatgaaatagtggattacagagttctaaaaatgatcttcttgggagatcacagcattggaaactgttggaaaaaatgtttaacaattcaatctatagttccaattgttgcctgtatagcaacaagaaagacgatgatcttcgccttgtgtaggaacagtgcttactgtgatatatatatatagatagatgaccagtacattgtgtatcttgagtaaaatggtttcacat

SEQ ID NO: 1020 - DNA, 892 bp, Zea mays
  Clone ID: 700099230_FLI
aggagacgtacgctctctgctagcacccatcttgcagcaggcggagccgcccgacccgatccgtgcgtgtgtgttggtagagatggctacagcagcttacgctcccatggcgagccaggtgatgaagagcagcccggtgcactcgaggccgaggggcctgtcaggcgctgcgctcacgcggccccggccccggttcagcgtcgtcaaggccgccatccagcccgagaaggcaacgtaccaggtggtgcagcccatcaacggcgacccgttcatcggcagcctggagacgcccgtcacctccagcccgctcatcgcgtggtacctctccaacctgccggcctaccgcaccgccgtgagcccgctgctgcggggcgtcgaggtcggcctcgcccacggctacctcctcgtcgggcccttcgcgctcaccggcccgctccgcaacacgcccgtgcacggccaggcgggcgcgctcggcgccgccggcctcgtcgccatcctcagcgtctgcctcaccatgtacggcgtcgcctccttcaacgagggcgacccgtccacggcgcccacgctcacgctcaccggccggaagaaggaggccgacaagctgcagaccgccgacggctgggccaagttcaccggagggttcttcttcggtggtatctccggcgtgctctgggcatacttcctcctctacgtgctcgacctcccctactacttcaagtagaatacaaattcataaagatgcatatatataatatagctccgcctccgatcctcctctctgcgtgcaaaggtatgccatttcagcagtgacgagcatcgtggatacatgcaattcctctgcacatggatggattgggatgtaacttggaactgttaatttttttttactttg

SEQ ID NO: 1021 - DNA, 1813 bp, Zea mays
  Clone ID: 700099246_FLI
gtcgggggagcccagcagttcgtggaccggagcaaggtgaggattcttctctgcgacggcgacgccaccagctcccgggaggtgctgcggctcctctgcaactgctcataccatgtgacctgcgccaagtctccgcggcaggtgatcaatatcctcaactacgagggcggcgagatcgacatcatcctggctgaggtcgatcttccggtctccaagtgcttcaagatgctcaagtacattgcccggaacaaggacctgcgtcacatccccatcataatgatgtccaacagagacgaggtgtctgttgttgtcaagtgcttgcggcttggcgccgccgagtacctggtgaagccgctgcgcacgaatgagttgctgaacctttggacccatgtgtggcggcggagacggatggtaaagggcactatgctgactcaccttaacctctgcgtttagaagcatgctctaggctgagatgctcgtaggcgttgatgtaccgccgtgaattattctttaaatcgagtgctggtgttggcagcttggtttgcccgagaaaaacttcttcaatgacaacttcgagttggtgctctcagaacctagcgatgccaataccaatagcaccaccctcctctcagacgagaccgacgataggcctaaaggaaacacgaatcaagaaacaggcacctcaaagcaacttgaatacgagtctaatccttcggttgctgagcccgaccagagagaaaagatggagggtgttccaggctctgccctagatgccagtaaaaaatcctctccaagaagagcgttttcacgccctataaaaactaacctgagggttgccgagtcgtctgcatttctagcatatgtcaagccaagcaccccagccaccagctcatttgacagcgaattacaaaggggtggcagccgattagattccttggataaccagggtaattgctctagcgcaaccgatagaagtgacactggtactgatgtaaatattcggagtaaagaagcttttgagatgcctgcgcagtaccctatggtatggttttcttcctctaacatgcatatggagcgaagcagcgaaggccataatgatacttcaggaactccacctgcataccatttcccattttattacccagggatggtagagcacaacatggcactttcgtcggcgcaagattttcaagcaaacataaacaatgctcaagcacatacaccgccagcgatgcttcctcagtacaatgtttatcctcagtgccatggtttacctgtgataccatcatttcagtttaatccttctggcatgagtacgcactcaagtcatttaccaacgcaaaatgtgtggtcatcggcatcgagcacaccaccagtgcctgaggaaacatgcagtcgctctgaaaggagggctgcagcacttgccaagttcaggctgaagaggaaagagcgctgctttgacaagaaggtgaggtatgtgaaccggaagaaactcgctgaaacgaggccaagggtgcgaggtcagtttgttagacagccaaccaatacggatgtcatcagcattggagatgatatatctgaagacgaagatgacgatccatcgtccagggaggtagatatggtttcttctccagagtagtagtggagaggtcctccatgtgaaaaaatagactgcagatggttactgctcatcttgttacaactcagtagacctaggcaatacaccctttttgctcacacacagtattacatttttgtccctaaaacatgtggctgttaccctggttgctttaatgaagaaatcatctttgat

SEQ ID NO: 1022 - DNA, 1123 bp, Zea mays
  Clone ID: 700099261_FLI
tcaatttggcacagacagttttacatctatgtcctctccatgccatctcactagttcgttcctagagcagtctgaagttaccattccatctaactacgaccctctttttttgttatgtttcattttgaacaggtggttggaactctaggctacacagctccagaatacatgcagactggacacctcacggcgaagagcgacatatggagctacggagtcgtcctgtacgagctcatcacaggccgccgccccatcgaccagaaccgtccaaagagcgagcagaagcttctggactgggtgaagccatacatctcggacgtgaagcggttccccgtcatcatcgacccgcggctggaggggcactacaacctcaagtccgcgacgaagctggcgagcgtcgcgaaccggtgcatggtccggctgcccaagtcccgccccaagatgagcgaggtgtacggcatggtccagaggatcgtggacggcgtcgggaccggcccgccgcagcccccgctgctgcactaccaccatggcggcccggcctccgagccgggtgccaagcgcgccgagaaagggtcgttgaggaggaggttccgggaattcaggtccggctgccggcacgttgtcctgcggcggggcaggaagcctgaggtcgtgaaggacctctgagggagggaggcggtggtggatccggtgctgcaagtatatggtagtagtaggtgttcatagagacggtggtaacagttccaccgtgtagtgcttgggttggtatagggtgagttcatgcatgcataccagtcttgaagaagagagaaagaaagaaagacaaggtgcacagttgagcagtgcgttcgtgtagagtagtgctagctgtggttttgatctcctgtgtggttaacacaatgtgtgagctgcgatgaggtgatctacagcataggcacccccttgtgtttacagtggaacttctgctggctctttcgtcttgttgagaatcctttcagtagagttagaaattataggagtggtcttcgggaaagcctgcttccgttctgttccattgattcagattctcactcccttcttcgagtgtttatttgattttttatattaaagttgagattcttcg

SEQ ID NO: 1023 - DNA, 1446 bp, Zea mays
  Clone ID: 700099285_FLI
tctttgctacggcggctctgtaatctggtccactagcgctccattcgaccccacccacagccatggctgccgtgaccgcggcggccgtctctctgccctcctcctcctcctcccctgccgccgccaaggccaaggcgtccgcgtccgcgtccccgtcgtctccatgcggccacctccagttcccgcggcggcacggcggcccgcgcgcggtgcggctgcgcgtgcaggtgtccaccaccgagaccgcggaggcggagccggtcaagaagctggagaaggtgtccaagaagcaggaggaggggctcgtcaccaacaagtacaagcccaaggagccgtacgtcgggaggtgcctgctcaacaccaggatcaccggcgaccaagcgcccggggagacgtggcacatggtcttcagcacagaaggcgaggtcccctacagagagggccagtccatcggcgtcatcgcggatggcgaggacaagaacggcaagccgcacaagctcaggctctactccatcgccagcagcgccctcggagatttcggcgactccaagacggtgtcgctgtgcgtgaagaggctggtctacaccaacgatcagggggaggtcgtcaaaggagtctgctcgaacttcctctgtgacttgaagccaggcgctgaggtgaagatcacagggccagtgggcaaggagatgctcatgcccaaagaccccaacgcaacaatcatcatgctcgcaacgggtaccggcatcgctccgttccgctccttcttgtggaagatgttcttcgaggagcacgaggactacaagtacaccgggctggcgtggctgttcctgggcgtcccgaccagcgacaccctgctgtacaaggaggagctggagaagatgaaggagatggcgccggacaacttccggctggacttcgcggtgagccgggagcagacgaacgcggccggggagaagatgtacatccagacgcgcatggcggagtacaaggaggagctgtgggagctgctcaagaaggacaacacctacgtctacatgtgcgggctcaagggcatggagaagggcatcgacgacatcatgctcgacctcgcagccaaggacgggatcaactggttggactacaagaagcagctcaagaagagcgagcaatggaacgtcgaagtctactgatgatgatccttcattgtattgttcagctcaagcaatctggtggtgatgagtttgcattgcattgtacgtagtattgcggagatcaatcgaatcgtttggctcgtcgtcattctatcgatgtacatacattatatatgatgaaagacatatataatcgtttctttcaggaatttgttgtctctctgcacgtgaatttgttgcgagaaagaaaggacacacattagccttttctttattagggcaattatgaattatacccttctctgattctgatttt

SEQ ID NO: 1024 - DNA, 3214 bp, Zea mays
  Clone ID: 700099305_FLI
caactttactacccgtctcgcgcgagacggaacacattccgcttgtcctctctcgccgctgctccgacgagctcgccggcgccgactcccctcccgtcggaccagcccgccgaaagcggccggacgaacgagaggcttccctcccctcgcacttgcctgcctcgtcgccttcctgagcctctttctgcgcccggccacgggctcgcggccccacgcccgagcacgtgcagcaggcgccgaacccgcctcctgtgccaccccatcggagctcgccggccacgtggagggattccttttcctcgcagcattcctcgtcgccgacggcttcgtcgtgctccaggggttggattggcgtggagcggagagcagtgcaaacctgggattgaattctggtgtagatggattccacagctcttcaatatgaaaaccaaaaattggtgcaacaactggaggtacagaagtccgaaatgcatgcattggagcgcaagttcaaggagcttagtgatgatcaatgttcttatgacaagactctgatttctttgaataaactgtggaatcagctgattgatgatttggttctgcttggagtacgggctggtggggatttggataatttgcaagcacttgaccatgaagagttatcagaagaatctttggagtcgtgtccttccgaggagatatttctcttaaggctcttgaagacaaacaacatcagagataatagtgacactagcttgttgaaatttgttgaagaagctcttgcttttcggtcttcagcaactgttactttgatgaagtccctgcaagagactatttcttcgcagcaagctagaagtgagtctttgtctttagctttgaatggacaaaagtcaaatgaagatgtttgttgcccttcgaaatcataatgattgcttgaaagaggtggcagagaatgcgagtcaagccatctctattatcaacgagaagcacaaaaggtatcttgatgagattgaggcttttaaaagcaaccattcaagggagctacaggaaatcaagcgtatttcaggtgagctagaggaaagcattgcagagcttgaggaaagtcaaaggaagttggttgtgctccagttgcagaggcatggttctgtaatggatgcatctggggcaaatgctgtgaatggtggtatttctactcataaatcttcagataaaagtatgagctggcaagacctcaaagatgctgttgacgcagctaagaccctcgcaggaaaccgtctattagaactccatcagactcaagaggataatctgatactatccaaggagctgggagatcttgaggggcaattgaaagatgagaagtatgtcttggtatccaaaccgtacatgattcttaatgataaactacaacatttgaatgctgagatagagcgttatagagggttggttgaagttttacagaatgacaaggaccagctcatgcaaagggagaaagaaatttctgcaaaagcagaatcgctcgacagtgttaaacaaaccattatcacatatgagaaaaaaattgaagaactggaaactcaaattcagatactcttttctgaaaagaatgatctcgaaaccaaggttgaggagactttgcaagattcaggtaagaaagacttcaagaatgagattcatgttatggctgcagcactctccaatgaactgggtatgatggagaatcagttgagtcgatcaaaggatgcagcttctgaagcacttgcattgcgtgagcaagctgaatcattaagatcattggtagctaaaaagattgaggaacacaagaagatttcggataaatacaactcacaagtaattgagatcaagtccctcaaggcattggttgaggagttggagcaggaaaagcaggagctggagtttattgcagatatgtacgtgaaagaaagttctgagtctaggacaattgctgatattgaagaatcagaaacccgagctcgcaatcaggctgaatatttgaggagcaatctagaggagcatagtcttgagcttcgggttaaagcagcaaatgaagctgaagctgcatgccagcaaaggctttcctttgctgaagtggaactagaagagttaaggaccaaagtagatgcatctgaaagagatgttgtggaacttaaggaggcaataagaattaaagaggctgaaggagacgcctatatttctgatatcgagacagttggtcaagcatatgaagacatgcaaacgcaaaatcagcatcttcttcaacagcttactgatagagatgactttaacataaagctagtatcagatagtgtgaagatgaaacaagcttgtagttcccttctctctgacaagcttatgctagagaagcaactccagcaagttaacacttcactggagtcatctaaactgaaaattgcccgtggcgaagagcagatgaagacttgtgtagcgcaagctataaaaacttcagctgaaaacagacatcttactattagcctggaaaggattgcgctggagttatccaacacagataaggaactcaagtggcttcggtcctccgttggatcctctgagaaagaatacgagcaaactcagcaaaagatatctgagctgagagcgttactggagcacgagaggagtgagaggcggcggcttgaagaacaatatgaagaggtgaaaaatgaagttatggagctgacctctgagactgaagagactactgtccggaaacttgaggatgaaataaaagaatgcaagggtattctcaagtgtggtgtatgctttgaccggcctaaagaggttgtgatcaccaaatgtttccacctattctgctcgctatgcatccagagaaacctcgagattcgccaccgaaaatgtcctggctgtggaaccccattcggacaaaacgacgttagggaggtgaagatatgaacctcaccaaagtgacagtgacaaaaccgacttgcgtgtgaacagcagcaacaaactcccttgtgaatatcgtctgttatgttggcgaacatctagatctaacttgctttattactgggattaaaattaggataagaactggaagaagtgaagttcctaatttatttgctatcgtgtgtgctatgtatgattacccttggcagcgagtggtgtatctgctgggtgtcaatatgctcgaattctagctcctccctgctagcgggtgcatgccagttttattaaggct

SEQ ID NO: 1025 - DNA, 1045 bp, Zea mays
  Clone ID: 700099308_FLI
gatccgggggccctgcccggtccagcggtcctgccactttcgtctgcctcttgctccttcgcagctccgccccgctcctcgccgctgtggcctggtccctttatataacgcctcccccttccggtccgcgcccctcctccgctgccctcctcgcctccctcgattcagggttcagtgaattcggacagaacccggcgtgtccgtgtcgaccgacccctccccctgcgagcctgcgacgagtctcctgccgctcttcccggccgggcgaaatggacggtgtcgttgtcaggagggtcatcccttcggataacagttgcctcttcaacgctgtgggctacgtgatggagcacaaccgaaataaggcttctgagctcagacaggtcatagcagcaacagtcgctggtgatcctgagaaattcaatgaagtgtttcttggcaaaccaaatgaagcgtattgtgcttggattttggatcctgaaaagtggggaggagccattgagctctctattctatccgaatactacgggcgtgaaatcgcagcatatgacattcagaccactcgctgtgatctctatggtcaggagaagaattacagtgaaagggccatgctcatttatgatggtttgcattatgatgctctcgctatgtctccggctgaaggtgcacctgaagaatttgaccagacaatcttccccgtcaatcatgaccgttccattggtccagcagaaggccttgccctcaacttagtgagggaggcgcaaaggaagaggagctacactgacacggcaaacttcactctgcgctgcggggtgtgccagatcggcgtcatcggtcaacaggaggctgtggaacatgcgcaagccactggccacgtcaacttccaagaatacaaatgacagtacaagatcagactgttgtgctgtaaacttgaccatcatttggttccaactgacattctcctcccgttggatatggttggcgctacattgtatcacagtgtaattcttacggggcaaacagaataatggtcaccttcgttctggac

SEQ ID NO: 1026 - DNA, 1391 bp, Zea mays
  Clone ID: 700099317_FLI
gcggccagcagacactgccatgaggactctactaccggtggccgccggccgcgggaccgtcgcctgcgcggccacgcccgtcccccggaggtcgctgctcctctccaccgctgccgcaggtgcggcgctgcagccggagcaggtggctggaacgaggccgttgaggctgaccaggagcgaggccagcgccgtggcaaagcccaggaccttggccgacgaggccatctcgtgggcgaagaaagacaaccgccgcctcctccacgtcgtctaccgggtcggcgacctcgacaagacgatcaagttctacaccgagtgcctggggatgaagctgctcaggaagagggacattccagaggagaagtacagcaacgcgttcctcgggtacgggcccgaggaatcgcatttcgtcgtcgagctcacttacaattacggggttgacaaatatgacataggcgaagggttcggccatttcggcatcgcagtcgaggacgtggccaagacggtagagctcataagagcaaaggctggaaaggtcatcagggaagccggtcctgtgaagggcggcgagaccgtcatcgccttcgtggaggaccccgacggctacaagtttgagatcatcgagaggcctggaactccggaacccttgtgccaggtgatgctccgcgtcggcgaccttgaccgtgccataagcttctatgagaaggcctgcggcatggaactgctccggaagcgagatagccctgagtacaagtacacagtggcaatgatgggtttcggccctgaagacaaggacgcggtgctggagctgacctacaactatggtgtcaccgagtatgccaaggggaatgcatatgcccagatcgccattggcaccgacgatgtctacaggaccgcggaggcggcgaagctgtccggaggccaggtggtgcgggagccggggcccttgccagggatcaacaccaagatcacagccatcctggaccctgatggctggaaattggtcttcgtcgacaacatggacttcgccaaggaactggagtagccacgccaacgacctcagacgccctgcaacaggattaactcgcactgctgttggtccgtaattaaaatgaaagctactagtgaaaccgcgaggtctgtttcgtgctcaattagcagtgcgcttttttttccgctcccggtcggtcgggccggcgtcctcgttcacgtgaacgatgacgatcagcctatggttgggagcgtttgcagcactttttctgggggcgctagagaacggggatgaatactgccgcgcctttgtaatctcgctttttgctcgatgcaacttaaaatcctgtccctgtctgtctatcacggaattaagaagcacgtgcgggagccgcaatttctgg

SEQ ID NO: 1027 - DNA, 908 bp, Zea mays
  Clone ID: 700099348_FLI
ctgcgtgcagggcgcgagcgcggagggcacgcccaagaggctgacctacgacgagatccagagcaaaacgtacatggaggtgaagggcacgggcacggcgaaccagtgcccgaccatcgacggcggcgtggagtcgttcccgttcaaggccggcaagtaccagatgaagaagctgtgcctggagccgacgtccttcaccgtcaaggcggagggcatcgccaagaacgccccgcccgagttccagaagaccaagctcatgacccgcctcacgtacacgctggacgagatcgagggcccgctcgaggtcggctccgacggcacgctcaagttcgaggagaaggacggcatcgactacgccgccgtcaccgtgcagctcccggggggcgagcgcgtgccgttcctcttcaccgtcaagcagctcgtcgccaccggcaagcccgagagcttcggcgggcccttcctcgtgcccagctaccgcggctcctccttcctcgaccccaagggccgcggcggctccaccggctacgacaacgccgtcgcgctccccgccgggggcagaggtgacgaggaggagctccagaaggagaacatcaagaacgccgcctcctccaccggcaacatcacgttgagcgtcaccaagagcaacccggagaccggcgaggtcatcggcgtcttcgagagcgtgcagccgtccgacaccgacctcggggccaaggcgcccaaggatgtcaagatccagggggtctggtacgctcagctcgagtgattcgagtgtctaactgctaggtgtccgaccgccgtcatggatcttgggaaggtgtatgtataccatggaaaactttggagagcagaggaggaatcgtgtatgtaatgtacttgttaatgcaaattcgggctgtcgctttttt

SEQ ID NO: 1028 - DNA, 1388 bp, Zea mays
  Clone ID: 700099354_FLI
aagcaaggaatcccccgatggctcatcgcgttctcctcctcctctctctcgcgtcggccgccgcggttgccgccgccgtcgacgcggaggacccgctgatccggcaggtggttcccggtggagatgacaacgatctggagctgaacgcggagtcccacttcctgagcttcgtgcagcggttcggcaagtcctacaaggacgccgacgagcacgcgtaccggctgtccgttttcaaggccaacctgcgccgcgcgcgccggcaccagctgctggacccgtcggcggagcacggcgtcactaagttctccgacctcacgccggcagagttccgccggacctacctcggcctccgcaagtcccggcgcgctctcctcagagaactcggggagtcggcgcacgaggcgcccgtgctccccaccgatggtctccccgacgatttcgactggagggaccacggcgccgtcggccccgtcaagaaccagggttcgtgcgggtcgtgctggtcgttcagcgcgtctggagcgctggagggtgcgcactacctcgcaactggcaagctggaggtgctttcggagcagcagttcgtcgactgtgaccacgagtgtgattcatcggagcctgattcatgtgattcgggttgcaatggtgggctaatgacgacggcattcagttatctccagaaggccggtggccttgagagtgagaaggattacccttacactgggagtgatggcaaatgcaagtttgacaagtccaagattgttgcttcagttcagaacttcagtgttgtgtctgtggacgaggctcaaatttctgctaacctcatcaaacatgggccattggcaatcggcatcaatgctgcctacatgcagacatacatcggaggcgtgtcatgcccatacatctgtggcaggcaccttgaccatggtgttctccttgttggatatggtgcttctggtttcgcccccattcgcctgaaggacaagccttactggatcatcaagaactcgtggggcgagaactggggggagaacggatactacaagatatgcaggggttccaacgttcgcaacaagtgcggcgtcgattccatggtctctaccgtgtccgcagtccacgcctcgaaggagtagactctggtcagcggtgataatcgtgattccatatattgtagaactataatccctgctagtaatccatttgtgctgtttatgtatcgaaggcagcaaagatgtgtgaagcggcaatgggatgcttgctgtaaggtaatatgtttggcttgctaggcatgctacacgctatttggatgtagcaacgttatcaccagctgtatacgctttttaatcgacaacatttgaataatatgtacataacattatgttgtgctc

SEQ ID NO: 1029 - DNA, 1722 bp, Zea mays
  Clone ID: 700099414_FLI
tgaaattcccacgcgcccgtcgtttgccaccttccccaccagcaccaagcagcgagagcgggacggggcagagcaagagctaggtataacccacgcccaccatggcgacgcccggcgagcagcaggcaccggctgcggcggagtaggtcgtgtccgtcgagatgcctgcacccgacgggtggaccaagaagtttactccccagagagggggaagatccgagattgtttttgtttcgccaactggcgaggaaattaagaacaagaggcaactaagccagtacctaaaggcacaccctggaggccctgctgcttcagattttgattggggaactggtgataccccaaggcgttctgctcgcattagcgagaaagtcaaggtttttgatagcccagagggcgagaagatcccaaaacgcagcaggaactccagtggtaggaagggtaggcagggaaagaaggaagcccctgaaactgaagaagccaaagatgctgaaaccggacaggacgccccaagtgaagatggcacgaaggagactgacgtggagatgaagcctgctgaagaggcgaaggaaactcctactgaaactgatgacgctgagaaggcttcagacaaggtggacgatactcctgctccagcgccaatggaagaagaaaaagaaactgagaaaccagctgaagctgttgtagctcctcctgcgcaatcggaggagaagaaagaagatgtcaagccagatgagcctgaagctgtggctccagctccagtaagcaacccaactgagaactcagcccgtgctcctgccgagcctgctgctgttcctgccccagcgcctgagaccgaaccagttgccgagcctgctgctgttctcgccccagcgcctgaaaccaaaccagatgccaagcctgctgctgttcctgccccagcgcctgaaaccaaaccagatgccgagcctgctgctgctgctgctccagtgcctgacaccaaatcagttgctgagcctgctgctgctgctgctccagcgcctgacaccaaatcagttgctgagcctgctgctgctgctccagtgcctgggaccaaactagttgctgaatctgctgctgatgctgttgctgctccggcgcctgaaaccaaatcagatgccgagcctgctgctgctccagtgcccgagaccaaaccagttgctgaatctgctgctgacgctgttgctgctccagcgcctgaaaccaaatcagatgccgagcctgctgctgccgctgatccagcacctgaaatcaaatcagatgctgccgccgctgatccagcacccgggaccaaggcagatgctgccgccgctgatgccgcgcctggagccgagccagacgccgctccactagagaacaccgccgccgacaaaggcggaagcgaggagagcagccagcccgtgaacaacgggcactcaacgtgaagtgcatctgaggccggaatggaacaccccttccagcaccgtgtatctcatgtaggaacaaacatttgcattcgcattgtaatctgatggatcggtaagcatgttgattagtcagtctgacgctgctgggtgacatgttggtaattaggctctgcatttgagctctcttttttttgtatggctgctgtcgccgccgtacatgtatcctgtatccaccaccaccatcatcctcttggactattggttgtgttgtacctaactgagtaagcatattattatc

SEQ ID NO: 1030 - DNA, 1888 bp, Zea mays
  Clone ID: 700099501_FLI
tcacaggagagggccaaacaactgatgttggagtacgcaggatctgaacggggtcagggtgacacagaccttgatagtgttgtttcttcaatgccttcttcacctggaagcgaagactttgacaacatgtcaattgacagttcttccagcagatacagcttcctaagcaaaaggtctaatctgatgcaaaaattcaaaaggtggggaaggagcaaggatgacagcagtagtttagcctcctccatcagtggctctccaaggaggaaaccaaagggcccactggaagctctaatgctaaaaaacgctggagatggtacagccataacaacatacggaaagagggatcccaatgatgtcttggatgacgaaaatgtcgcgtcctcattccaattgatgtccaagacagttgaaggttttgctgatgagaagtatcctgcttacaaagataggcacaaacttgcaactgaacgggagaaggctataaaagagaaggctgggcaagcaagagcacaaaggtttggtggtggccacagttcagctctaatttcctctccaaaaggtgcactccctccaaaacttgctcaaattaaggagagatcccctgcagctaatgctgaatccagtgagcaatccagtgacaaccaaaacaacaccctggtggtgagccagatgaagcttgccaacgttgagaagagagcaacaagagttcccagaccacctccccctcgatcaaccactgcttcaggggctaccagtattgcaagtggagtacaaacgccacgagcaccaggtgcaccacctcctccaccaccacctccagggaaagttggtggcccaccgccaccaccgccacctccaggtgctctaccaaggaaccttggtgggggtgacaaggtacaccgtgcgccggagattgtagagttctatcaaagtctcatgaagcgtgaagcaaaaagggagacatctttagggtcaatatcatccaatgtttctgatgccagaagtaatatgattggagagattgagaacagatcaacattcctcttagctgtaaaagctgatgtggagacacaaggagaatttgttgaatctctagcaaatgaggtccgagcagcaagcttcataaatattgacgacgttgctgcatttgtaaattggttggatgaggagttgtctttcttggttgatgagagagcagtgctaaaacattttgattggccagagagcaaaacagatgcaataagagaagcagcttttgagtaccaggatctgataaagttacagaacagggtttcatcctttactgatgatccacaacttgcatgtgaagaggctctcaagaagatgtattctttgcttgaaaaagtggagcagagtgtctatgcactactccgtacaagagacatgaccgtctcacgctacaaggagtacgggatcccatttgactggctgtcagattctggagtagttggcaagatcaaagtggcatctgttcagcttgcaaacaagtatatgaagagggttgcctcagaacttgatgcattagaaggcactgagaaagagcccaatagagagtttttgcttctccagggtgtgaggttcgctttccgggttcatcagtttgctgggggctttgatgcagaaagcatgaaagcttttgaagagctaagaagcaagatgaccacacaggcatctgctccaccaatatctcaaggctgaagcataaattgagcacaggattcagcacacatctggtcttacttgctggagagtgatttttagttgtgtatattaagtgtacagactacagaagagagattcaaattccggtgttgtgtcaagcaagttgtatatgccaagataatacaagtcaggtttgttcatttgt

SEQ ID NO: 1031 - DNA, 1631 bp, Zea mays
  Clone ID: 700099532_FLI
acgccgacggcccggcggtggcgcccgtggtggtgttcgtcaactcgcgcagcggcgggcgccacgggcccgagctcaaggtgcggctgcacgagctcatcaccgaggagcaggtctttgatctttccgttgtgaagccttcagattttgttcaccatggtttgagttgtttggagaggttagctgaccaaggcgataaccgtgcgaaggctgttcgtgagaaaatgaggattgtggttgctgggggtgatggtacagttggttgggtgcttggatgtctctcagatctttataagatgaaaagggaaccggttccacctacaggaatcattccacttggtacaggaaatgatcttgctagatcgtttggatggggtggctcttttccctttggttggcgctcagctgtaaagcgttatctcagcaaagcttccagatctcccatttgccgtcttgacagctggcaaactgtaattcagatgccagaaggagaaatagaagagttgccatatgcacttaagaaagtagaacctgtagaccggttggagatcagccaggagaacggtacagagttatccgaaaaggcttctttctataaaggagtattctacaactaccttagcattgggatggatgctcaggttgcatatggcttccatcatcttcgtgatgaaaagccatatcttgcacaaggaccagttgcaaataagttgatttatgctggatatagctgcactcaggggtggttttgtacaccttgcacagcgagtccacagctaagggggcttaagaacattttgcgactttccattaaaaaggccaattgttcagagtgggagcaagtgaaaatgccttcaagcgttagatccctagttgtgttaaatttatacaattatggcagtggaaggcatccatggggtgatctaagacctgagtatctcgaaaagaaaggctttgttgaagcccattcagatgatggcttgcttgaaatatttggtctgaaggaaggttggcatgcttcatttgtcatggccgagcttatcaaagcaaagcacattgcccaggctgcggctatcaagttcgaaatgaggggtggcgagtggaaccgagcatatgttcagatggacggagagccgtggaaacaaccgctgctacaggagcactcaaccatcgtggaaataaacaaagttccgtatcattctctcatgataaacggggagtaatgagatttttactccgtcaaccagattgtaccagggttgcattcatagatcgttaggatcgtgtacagttcaggagcagcgggcactagatccttagaactgggtcggacggactgcagcgaggatggcatgcatgttcgttggccttttgtcgtgctatggtcgaagccatggccggagcgtgatgtggcaccatgcattgttgtattcgtaccataatatgtgcgttgttgtatcctaagttctttttgaaggaaacatgattgatttgtttgtattgtaacgttgtgtcattgcaaaagaataacctggtgtaaaactgtaaaatgtgacagtctgccgtttgcacagccctgtagcattttttttttgttcttgttaactttttttttatgaaagcattaactg

SEQ ID NO: 1032 - DNA, 1600 bp, Zea mays
  Clone ID: 700099547_FLI
caaaaggggctgttcgttgacaggggtgttggctcttctatgcttccaaaatcagccagtgcatgctccttggcatctgggtttagttttggatcagcaaagacaatgccagaagcagcaggagctgttgcagctgcagctgtagctgatcgtttgcatgggtcaaaggaggaccggaagctggccattgttttggttggcctaccagctcgtggtaaaaccttcactgcagttaagcttacaaggtaccttcgttggttgggccatgaaactagacatttcaatgttgggaagtatcgccgtcttaagcttggagcaaatcagtctgcagattttttccgtgatgataatcctgaaggtattgaggcacgtaatgaggtggctgctttagcaatggaggacatgatagattggatgaatggtggaggtcaggttggtatatttgacgcaacaaacagcacaagaaagcgaagatatatgctaatgaaaatggctgaaggtaactgtaagattatatttttggagacaatatgtaatgatccaaacataattgaaagaaacatacggctgaagatccaacaaagtccagactatgctgaacagctagattatgaagctggactggaggacttcaaggaacgtttgattaattatgaaaaggtctacgagccagtaggggaaggttcttacatcaaaatgattgacatggtaaaggggcaagatggtcagttacaggtaaataatatcagcggttatctccctgggaggattgtcttcttcttggtgaactctcatcttacaccacgacctattttgcttaccaggcatggtgagagtttacataatgttagaggaagagtcggtggtgatacagttctaagtgaaactggcgaactttatgcaaagaaactagccaactttatagaaaagcggctcaaatgtgagaaaacagcaactatatggaccagtacccttcagagaacaattttgacagcaagtccaattgttggattccccaagatacaatggcgtgctcttgatgagatcaattctggagtgtgtgatgggatgacttatgaagagataaagaaaatcatgcccgaggaatttgagtcacgaaagaaggacaagctaagataccgctacccccgtggagaatcttacctcgatgtgatacagaggctggaacccgtcatcatcgagctagaacgccagcgtgcaccagtggttgtcatatctcatcaggctgtactgcgagcactgtatgcatatttcgcggaccgtcctttgagagaagttccagagatagagatgccactacacaccataatcgagatacaaatgggcgtcacgggtgtggaagagaagaggtacaaactcatggactgaatgaatacataaaagcagctggttggctgtttcatacagcaagtacacataacacagaagccttttcccttctctctctctctccacacggtgttcagtgtaatttctttggaaaaaagacatgttgaacattgtaaagaaaaaactaataaggaactgtaaaaatggcatgcttactgtaacgaataaggaatacagactgggggtctcc

SEQ ID NO: 1033 - DNA, 832 bp, Zea mays
  Clone ID: 700099573_FLI
ggacaagttccctgatattgttatctacacagacgtcgcgttagacccttattcatctgatggtcatgatggtattgtgagggaagatggtgtaattatgaatgatgaaacagtttatcagttgtgcaaacaggctgtttcacaggctcgtgccggtgctgatgttgtcagccctagtgacatgatggatggccggattggagcacttcgctctgctctggacgccgagggcttccatgatgtctccattatgtcctacaccgcaaagtatgccagttcattttatggccctttccgagaagctttagattcaaatccaagatttggagataagaagacgtaccagatgaacccagctaactacagagaagccctcatagaaaccgcagcggacgaggcagaaggagccgacattctgctagtgaaaccgggattgccgtacttggacattatccgactgcttcgggatcattcagccctaccgattgctgcttaccaggtctcgggcgagtactcgatgatcaaagccggcggggccctgggcatggtggacgagcagaaggtgatgatggagtcgctcatgtgcctgcggcgagccggcgccgatgtcatcctgacctacttcgcccgtcacgccgccgcggtgctgtgcggcatggggcccaagtaggaggcgaggcccgcccgccattcctgccctgcactgtcattgtggagttgagcgatgagttggcttatcgtatgttttgggggcctggcactggcagaggattgtccgaggccttggatctcttccaataatctgcgccgggagataataagttttggagtt

SEQ ID NO: 1034 - DNA, 1109 bp, Zea mays
  Clone ID: 700099575_FLI
ctccctcgtcttcttccccacgaccgcgcgcgcccctggtccaagctccctgcttccttgctgcgctcccccggcagcgctccatctctccctcacggtgctccggctcggcctccatctccagctcgcttctcccccgttcctccatggccgcgcgcctggcatccgctcgccatggagctcccgcgcgcgccccattttccatggcgctcggccgcgcagagtcttcatcggacatggcgcctcatcgtcgctgctcccagccctatgtacgacgcctcccctccagcttcagcacggcgcacctcctcatggccgcacctctccctgctcggcatcaacgtcgaccgtgccttgccaacggggctcacccatgttggccatgcctcccaactccgttcttggatcggctgagctcctaggcaccacctcgctgccgctctagatgttgtgcttggccctccgtgatgttcacccagtgagcagcaacagctccgcgaactagtcctccacatgtcgttagggtctgctacaccttccctgtcgccgtggagaccgtgtctccctgctccacagtgcccttcaccatctgtcatcgcaacaacagcccccttgctcctcgtcgtcatgtcgtcattgctcaccttgtcgggacacctcccctcacactcagacgctcgtcagggaccccatcgtcgaccacttttgttctacgtcgccaggtgcactagttatgcacgtgatgcggaagacgagccaagttgaccccaagatgacgtaatgggtggactactccgcatggtgatgctgatggacgaatttaaggacggatgacctgatcaagtgccaggacaaggatgatcatcaagagatcgtcgtcttacccacactaacgcagtgttattccaagcaagccccggtgtatttacccttttccttgctatttcaaactctttatcacttggaatgatgcattaggtgataggagttgggtgataaacaattgttgcatttccttccttggaactgtttaccattccttgatacctgttttacttaaaagttttctgatgcttagtcttgccttagaaaacaaaatggtttgtttt

SEQ ID NO: 1035 - DNA, 1098 bp, Zea mays
  Clone ID: 700099576_FLI
gacacgatcgcgagcgcacgcacgtaagcacgttgtcggaagctcaagttagaagaagcaccagtgcctgatcgatggcggcccaggctctcctctccggccggcagctgctgggccgccccgtgcagtcggccgtctctaggtcgtcggcgaggaaggcgcccttcgtcgtcagggccagctccagccctccagccaagcaaggtgccgacaggcagctgtggttcgcgtccaagcagtccctctcctacctcgatggcacgctgcccggcgactatggcttcgacccgctgggcctctcggacccggagggcaccgggggcttcatcgagcccaagtggctggcctacggcgaggtgatcaacggccgctacgccatgctgggcgcggtgggcgccatcgccccggagatcttcggcaagatgggcatcatcccgccggagaccgcgctgccgtggttcaagacgggcgtcatcccgcccgcgggcacctacaactactgggccgactcctacacgctcttcgtcttcaacatggcgctcatgggcttcgccgagcaccgccgcctccaggactggtacaacccgggctccatgggcaagcagtacttcctcggcctcgagaagttcctcgccggctccggcgacccgtcctaccccggcgggcccctcttcaacccgctcggcttcggcaagaccgagaaggagatgaatgagctcaagctcaaggagatcaagaacggcaggctcgccatgctcgccatcctcggttacttcatccaggggctcgtcaccggcgttggcccgttccagaacctgctcgaccacctcgccgaccccgtcaacaacaacgtgctcaccagcctcaagttccactagaacgttggtgcatcagcatacctgctgccgccgccgccagttgtttgctgtggaaagctagatgcatgcgtgttgtaaaggaacctgaagcgttgcatcggtcatgattcatgcatggccagcctgctgcctgtaacaacaaactagtattgatcttattgagaccggaaactgtattgcacatggtaaatcaatgtacaattcctccctagatgcggac

SEQ ID NO: 1036 - DNA, 1076 bp, Zea mays
  Clone ID: 700099622_FLI
gcgagccatcgacacgatcgcgagcgcaagcacgtacgttgtcggaagctcaagttagaagaagcaccagtgcctgatcgatggcggcccaggctctcctctccggccggcagctgctgggccgccccgtgcagtcggccgtctctaggtcgtcggcgaggaaggcgcccttcgtcgtcagggccagctccagccctccagccaagcaaggtgccgacaggcagctgtggttcgcgtccaagcagtccctctcctacctcgatggcacgctgcccggcgactatggcttcgacccgctgggcctctcggacccggagggcaccgggggcttcatcgagcccaagtggctggcctatggcgaggtgatcaacggccgctacgccatgctgggcgcggtgggcgccatcgccccggagatcttcggcaagatgggcatcatccccccggagaccgcgctgccgtggttcaagacgggcgtcatcccgcccgcgggcacctacaactactgggccgactcctacacgctcttcgtcttcaacatggcgctcatgggcttcgccgagcaccgccgcctccaggactggtacaacccgggctccatgggcaagcagtacttcctcggcctcgagaagttcctcgccggctccggcgacccgtcctaccccggcgggcccctcttcaacccgctcggcttcggcaagaccgagaaggagatgaatgagctcaagctcaaggagatcaagaacggcaggctcgccatgctcgccatcctcggttacttcatccaggggctcgtcaccggcgtcggcccgttccagaacctgctcgaccacctcgccgaccccgtcaacaacaacgtgctcaccagcctcaagttccactagaacgtggtgcatcagcatacctgctgctgccgccgccgccgccagttgtttgctgtggaaagctagatgcatgcgtgttgtaaaggaacctgaagcgttgcatcggtcatgattcatgcatggccagcctgctgcctgtaacaacaaactagtattgatcttattgagaccggaaactgtattgcacatggt

SEQ ID NO: 1037 - DNA, 1092 bp, Zea mays
  Clone ID: 700099647_FLI
cacacctcacctacaaactgctctatctcttgtgttgtgcatcgacactattattcagggttagaagatggcaatactggtcattaccatggtgaacgtgcagtgctgccactgcagagccagcatcaccaagatcctggaaagccacaaagaggagttttgcatcgagaagattgaattcgaggagaagctcaacaaggtgattgtacgcgggaagttcgacggcgagaagctcaagaaggcgatactagacaaggccggcgagaccgtgaagatcaaggagatagccctcgtcgacaagtggccacccccacccccaccttcgcctcccccgcccaaaccggaatgcaaggtggtgccgtacccttacccgtacccgtatccgtacccgtggtcgtgcccaccacctcgcccgccgtgccactgctgcaagccgccgacaccgccgccgccgaagccgccgccgccacagccgacgccgtgccagtgccactgctgcaagccgccgacaccgtcgccgccgaagccgccgccacagccgacgccgtgccagtgccactgctgtaagcctccggcaccatcgccgccgaagccgacgccgtgccagtgccactgctgtaagcctccggcaccgtcgccgccgaagccgccgccacagccgacgccgtgctgcaagcagtgcgaggactcgcacgacaaggataaatgcaagcgttgcccaccatgcccgccgtgcccaccgtgcccgccgtgtccaccgtgcccgcccaactactggccgccacacccgtggccctgccagtgcccaccacaggacagccagtgcaccatcgtgtgatccacgtacgcttcctttcttgcaatctgccgcctgctgcgatcgtcgtgtgatctgtcccagtaatctcgccctagtcatgtctcatgtacttggttcgcgcgttcgttgtgtcgtttgggttgtgtggcgtgtgtctgtcttgtcttgtataaccattctctctttcagaacatgtgtaacactgattgatgatgtgtttattcatttcatgttactttcttaatagcatcttcgagagcattgctaaaaat

SEQ ID NO: 1038 - DNA, 881 bp, Zea mays
  Clone ID: 700099682_FLI
ctcgaacacaaactcaggcaaggcaaaaggaacccgcaccatccgaggctcaagcagggaagtgatcatcatcatcatcagaagaagatgtgcccaaccaagaaggggatgaccggagagccgagctcgccatgcagctcggcatcagcctcgaccttaccggagcaccaccagacggtgtggacgtcgccgccgaagcggccagcggggcggaccaagttccgggagacgcggcacccggtgttccgcggcgtccggcgccggggcagcgccgggcggtgggtgtgcgaggtgcgcgtgccggggaggcgcggctgcaggctctggctcggcaccttcgacacggccgaggcggcggcccgcgcgcacgacgccgccatgctcgccctcgccggcgcgggcgcctgctgcctcaacttcgccgactcggcctggctcctcgcggtcccggcctcgtgcgccagcctcgccgaggtccgccacgcggtcgcggacgccgtggacgacttcctgcgccatcagctggtcccggaggacgacgccctcgcggccacgccgtcgtcgccttccagcgaagacggcaacacctctgatggcggggagtcatcctctgattcctctccgcccaccggggcctcgccgttcgaatttgatgtgttcaacgacatgagctgggacctgcactacgcgagcttggcgcagggattgcttgtggagccaccgtccgcggtcacggcgttcatggacgaaggcttcgccgatgtgccgctctggagctactagagactgaaaatttccgtttctttccttggcctctggcgcctaattttggcagtgtaaaacggttacttattttggtaatgagatcgatcaagtttgcg

SEQ ID NO: 1039 - DNA, 1197 bp, Zea mays
  Clone ID: 700099813_FLI
cggcgcttgagattgaggcgcgacagcagcgccgaaccgctgacgagcgctgcgccttctacgaggacgaggtcgaggagctccgggacatcgtgctcgtgcgggagcgtgaggtgcgcgcgctgcgcaaggaggttgacgcctaccgacgcctgctcggttttagcgctaccgaggaggacgaggaggaggatgacgagcaggagatggtcacgccgcatagtttccccatgtacgaaggagagcccagctcgtccaaatcggtcgatgcgaatcggatgcaacattttgggaatgattctgggttcagcttcaagacgccatcaccgcgtgaacaaccaacggtgccgcctcttactgcagggcaaatcaatgtgggaagcgatgattgtgttgctgttcagacgccggccaaagttcccgtggttcaatcaagactggagctagatagctctgaggatgaggacgaggatgaggatgatggagcagagacggtggaaatcctccccctatccgcccggagccaagatttggatcaaggtagccatttccatgctgatactgcacaaggtatggaatcgacttgtaccaaggaacagacagctcatgcatttcaggaagtcgagtgtccaggtatagacaagattgttaatgaccagataggaagcaagaatgatgccaatgtgtatgatgtgcatgtggtcgatgacatgcgcttctcaacagaagtcaagggcctgattggccgaagcttctcagaggcaacaatgcaagcagagagattacagtctcgagctgttgcagatgatctccttgagaaaagcctgaatgccatcaaaggtgcacaggacaagataagaaatgcagctaatgaaaggaggcagtcattacagttgcaactcttagaggacatagctgatcaacttcaaggaatcaaggatgctgcagaagcagggaggcaagtattctgtgctgctcctaaaagctccaagaggagctagggacttgtgttacgccactaatgcatggttggcgccgtacataagtgtttcgggtttgtagaccaggtctgttgatttgttgattcaacaagtttgcttcttctttaaataagtagtggctattgctttgtacatgtatatatataaacaacatgggattcatcccagtctttataaaacgaatatatgtgtaaag

SEQ ID NO: 1040 - DNA, 1409 bp, Zea mays
  Clone ID: 700100255_FLI
ctgatcccacactgcaacaagactgacaaagcatctatactagacgagacgattgagtacctgaagtccctccaaatgcaagttcagatcatgtggatgacttctgggatggtgccaatggtgtttcctggtgctcaccaatacatgccaccaatggctctaggcatgaattcaggttgcatccctgcagcacaaggcctaagtcagatgcgaagattaccatacatgaaccaccccatgccaaatcatatccctctgaactcgtctccagctatgaatccaatgaatccactgaacactgtgaaccagttccaaaacggtcacctcagggaggtaccaagacctggaccccatgtttatggacaccaaatagcacaagccgaagaacacaacagaatactggaagtggcagctagtactgttataccaacttctaaggcagggcaaccacctacttttgatggagtttagagtggtcataaatcctgtaaggtgttgcactgataatctgacgatgcatagcgttggtaccttgagttgtatatctgtgcagtagtgtcagcagcatactctttgacatctaagcttggttctagagttattaataggagcctagtataggtaacaagattgcaagacaactacctgtctaccaccatattctctgtggaagaactggagctgcatactgctgtgcagtacagtgttcaagagagaatggaacagatgagtatttgaagcacaacctgaacaggaaatggtcttctttctggcaatcgctgaaaatactgacgtgatgaggagcagattgcatccctatggctgtattgtaatatatctacatcaacatggcaatacgtgtctggacttggatgctacagttacatgtaaatgcagagttgcaggtttggtcggcaggagcatacatcttcacacgacgtggacagtggactacgggccgagacagtggcccagacacgacacggctcttatatcaggctaggccagacactatttaatgtgtcatgcctcaggccggtccacgagacacggctgaccatctataccacatactctactcctccacggcaacagttcagcatcctcctggcaatggcaacggttcagcatcctccatggcaactgtgcggagccctagactagacctgctgcaagatggcagaccctcatcttcagagcggattgggtttggatcccctgtactcctccttgctcccctgttgctttcagttcgtctcacggttattgttcagacttcagatacatatgtcgttgtgcctggttggctgtatctggacatcagtttccgtgttgctactattttcccccctgtatttctttataacggacattcaccttataaatatacacacaaaacctctatttct

SEQ ID NO: 1041 - DNA, 1155 bp, Zea mays
  Clone ID: 700100534_FLI
gttcagtttcggcggtaacaagatcaactgcggtcgccagtcgattctgtgagctcgccagccggggccggcgggattcgtgtcctgtaggagttacgctataaggagcaaactggtgagggcgatgcctccgatccttgctagcttccagcctgcatctcctcggtacccaagctttcaagacgcaaatggcaaaagacgaaatgttccttgttatcagagacaacaaaccccgcaggtagaagccaggtcgatggaggaggtatatgacgctttggctgaacaccttctttcggtcttgaagaatattgaacatcttgattcaaaatacattgttggtctagctggcccacctggtgctggcaagtccacagttgcctctgaagttgttcgacgtgttaatacattttggtcccagaagcacacaaagggtagtggagcaccgcttcctaccaaggaaattgctgcaatgcttccaatggatggtttccacctttatcgtgcccagcttgatgcaatggaggatccaaaagaagcacatgcaagaagaggagcaccctggacattcaatccatcactgtttctgaaatgtctacatacactaagaacagagggttcagtttatgctccatcatttgatcatggtgttggcgacccagttgagaatgacatatttgtaaagccacagcacaaaatagtgatagttgaagggaactatctgttactggaagaagatgtttggaccgaaattagagacttgtttgatgagaaatggttcattgacattgacatcgatatctccatgcaaagagtgctcaagagacatattgcaaccggaaaagagccagatgtagcagcatggaggatctcctacaacgaccgaccgaatgcagagcttatcctggaatcaaggaagaatgctgaccttgtgatcagatcagtagacttctcaagctagtgttcaattctttcaataggaaatagcattgtggttctagagttggaggttgttgtgggctgtttccgtggagattcctgtacatataataagctgaatgcctgtttcaaattttcatggtgattgtgttgcatgtaataagatattccttcactatgtaccgtggaggattgttaagtaatttattgacatttttt

SEQ ID NO: 1042 - DNA, 1864 bp, Zea mays
  Clone ID: 700100605_FLI
tgttcgtgcagctcggcgcgaaggagcagcgggaccctacgtcctggatctgcgacaccggggccacgaaccacatgacggggtctcgggcggcgttcgcggatctggacacgacggtgtctgggtcggtgcggttcggcgatgactccatggcggagattgaagggcgcgggaccgtgctgttcaagtgcaagaatggcgagcatcgctctttcaccgccgtttactacatcccgcgactcacggcgaatatcgtgagcctcggccagttggaggaggccgactacgacgtccacatccggcacggtggcatggagattcgggagcctgaggggcgactgctggcgaggatcccacgcgcaggcaaccggctgtatgtgctcaacgtcgacgtggcacggccggtgtgcctggcagcgcgcggcgaagaaagtgcctggcggtggcatgccaggctcggccacatcaacatgctggcgctgaggaagatggcgcgggaggagctcgttcgtggactgccatccatcgagcaggtggaccaactctgtgaggcgtgtctcgccggcaagcagcgacagacggcgttccctgaccagacacagtggcgggcggaccgcgcactggagctggtacacggggacttatgtggacccgtgacatcggcgacaccaagcgggaacacctacttcctgcttctcgtcgacgatcggagccgcttcatgtggctgacgctgctgcggtccaaggatcgagcggcggctgccatcaaggagttccaggcacgtgcagaagctgagtccggctgcaagctactggcgctccggacggatcgtggtggcgagttcacatccaaggagttcatggagtactgcgcggcggacggcgtgcaccggcagctgacagcgccgtattccccacaacagaacggcgtcgtcgagcgccggaacgccatggtggcaggcacagcatgctgtctgctcaaggcaaaggggctgccggcttggttctggggagaggcagtgaacactgccgtgtatctcctgaaccgggtaccgacgaaggcagtagaaggcaagactccgttcgaggcgtggtacgggaagaagccggcggtacaccacctgaagaccttcgggtgcattgtctatgtcaagaatacgacaccgcacctgaagaagatggaggatcgtggccgcaagatgatttccgtcgggtacgagcgcgggtctaaggcatatcgagcctacgatccggccacgaagcgcgtgcacgtgacgcgcgatgtggtctttgatgagtccgcccagtgggactggtcggagggagctaaggccggcactggcgcggatcatggcggcgacgacacgttcaccatccaatttggggtggtggaggggcaaggaggtctccaggcgggggcaccggtggctgctatgcagcatatgacgccaccaggaacgccaggggaggccggagtagcttctccgggtgtgcagttcgccacaccacctgctgcgttagacgaagacctggacgccgaccacgacgacaaagcaccactgcggttccgaacagtggaggacgtcaccggagctgcgtcgccacctgggtacgccgtgcgcgtactgtacaacgagcaactctttgcagtgagtgcggaggagcctgggtcgcttgcacatgctgggcaagacccatgctggcgacgagcgatggaggaggaactgcgcgccatagaggacaaccacacctggacactcactgagttgccatctgggcagcgagccattgggctcaagtgggtattcaaagtcaagaaggatgaacacggtgccgtggtacggcacaaggcacggctcgtcgc

SEQ ID NO: 1043 - DNA, 1853 bp, Zea mays
  Clone ID: 700100628_FLI
catagccgtatgcccgtatccgtcctctgcttctctcttccattgccccaagccgccaccaatggcgacctgcgatctgctgatgctgcgggaagcatctccgtgggcgctggccggcgcggtggcgtccgtgtcgctgttgtggctggtggcctggacgctggagtgggcctggtggacgccttggcggctcgatcgggccctgcgggcccagggcctcaagggcaccaggtaccgcctcttcaccggcgacctgagggaaaccgcccgggttaaccgggaggctcgcaagaagccgctgccgctcggctgccacgacatcaccccacgcgtgcagcccatgcatcacagcaccatcaaggaatacgggaaactatcgttcacctggttcggcccaacaccaagggtgatgattcctgacccagagttagtcaaagaggtgctgtctaataagtttggccactttggcaaaccaaggagtagccgcattgggaggttgctagccaacgggcttgtaaatcatgatggtgaaaaatgggcaaagcacaggagaattcttaatcctgcatttcaccatgaaaaaataaaggggatgatgccagtattttctacctgctgtattgaaatgattactagatgggataattcaatgtcttccgagggatcttctgagatagatgtctggcctgagttccagaatcttactggagatgttatctcaagaactgcgtttgggagcaactatcaagaagggaggagaatttttgagctacaaggagaactagctgaacgcctcatccaatctgttcagacaatatttatcccaggctattggttcttgcccaccaaaaacaacagaaggatgagagcaatcgatgtagagatccgcaaaattctccgtgaaataattgggaagagagagaaggatactaaaaacagagaaacaaataaagatgacttgctgggcttattactggagtcaaacacaaggcaatcaaatggaaatgcaagcctgggattgacaacagaagatgtgattgaggaatgcaagttattttactttgcaggtatggagacaacatcagtcctgcttacttggacacttattgtgctaagcatgcacccagaatggcaagagagagcaagagaagaggttttgagccactttggaagaaccacaccagattatgatagcttgagccgcctcaagactgtaaccatgattctacatgaggtccttaggttgtacccactggcaacctttctaaccagaagaacttataaggaaatggagctcggtggaatcaaatatcctgcaggagtggagctccttctgcccgtcatcttcattcaccatgatcccgacatttggggaaaagacgcaagcgagttcaacccagaaaggtttgccaacggcatctccagcgcaaccaggcatcaggctgctttctttccgttcggagggggccccaggatctgcatcggccagagctttgcgttgctggaagccaagatgacgctatgcaccatcctccagcgcttctcgttcgagctctcaccatcctacacccacgcgccgtacaccgtgataacactgcaccctcagcacggtgctcagataaggctcaaaaagctttctccgtgatgctccttcgatgctgctaccggacactactttcgttactgaccgcgtatgtagaaaaatatttcttatttagtatgtatttttaggatataaataaaaagagggcgcatattaatgggaaataagttcccttgtatgcattgcgatgtaattttgggaagatttggcaaggaacttaattatacaatatatgtattgtctttaagtt

SEQ ID NO: 1044 - DNA, 298 bp, Zea mays
  Clone ID: 700100660_FLI
ggcgacgacatggtcaaggtcatctcctggtacgacaacgagtggggctactcgcagagggtcgtcgacctcgctgacatctgcgccaaccagtggaagtgaagcgttgcattgtaatagcactttgtaactcctcaccctccaccgggctttgggattcaccccgaaatgactcactttcggtgaaattcacccgtttcggcgaggtcgtccgaatataccggccaaatgtttccattggatttcaattattagtcaactctagagttgaaacaaacatacaagttcttcattcagt

SEQ ID NO: 1045 - DNA, 1531 bp, Zea mays
  Clone ID: 700100671_FLI
agagagctagcatacatcgctagctcactttagcatatatattacataaatattggcatatataaactaaactgaattgaggacgatatggcccgcttggtctcttccggaatcattggtaaggggcacaacatctttgacgatggcggattcggtgaagtccatgctgacccaattaaagtcgagcgtccgcacaagcgtccgccgcagaagcagaatgcggagaatggaacgacgacgaaggttgatgagccaaaggaattgcctaagcacgtgtgcttcaagggagacaacgggctatacctgagcgctcggatggtggaaggctacccctacctgcagtttgcgtcggacgacataggcgatccaagtgtgaggttcaccacgtacaactacatgatcgacggcaagcgggtgatccgcgtcaagtcggaccacttcggcaagttctggcggcgcagcccaaactggatctggtgcgacaccgacgacaccagcaccgacaaccgtgacaccctgttcgaggtcgtcagggtgggcgatgacgccgacgccgtgtacgggctccggaacctcggcaacaaccacatctgccaccggctgacctacgagggcaaggagagctgcctgaacgccagcatacccagcgtcaggaaggaggcgcagctgaagatcgaggaggccgtcctgctgcggaagatctacggcgtggactaccacctcaaggacgccaagatcctgaacaacaaggtgaggaccctggtgactcgagaggcggtgaacgccggcagcatgcccagcaagaacacgctgaccctcaagtacgtggtcagcaacggcaagatctgggacgccagcaggtccttgaggctgggcatcaaaagcagcttccaagccggagtccccgaggtcgtgaccggatcgattacgctggagagcgagttcgacaccagctacatctggggcgagaacaccgtcaacacggaggagttctccaccgactacgaggtcatcgtgcctccgcacaccgtcatcacggtgcgcatcctggccacgcagggcacctgccaggtccccttctcctacacgcaggaggatattttgactaccggggagaagaaggtcaccaagtatgacgatggcatcttccgtggagtcaacagctttggtttcaagtccgaggtcaccgagaggaagatcaatggcgaatgagacgatgcaccacatgtcatatctatggatcggagacactgtgccaaagtctgcttatctatctatatctgcatcaataattcagccacgtacgctaccatctgcatatatgtcagtataggtggcgcatgtattgcttttaataattggtgtcatctaagccatgcaagcatgtgtgctttatagctaatcatcttgcactacgctcgtctgtttatttgtatacgtaagtactgtacattgcatgcacatgcactctcatcacctgtaatgttttacttgaaatttattcaaaaataaataaaggcttgtctttgcc

SEQ ID NO: 1046 - DNA, 2284 bp, Zea mays
  Clone ID: 700100682_FLI
atgtgggtgctcagcttcgtcgtgccgccggaccatgaaacactggacttcaagttcttgctgaagcccaaagacgctgaaaccccgtgcatcatcgaggaaggacccacacggctcctcaccggaggcatgctagagggtgatgtgagggttgcactgttcaagctcaatggagatgatgaggtgctcgagtttggggtggtcaacaaggcggaccttgtatcaccgcttgaacttgctgcaagctggagggtgtacaaggagaactttcagccttccaaagttcgggggatccctgatatcagtatcaatgtcacacccactaatggagctgaggaaggatcagcggctactttggaacttgacttggaacattatgttgttccgtccccgccaactgcaccaccaaatggatatgctgcaaaccttgctgcgactccagcatccgtgattcaaactgaggcattgttgacaaatgatatccttctaagtgatgggattcagagtccaagtagtgtttctgcaaaattagaagattgtactaaccacaagaatattgaggcctgggcaacagattcttctaagaaaattcagaattccggactcattgaatcaaaatcagttggcacctttacaccaatgcaaaagctagatggtcaaaaggggctgttcgttgacaggggtgttggctcttctatgcttccaaaatcagccagtgcatgctccttggcatctgggtttagttttggatcagcaaagacaatgccagaagcagcaggagctgttgcagctgcagctgtagctgatcgtttgcatgggtcaaaggaggaccggaagctggccattgttttggttggcctaccagctcgtggtaaaaccttcactgcagttaagcttacaaggtaccttcgttggttgggccatgaaactagacatttcaatgttgggaagtatcgccgtcttaagcttggagcaaatcagtctgcagattttttccgtgatgataatcctgaaggtattgaggcacgtaatgaggtggctgctttagcaatggaggacatgatagattggatgaatggtggaggtcaggttggtatatttgacgcaacaaacagcacaagaaagcgaagatatatgctaatgaaaatggctgaaggtaactgtaagattatatttttggagacaatatgtaatgatccaaacataattgaaagaaacatacggctgaagatccaacaaagtccagactatgctgaacagctagattatgaagctggactggaggacttcaaggaacgtttgattaattatgaaaaggtctacgagccagtaggggaaggttcttacatcaaaatgattgacatggtaaaggggcaagatggtcagttacaggtaaataatatcagcggttatctccctgggaggattgtcttcttcttggtgaactctcatcttacaccacgacctattttgcttaccaggcatggtgagagtttacataatgttagaggaagagtcggtggtgatacagttctaagtgaaactggcgaactttatgcaaagaaactagccaactttatagaaaagcggctcaaatgtgagaaaacagcaactatatggaccagtacccttcagagaacaattttgacagcaagtccaattgttggattccccaagatacaatggcgtgctcttgatgagatcaattctggagtgtgtgatgggatgacttatgaagagataaagaaaatcatgcccgaggaatttgagtcacgaaagaaggacaagctaagataccgctacccccgtggagaatcttacctcgatgtgatacagaggctggaacccgtcatcatcgagctagaacgccagcgtgcaccagtggttgtcatatctcatcaggctgtactgcgagcactgtatgcatatttcgcggaccgtcctttgagagaagttccagagatagagatgccactacacaccataatcgagatacaaatgggcgtcacgggtgtggaagagaagaggtacaaactcatggactgaatgaatacataaaagcagctggttggctgtttcatacagcaagtacacataacacagaagccttttcccttctctctctctctccacacggtgttcagtgtaatttctttggaaaaaagacatgttgaacattgtaaagaaaaaactaataaggaactgtaaaaatggcatgcttactgtaacgaataaggaatacagactgggggtctccaatgcttattcagaaacatattccgtc

SEQ ID NO: 1047 - DNA, 2466 bp, Zea mays
  Clone ID: 700100701_FLI
gggcgtcgtgacaatgcatcatcttctaattcgtcattgcatgtttcacagacttcaggattaccccctaaactgccattaaaaaagaacagcaaaagtcaaaactcttatatccgcaagggtaatgccctcattagaaatccagccaatggaaataatcatcttcattcttcttctagtctagattctcaaaataagttgagtaagcctgttatgaggagaagcatgaactttgtcaggaatgtcgattcaaaagacgcagcacattctcatatttcagttgaaagacccaagaccccacctttgccacttcataccaaatccatcagttgtgctgtgaatgttttggagccattgtctcaaaatttgcagcaacaggtccttgaaactgaaaaggaagattccagtgggcaggttaactcaggtgctgacaatctaagcattattagtttgcacaagtctgaagcccttgatgctggtaaagcaatttatgttaggccaaagttaaatcaactagttgcacaggggcggcatcttggtgagtcgagtaacatttccttggataaagtgacgttgctgcagccttccgcaacatctgatctctatttcaagaaaaggaaaaatcagattattttgggtccctctacttctgatgccccgagttcaaaagatacatttcaggctgaaaatataaagtcaggtgagagtaaagttctaatgtcttcatcttccaacaacaatatcactgtggcaaaggacaggctgcacaaagctcttcagacaacaaatactgtcagaagtttctctcatgtatggacacttaatggacaaaatcctcgaaagaaatcttatgtgggagctagtcatatgaaggtcttacctcgtatacttccatggaaaagaaaaatattctgccagaactttagaggcagttattcttcgttgttgaatacaagctctataggaataatgagaaaattattgcaaacaaggaagagaagtactatttacactgtctctactgatggattctctcttcggaaatctggagtgttaagtataggcgggtcaagtttgaaatggtcaaggtccctcgagaaacattctcgaaaggttaatgaggaagctacacaggcagttgctgaagttgaaagaaagaaaagagaaaagagaaaacggcagtctctccgtagcaagggaaggaatgatcggtactctgcatcagttgctgccaatcaattaacaaacagaagcagagcatcttcagattcaagggtgtcatcaacttgcaatgaatatgtgcgtgttaacaaaggcaaccaactggtcagaaatccgaagaaagtaatccgcatgctagcaagtgagaaagttcgatggagtttgcacactgttagaacacgattggcaaagaagaggcaatattgtcaattcttcacccgcttcggcgagtgtaaaaaatctggtggcaagtgtccctacattcatgaccgagctaaagtggttatttgtactaaatttcttaaaggcttgtgttctagtactagctgcaaactaactcacaaggtcctgccagaaagaatgccagattgttcttactttctgcaagggctatgtaccaacacagcctgtccctataggcatgtgaaagtgaactcgaatgctcctgtctgtgaagattttttaaagggatattgtgctgatggtgatgagtgtcgtaaaaagcacagctatgtatgcctcgtctttgaggcaacaggagagtgcccacaaggatcaagatgcaagcttcatcacccgaagaagaaaagcaaatccaagagaagcaaagtagacaccgtccaaaacaacagtcggggtcggtattttgagacaaacgttggccatggcagtggagcaagaatagtttatttggaggaagatgagagacagaaaccagagcaagtctctggtgaggagtttgctgacttcattgaacttggtgccggtattgaagtccctgaagatgcagacacttcggatgacatacagctgatggaactggactcagggaatctcgaggtgcaggctgacaataatgacgcgataatcaagccacttcggatcatgagaacggcaagagtttgatgagttctttggttggatacagctgcagtgttcctgggtcagggtggtattttacgctatgtttgacgtggcatataggcgctgactggagtttctatttctcgaagactggttctgacgggggcaatcggtttttgcttggttgaaggtttgattttgttcatcttgtacatcttttattaggaaatatataggaccatatggcagtggtagaggccatgagggttactggctgttaacccgtgttttttcaacattacccagagttgaatgtaacaaacagtgctttacaatatgaaatgaatgaaggtttgcatacaggaaatgaagctttcattt

SEQ ID NO: 1048 - DNA, 2614 bp, Zea mays
  Clone ID: 700100757_FLI
ctcctttcctgttactcctggccgcatgttcgtgcgcctctacttctatcccaccatctatggcggtaaccatgctcctgcagatgcttacttcggcgtcacagcagccaacctgacccttttacagagcttcaacgcctcccaaacctctctatcacttggtgttgccttctttgtccgtgagtactccgtaaacgtcactgaaggcagcctagacctcactttctctccatccacacaccacaatggctcgtacgcgttcatcaacgggatcgagatcgtgcccacgcctgacctcttcacgacaccgacaccaacactatccaatgggggcaacccggatccgttccctattcttgctggaacggggttcgaaacaatgtaccggcttaacgttggaggccaggccatctcaccaggaggagatactggcttctatcgttcatgggttaatgacgtcccttacatatatgctgctggttttggggtggcttttgggaaagacgacaaccttaccatcagctacacacccactgtgccaaactacactgcaccggttgatgtctatgcaactgctcgctctatggggccaaatgcccagatcaacctgaactacaatctcacatggattctacccgttgatgccgggttctactacctcctgaggttccatttctgtgagatccagtatccgatcacaaaggtcaaccagaggtcgttcttcatctacatcaacaaccagacagcgcagcaggagatggatgtcatcgcgttcagcggaggaatcggcaggacggtgtacacggactacgtcaccgtcacggctggttctggtcagacgtacctatgggttgccctccacccggatcttacgacgaggcccgagtacttcgacgcaatactcaacggcctggaggtcttcaagctgcagaattacggaaacaacagtcttaatgggctcaaccctccccttccatctgttcagcctaacaacaacgggaatggggagcctagtgtgagaaggaaaggtgctgcgccggcaccggcagccattgctggagctgttggtggttttgctgtgctactcattgctgcctttggtgcgtgcatcgtctgcagaagaaaggaggtagcaaataaggagtctaggaaacccgatgacggccactggactcctctcactgactacagcaagtcacggtcgaacacctcagggaagacagcgaccacagggagccgtacatcaacgttgccatccaatctgtgccgccatttctcgtttggcgagatccaggcggccaccaagaacttcgaccaagcctctctcctcggtaaaggcggctttggaaacgtgtaccttggagagatagacagtggcacgatggtggcgatcaagcgcgggaacccgacgtctgagcagggcgtccacgagttccagacggagatcgagatgctgtcgaagctccggcaccggcacctcgtgtcgctgatcgggtactgcgacgacatgaatgagctgattctagtgtacgactacatggcgaacgggactctgagggagcacctgtacaacaccaagagggcggcgctgtcctggaagaagcggctggagatatgcatcggcgcggcgcgggggctgcactacctgcacacaggcgcgaagcacaccatcatacacagggacgtgaagaccaccaacatcctgctggacgacaagctggtggccaaggtttccgacttcgggctgtccaagacgggtcccaacaacgtcgacaacacccacgtgagcacggtcgtgaagggcagcttcgggtacctcgacccggagtacttccggcggcagcagctgacggagaagtcggacgtctactcgttcggggtcgtgctgttggaggtcctgtgcgcgcggcccgccctgagcccctcgctccccaaggagcaggtgagcctggccgactgggcgctgcactgccagaggaagggcgtgctcgggcagatcatcgacccgcacctgcaggggcaggtctccccgcagtgcttcctcaagttcgcggagaccgcggagaagtgcgtggcggaccgcagcgtcgacaggccgtccatggccgacgtgctctggaacctcgagttcgcgctgcagctgcaggggagcgcggaggacagcggcagcgtcgtcgtcgtcaccgacggaacgacgtcgtcgtcctcgaacaggtcgtcgccgcttatcgtctccgggcttcactcggacgagccgccgacggacagtacgaccaccaccaccaccacgtcgtcgacgacgactttgaccatgatgggacggagcctcgccagcgtggagtcggacgagctgaccccgagcagcgtcttctcgcagctcatgcatccaggtggcagatgaaaacggaaagtacaactggagtagatatcgtctgatcgatgtgctatatatatgtttctagttcatgctatatatatatatgtgggcaactagtatagttatgctccatacatattcatcatatagttcatcctatatattagtatgtattgtgctagagccctctgaattatatatcttaaacatgtacctgagctatgttctcacttcttc

SEQ ID NO: 1049 - DNA, 636 bp, Zea mays
  Clone ID: 700100759_FLI
gcaactacacccagttccggtactcggaagccgtgaacgtgatcggtttcctgtactcggtgttccagttcgtcgcgctcgtcgagctcatgaggaggaacaagcatttgatcccccatcgcaagcgtggtctcttcgacttcaccatggaccaggtgctagcataccttctgatatcgtcgtcgtcgtccgcaaccgctcgagtgagcgacctgatcgacaactgggggagcgaccctttcccgacgatggcgaacggctccatcgccatatccttcatggcgttcgcggcgttcggcgtctgctccctcatctccgcgtacaacctgttccgccgagacatgtagccgccagccgctctcgtcaacctcttgttgcccatccattgtatttctggacacgagttttcggcgcagacttcacattgtgctgtacgtgtgtgtatatgtgtctgtgtgtgtgatgggaactctgcactgctagcaaataatatatatctacacggtgaagggcagctcacttgtgtggtgaacagaatgtgggaaaaaagttctagtggctctgaatcgaagtagttttgctgcatggcatcaagaccaaaggtaatcgattggtggcgtgcgatcacccggagac

SEQ ID NO: 1050 - DNA, 480 bp, Zea mays
  Clone ID: 700100760_FLI
cggaggccaagcggggcaccaaggtggcgcgagtgctggagctcgccaacttcatgagggccgtggggagggcgccctccaccaagcgctccttcttctgaacccaccggcctcttcttcaccagttcctctgtcttgccgccgccgcctgtgcagttcagttcagttcagttgtcctgtgggtcggaccgttcaccgcttcactccacgggatcaggcacagtgatcagtgccgtgctagctgtgtggaacgcttgttttagtgttgtatccacatgtacgatttgtaacgtttccttgcttctcccgtttcgtgttttcgtatggtatctatggtattgcaaagtccatggccacgatagacagggaaagcatatgtatacaccattagaaggatgtgctctgcgcctctgcccgagtcttgaggacaggagctgcatgtatttttcaccaatataatggttgtgtatgtcaattacg

SEQ ID NO: 1051 - DNA, 2142 bp, Zea mays
  Clone ID: 700100787_FLI
caaaaagaggcgtttgtgcggattcttgagagtgataagaaagaagcatctggtggttcaattgctcgccttccgttgcttgctcacctgggtgttgagtttcctctggaatttgatccttgggtgattcttcaaaagcacattctctctgattatgcgaataatgaggggcacgagttgactatatgcatcctgaaccggctatatcatgaggcagagcaggatcacgatttcctttcatctagaactgctacatcagtttacgaatcctttcttctaaacatagctgaaaatcttcgagacatgtttccagcttcagataagtcacttggcaaattgctttgtgagataccatacttaccagaaggtgtgctgaaactgcttgaaagtttatgttctcctggaagtaatgagaggcaggacaaggatattcagagtggtgatagggtaactcaaggtctcagtgctgtctggaaccttatcatgctaagaccttcaaatcgggacagatgtctggagattgctttgcagagttcaactcatcatctagaggaggtccgcatgaaggcaatacgtttggtggcaaataagttatttcctatgacaagcatttccaaaaagattgaagattttgcaaatgaaaaacttaattcagtgctggaaatgactccatctggtgattgtgtaactactgaaatggctacacctgaagcacacaaagatattggtttagaaaacttaacagcttcagtaacaggcatgcagactctgatgtctctatactttgcattgtgcaccaagaaacattcccttctcagacatgtatttgcaatatatggtaatctaccgcaagctgccaagcaggcagttcatcaacaagtaccaattctgatacgcactataggctcctcctctgatcttcttggaatcatctcagatccaccagctgactgccgggacctcctcatgcaggttttacaaaccctcactgatgctgcggttccatctaaagatctgatttcttccataaagatcttatattctaaaacaaaggatgttgagttcctttttgcaatcttggttcatctaccaaaagatgaggtcctgcctgtgttccccagtattgttaatcttccaatagacaagtttcaaagtgccatttcccgaatcttgcagggatcacctcggaatggcccttcacttgatccatcagaaattttaattgcaattcatgtaatagctcctgataaggaaggaataccactcaaaaaggttatggatgcatgctcttcttgctttgagcaaagaacaatatttacccagcaagttctggcaaaagcactaaatcaactggttgaacagattcctcttcctttgctattcatgaggactgtcatgcaagcaataggtgtttttcctgcattggtggattttgtgatggagatcatgtcacgccttgtgagcaagcagatttggaaatatcccaagttatgggtaggatttctgaagtgtgctatcttgacaaaacctcagtcatatggtgtgttgctgcagttaccagctcctcaacttgagaatgccttgagtaagaacccgacactgaagacgcccttggctgagcatgccgagcagccaaatattcggtcgacacttccaaggtctactttggtggttctgggtcttgctgaagatcaaccacagcaaccagcagtaacacaggtgcagagcagccaaaaccaggctgcggaaaccagtagctctgctgctgatacggctacagaagtaactcaggaatcttctggtgctagctaacatcttttatgccgaaatgggctaatgcttgcagaatcaaatacaggattggctggatggcagagtagatacttcagataatgaagccggtgaagttcttaaagaaaggtcaatgagtcgatgaaagtgggttcaatataggccaatttgatgaacacaggcattgaattatactagattaggctgctgaatagcgtaatacctacatccatttaggtgtgttttcttgttagcgtgctattgtaatgtctatattgtaatgggtctcgacccaccaaactttgttatattaatgcactcccaatcttgattaggattagggttttcaat

SEQ ID NO: 1052 - DNA, 1828 bp, Zea mays
  Clone ID: 700100789_FLI
ttaggtgtaaggagacgttacaaggtagctggacaggattcagaagttacttattttcactcttacattgatggagttgattttgtattcgtagaagcccctcccttccggcaccggcacaataatatttatgggggagaaagattggatattttgaagcgcatgattttgttctgcaaggccgctgttgaggttccatggtatgctccatgtggcggtactgtctatggtgatggcaacttagtttttattgctaatgattggcataccgcacttctgcctgtctatctaaaggcctattaccgggacaatggtttgatgcagtatgctcgctctgtgcttgtgatacacaacattgctcatcagggtcgtggccctgtagacgacttcgtcaattttgacttgcctgaacactacatcgaccacttcaaactgtatgacaacattggtggggatcacagcaacgtttttgctgcggggctgaagacggcagaccgggtggtgaccgttagcaatggctacatgtgggagctgaagacttcggaaggcgggtggggcctccacgacatcataaaccagaacgactggaagctgcagggcatcgtgaacggcatcgacatgagcgagtggaaccccgctgtggacgtgcacctccactccgacgactacaccaactacacgttcgagacgctggacaccggcaagcggcagtgcaaggccgccctgcagcggcagctgggcctgcaggtccgcgacgacgtgccactgatcgggttcatcgggcggctggaccaccagaagggcgtggacatcatcgccgacgcgatccactggatcgcggggcaggacgtgcagctcgtgatgctgggcaccgggcgggccgacctggaggacatgctgcggcggttcgagtcggagcacagcgacaaggtgcgcgcgtgggtggggttctcggtgcccctggcgcaccgcatcacggcgggcgcggacatcctgctgatgccgtcgcggttcgagccgtgcgggctgaaccagctctacgccatggcgtacgggaccgtgcccgtggtgcacgccgtgggggggctccgggacacggtggcgccgttcgacccgttcaacgacaccgggctcgggtggacgttcgaccgcgcggaggcgaaccggatgatcgacgcgctctcgcactgcctcaccacgtaccggaactacaaggagagctggcgcggcctgcaggcgcgcggcatggcgcaggacctcagctgggaccacgccgccgtgctgtatgaggacgtgctcgtcaaggcgaagtaccagtggtgagcgaattaattggcgacgccgacgccgctcctgtcgcaggacctggacgttatttagaaggctcttctccctggcggctttgatgcgtgcgtcgcatttgcgccgggcggacgggcgacggtggttggcctaccgcctacgtcggctgcgtgccctgggaatttgggcgggcacgatgatgccactgggcaccgggcgcggggtagtatgatatgaaaccgacggcgatggagatgaggcgcatggcattttcccactgataaatggggagttgtatgctactttaatatcgccactcctgttagtatttatattgatgctgtcaagttttccactccaagaacaaatgacggtagccggtaagtataggcctatttgtagagctagttagaagtacatgtgcccaaaccgacaacattgtacgtacattataaagcacggcactatttgttactgtcagtaaccgtgtcgtgctagtactatacctaaccatcgtcacaggtac

SEQ ID NO: 1053 - DNA, 1453 bp, Zea mays
  Clone ID: 700100796_FLI
gctccttcgccgcatccccgccgcgcgggccccggccacggccttcatggcggcgcgcccggtctccgattccacggcggcgctcaccatcgagacatctgtccctttcacctcccacctcgtcgacccgccctcgcgcgatgtcaccaccacccccgccgagctcgtcaccttcttccgcgacatgtccctcatgcgccgcatggagatcgctgccgactccctctataaggccaagctcatccgcgggttctgccacctctacgacggccaggaggccgtcgccgtagggatggaggccgccatcacccgctccgattccatcatcaccgcctaccgcgaccactgtacctacctcgcccgcggaggggacctcgtctccgccttctccgagctgatgggccgcgagggcggctgctcccgcgggaagggcggatccatgcatttctataagaaggatgccaatttctacggcgggcacggcatcgtcggcgcgcaggtgcccctcggatgcggcctcgccttcgctcagaagtacaagaaggaggagacggccacgtttgccctctatggtgacggtgcggctaaccagggacagctctttgaggctctcaacatttcggccctctggaagctgcccgccatattggtttgcgagaacaaccattatggtatgggaacagcggaatggagggcagcgaagagtcctgcttactacaagcgtggcgactatgtgcctggattgaaggttgatggaatggatgttcttgctgtgaagcaagcgtgcaaatttgcaaaagatcatgctgttgcaaatggcccaattgtccttgagatggatacctacaggtaccatggccactctatgtcagatccaggaagcacttaccgcaccagggatgagatttcaggtgtcaggcaggaacgggacccaattgaaagggttagaaagttgcttttggctcacgacttggcaactgctgctgagctcaaggatatggagaaagaaatcaggaaacaagtagatgacgccattgcaaaagcaaaggaaagttctatgcctgatacttctgagctcttcacaaatgtttataagaagggattcaacgtggagtcatttgggcccgacaggaaggagttgagagctactcttccgtaggttgggagaatggcagtcctcaatatgatatgatatccaggagaaataaacattgatgaagaaggcctcagacattgctggaattcttttgttggcaaatgaacctatgtagagatccgttgtcaggaggatctgcttagggcttgtttggttagccttcaatccatgtggattgagtgggattggatgggtttgaatcccacgcaagtcaaacttcttcataattttttccaaacccattcaatccatgtgtattgggaataagcgaacaaggccttatttgttttgcttccc

SEQ ID NO: 1054 - DNA, 897 bp, Zea mays
  Clone ID: 700100816_FLI
cagctcctctgccagcgcttcgccttccccagcgacggcatcatcatgctcactgacgaccagaaggacccgttccgggtgcccaccaaggacaacatccggatggcgatgcagtggctggtgcaggggtgcagcagcggcgactccctggtgttccacttctctgggctgggcgcgcaggtcgccgacgcggactgcgacgagcaggacgggtacgacgaggccatctgcccggtggactcgttccagaagggccccatcctggacgacgagatcaacgagaccatcgtccggccgctggtgcccggcgccaagctccacgccgtcgtcgacgcgtgccacagcgattccgtcctcgacctccccttcctctgcaacatgtccaggaccgggaactggcagtgggaggatcaccgtccaccgtcgggcgtctgcaagggcacgagcggcggccaggcggtgcttatcagcggctacagcgacggcaaaagcaagttcagcatgacgccggaggcctgcgcggcggtgggggccatgacccacagcttcatcaaggcggtggaatgcgagccccagggggtcacctacggccgcctgctcacctccatgaaagccatcatgaccaacgccggcggctgcaaccagcagctgcagggcgcctgcgcacccgcccgcaaggtcgtcaacttcagcggcgtgcaggaacctaacctgtcttgctcggagatgttcgacgtctaccgcaagccctttgcgctgtgaacctcctctgcattgccattgcctttgcagactatcacagattcccgtctggactctatatataaattaccgtgacggaataataaaccagacggatttatattatatatgatgatatgtcataatgtgtgcctt

SEQ ID NO: 1055 - DNA, 2386 bp, Zea mays
  Clone ID: 700100831_FLI
aaggaactcaggaagtcattgattgtttttccttcctatatattgtgtgctgtagcctgaccagtttatataatttacagatcaccatcgccctctactcgcagatcaaaatctcggtcgagatcacctatcaaataccgtaggagcaggcggtcccgctcctactctcccccagttagacgctcaagggagcagcgatcacgatcaccatcaaaatctcgccactcaaagtacggtagtgatcgatcgcatagggatgataaggacaggtatagcaggtccgggagaagggagagtgaacgatctcgtgatcatcattcatctagttcaaggaggaacagaagtaaaagtagaagtccaaggcataagaagccctccagagttgattctaggtcacccaagaaacaaagagaggaaagtttaagcccatcaaaatcaaggtcagcaagggctggttcaagatcaccacaccatcataagggaagcaaatcatcaccaactcgtgaccgtcattctcgccatagcaggcattcaaggtccagatctcctggcagaaagcaccgtcacagtgataaaagggacagcagaaagtctgagattcaggacgacaaaagaagatctcatagaggtagcagacacgacaaagatgaaagttcagtaaaggacgaaggggaaagatctcatagaagcaatagaggtgacaaagatgaaaggtctgtaaaggatccagtggaagataaagggatggatactaaagttgttgcacataagaggagctcaacagtatctgaagatgaaattctgaacaacaatagtagtaaccataagaaatatcgacatgaagttggtttggaagttgatggaaatgatgtgtgctctgctgcagctgaccttgataggaaacatgaaactggagtagatggctctttggggggcgctgcagaatcagctatgtgatggctgctgtatcattgagtttgctgtttacaaatggattgatgatgatggagaatgctgaactggtgtttattatctccttttctgatttaggagttttatttgcagggcatgaagatcttcggagaacttgagtgctgttcggagtgctcatctgatatattaaaatgtattcctcattaacttgagattcgctccttggagcaaacttctaaatgtaaagctggtgttgtaaggcgatttcatacagtgaggtagaaaccaaccatgtatttgtcgtttcaggctcatgattccatgaagagttcttggagcacatttctgggatgtcggttgaagatacaagggagtatacacttcctcaagtaaagtacacatatacaagactaataaacaactcatcttctaggcacttgcatttgaatcggaatgctttggctagtaaaatggtccaaatatgcttgtctacatacttctgatgcacttaatttgcttgaagttctgtttttatatcttgtatcaggaatggttcaaaaagtttgacttgctataccaatacttgtactttatcttttgacagtcacaatgaattgtgatgtaggttttatccatcttgtctactgctttttgaccagtctacctaaagttggtgcccttggtagctccagagataagctgtgaatcttgaaagttgaaacaattgcattgttacaaaatttttttaatttttttgcttcactattgtttctgcttttgtctgcattgttcgctgcaccttaccatgctgtgacggttgttgtcatgctggaaaacctgtgcaggtttttcaagggggttgacattggagtatgttttgagggaagtcagtgcatacttcattttgtgaatgaggactatgctgcggatgctcaatcggtgaggattacatgttctatcaggcgtgaagacttgtgcacgagagctgcaagtgaacctttctgcatgtggatgcttatttatatcaacatgtgtctcccggataatatagcttgccgcttgcgagttgggatatgagcactaatctaagcttggagtggttcaccaaaccgctctaagattaaggaaatatagggatattcaaacaacaaatggagttaatccaggtcgtgcctgtgggaaaaacatccataggcttcaatttgttagggaaaaatattttctaaaataagggtgaaatacactgcttttctctttcttttttgctcagaaagaataaaattagagtaaggaggtgctaaattctgtgccctggttcttttccctaaattttcagatttgtttttgaggtaactttacgaaatctggtcgatgtgaattgcaaatgtacaaatttgacgtgataaatgacgggaatcaaaatcgagtgtaaacaactatatcttgacacgtc

SEQ ID NO: 1056 - DNA, 1122 bp, Zea mays
  Clone ID: 700100839_FLI
gcctgctgcacccgcacttccgctacaccatggagatcaacgcgctggccagggaggcgctcatcaacgccgacggcatcatcgaggagtccttctggccgggcaagtacgccgtcgagctcagctccgtggcgtacggcgcgacgtggcagttcgacacggaggcgctgcccaacgacctcatcaagcgcgggctggccgtgcgcggggaggacggggagctggagctcaccatcaaggactacccctacgcccacgacgggctcctggtctgggactccatcaggcagtgggcgtccgagtacgtcaacgtctactacaagtccgacgaggccgtggccgccgaccccgagctgagggcgttctgggacgaggtgcgcaacgtggggcacggcgacaagaaggacgagccgtggtggcccgtgctggacacccgcgacagcctggtggagacgctgaccaccatcatgtgggtcacctccggccaccactcggccgtcaacttcggccagtaccacttcgccggctacttccccaaccggccgaccaccatccggaagaacatgccggtggaggagggcgggccgggcgaggagatggagaagttcctcaagcagccggagacgacgctgctggacatgctgcccacgcagatgcaggccatcaaggtcatgacgacgctggacatcctctcgtcgcactcgcccgacgaggagtacatgggggagttcgcggagccgtcgtggctggcggagcccatggtgaaggcggcgttcgagaagttcggcggcaggatgaaggagatcgaggggttcatcgacgagtgcaacaacaacctggacctcaagaaccgctgcggcgccgggatcgtgccgtacgagctgctcaagcccttctccaagccgggagtcaccgggaggggcatccccagcagcatctccatctgatccatcctcagcatgcattagtccaattaaatcggggggtgtactattattgcatgcagaggctgcttgtcgaataaaacgtactatatgtacgattgtattgtacatgtgtgtcaatgcaacaagaggcacgtttgagactttgagttaataccaattaaactagtaagatggc

SEQ ID NO: 1057 - DNA, 1500 bp, Zea mays
  Clone ID: 700100861_FLI
cagagggcctcgcacagtcgcactctttattatagccacggccggccggtggacgacagcaccacaccacctccaactacccgagaccatcgacgagcatcttcctgcatctgcaatggctgccgctaccgtgtccgtcccccgcatcaagctgggctcccaggggctagaggtctccgcgcagggcctcggctgcatgggcatgtccgccttctacggtccgcccaaacccgagcctgacatgatcaagctcatccaccacgccgtcgccgccggggtcaccctccttgacacctccgacatgtacggcccgcacaccaacgagatcctgctaggcaaggcgcttcaaggcggtgtaaaggagaaggtcgagctggccaccaagtttgccgtctccttcgccgacggcaagcgcgagatccgcggtgacccggcgtatgtacgggcagcctgcgaggccagcctcaagcggctcggcatcgactgcatcgacctctactaccagcaccgcatcgacaagaaggtgcccatcgaggtcacgattggtgaactcaagaagctagtggaagaaggaaaggttaagtacattgggttatccgaagcatctgcatcaacaatccgaagagctcacgcagtccatcctatcactgcagtacagcttgaatggtcattatggtctagagatgcggaagaagatataattcccacttgcagagaacttggaattggaattgtagcttacagtccactaggcagagggtttttttgtagtggagcaaaactagttgactcactgtcagagcaggacttccgcaagcatatgcctagacttcaaccagagaatattgtcaagaatgctaagatattcgagcatgtgaatgcaatggcagctaaaaaaggatgcacaccatcacagctagcattggcatgggttcaccatcagggaaacgatgtttgccccatacctggaacaacaaaaatcgagaacttcaaccagaacgtgggggcgctttctgtgaagttgacaccagatgagatggccgaactcgagtcctgtgctgctgcaggtgaaatcttgggtgaccgttatcctcaaatggccaacacctggaaggactctgagaccccgccattgtcttcttggaaatctgagtagccaatctggtgtctcttcaattctgccaccgtcacattggtgtatctccaaattgtcggactgcagaagatactcaggtgcactttgcaaaagcgtccatatgatgtgcttgccttttgcaagctatgatgtttggtacttggtgtgtattgcatgcctcaatttgtatcaagagtatttacccatgagtatagcttgaaggttaaaaccactggttcgacgaataaccatatgcatttgtatcgagagtatttaccatgagtagcaaactgaattttgtaataatagtcaaaagtgtgattgtaaaatgtacttagggaatgtggtacgctatattagcgtgc

SEQ ID NO: 1058 - DNA, 1244 bp, Zea mays
  Clone ID: 700100876_FLI
caaagggatagagaagcggcagctgcagaggcagagcgtcagagccatcgtcctcgcctcaccccgtagtcccgtacctagcgcagcgaagccggcacaatgccagccgccgccgtagcctcccctctcctcctctcgctctcctcgtcctcctcccatttcctctcttcctcatccacctcctttttcccaccctcctccgctgccgtcgctccacacgccgccgtcaggacgaaggcggctgtctccgtcctccgcgcgctgcgcgccgaggcggccaccctccccgtgctctcattcaccggagagaaggtcggggaggtaaccctcgacctcaaatccgcgccaccctccaccgcgcgcgctgtcgtgcaccgcgctatcatcaccgaccgccagaacgcgcgccgaggcacggcctccacgctcacccgcggcgaggtcagaggcggagggaggaagccctatcagcagaagaagacggggaaggcgcggcgggggtcgcagcgtaccccgcttcgtcccggcggtggcgtcgtgttcggccccaagccccgcgactggtccatcaagatcaaccgcaaggagaagcgccttgccatctccactgccatcgtgagcgccgccaaggacgccttcgttgtcgaggagttcgaggaggccttcgcgtcggggcccaagaccagggatttcgtggccgctttgcagcggtgggggcttgacccgaagcagaaagccatgttctttgccacggacttcgacgacaatgtgcggctcagcggcaggaacattggttccctcaagatgctcacacccaggacgctgaacctgtacgacatactcgacgcacgcaagctcttctttactcctgctgctgtagactacctcaactccaggtacggagccagtgtttccgatgactactatactgatgacgaggatgatggcgaggaggaactggtcgagcaagaagcagaagaaggcaccacagcagatgctgctccagatgcaactgaagagggcgaggcagacagcagctcctaggcgggaagtgtagatttgttgtttcgtttttgttatgttaccctcaggtgaggatggtggggaattctttcctaacggggagaccttttgtctgcttttattgtaagttgattatgttctcttactgaagcagtatactagatttccaaacctcacataagagcatgttttcaaatacatcatccgttgtcgaccactgc

SEQ ID NO: 1059 - DNA, 1965 bp, Zea mays
  Clone ID: 700100886_FLI
gccgcatcactccctcgccactcgcgcgcccgggctccttcccgccacgctcacgacgatgtcgtccccgacgtcctatcttctcctgaatccctccaaaccctcctccttccgccgactctcggccccgcgcctgagccggttccatgtctcctgcgacgcgccacggggcggcgggaggcgcgaggtcatccccgccggtgccagcaaggccaagaaacagatcgtattcttcgacgccgccccgccggtgtcccaggagggtggaggcgccgtgaagaaggcggggagcgagaagcttacccaggtgggcagcggcaacgcagcgctggcgttgttgaggagggcaaccaagatgacactctcggtgctgtccaacctcccgctcgctatctccgagatgttcgccattgccgccctcatggctctaggaacggtgattgaccagggagaggcacccagctactacttcgagaagttccccgaggacaacccggtcttcggcttcatcacgtggaggtggatcctcacccccgggttcgaccacatgttctcctcgccagtcttcctcggcctccttgcgctcctcgcgacgtccctcatggcttgcacctacacgacccagctccccatggtcaaggtcgcaagaagatggtcgttcacacattccggagaaagaatacggaagcaggaatttgcggactcgcttccccaagcatccattcaggatttgggagtcatcttgatgggtgctggatatgaggtattcaccaagggtccatctttgtatgctttcaaagggctagctggtcggtatgcgcctatcggcgtgcacttggcgatgctcttcatcatggctggtgccacgctaagtgcgacaggaagctttaagggctccgtggatgtgcctcaagggctgaactttgttataggagatgtcatgaaacctagaggggtcctctctgttgcgccggatgttttcaatactgaagtccatgtcaaccggttctacatggagtactatgacagtggagaggtctcacaattctacagtgacctctccctattcaaccttgatggtaaagaagtgatgagaaagactatcaaagtgaacgatcccctgagatacggaggggtcaccatctatcagacagactggggattttcagcattgcaagtgaagaaaaatggtgaaggccctttcaatttggcgatggcccccttgaaactgaatggggataagaagctctttggaacattcttgccacttgaagattcagactcgtcgaatccaaatgtcaaaggaatatcaatgcttgctcgagatttgcagtctattgtgttgtatgatcaagatggtaagtttgtaggggtccgtcggccaagctcaaaactgcctattgagatcaatggcaatgaaatactcattgaagatgctattggtagtactggactggatcttaagactgatccaggagttcctattgtttatgctggttttggtgcgcttatgttaacgacctgcattagctatctttcacactctcagatatgggcattgcaagatggaagtacagtggtcgttggaggaaagacaaatcgagccaaacttgaattttctgaagagatgaaccggctacttgataaagtaccagagctgatcagcgccgatgagaatctattagataccaaatcgacagccacatgaaacatttttttgtgtgtttttgtttgggattgctgaagatgcagtagctctgttcaggtgaacacacgttcgaattcacaaaacatggccttcaagaatagaaaaactgttacaatctttcagtagaacttcttagatcacacttcaattgagctctttgtacatctttgaatgaggaaactaaactgatagcttgttatattaccaatttaccaattaccatactttagagcaaaataaatatgtaattttggttc

SEQ ID NO: 1060 - DNA, 1144 bp, Zea mays
  Clone ID: 700100890_FLI
gggaaatccggttgctggcaaagactgggaagcaaaacagggcattcattgccgagttgggtgcgataccattgctatgtaagttgctgctgtcgtcagattggatggcgcaggagaacacagtgacggcgctgctcaatctatcgatctatgagccgaacaaggcccggatcatggaacaagcggactgcttgcatcttatcgtcagtgtgttgaagaatggtcggacgacagaggccaaggagaatgctgcagctacgctcttcagtttatctgtggtccatgactacaagaaaaagataatgaatgagccaggggctgtggaggagcttgcctctatgctgaccaaagggacgccaaggggaaagaaagacgcagtgatggcgttgttcaacctctcaacacacccagaaagctcaggacggatgcttgagtcatctgcagttctggctttaattgagtcactgaggaatgacaccgtgtcggaggaagctgctggtgctctggctctgctgatgaagcagcccaccatcgtgcatctcgttgggagctctgaaacagtgatcactagccttgtcgggctaatgaggcggggaactccaaagtgcaaggagaacgcagtgtcagcgttatacgagatatgccgtagaggcggatcgacattggcacagcgcgtggcaaggatacccgggctgaacacggtgatacagaacgtcacgctcacgggaacgaagcgtgccaagaagaaggcaagcctgatcgtcaagatgtgccagagaagccaggtgatgccgtcggcgttggcgccgctaggaagcaccttgacagtggttgatcattcgttggtagggaacggcacgttgaggcgcgccgcaagctttggcagcgaggagttatcgaaccctgtgtcgatctcagtgcccgtgccctaggtggtgaaccctgtatccatcccagagcccacatgattctcgcatttggtgagtttttgtccctgatattctttcattccatcctcaaatgaaggtatacagatttaatcccgaagaatcaaatatatcagatgtgctcgtgtgtacgtgactgctggatagctgtgcagatataggtttacagatagaattccttggcaagcttggaaatt

SEQ ID NO: 1061 - DNA, 775 bp, Zea mays
  Clone ID: 700100932_FLI
ctcatcacctacaacagcctgatggacatgtacgccaagtgcagcgagtcgtgggaggccgagaagatactgaaccagctcaagtgctcccagacgatgaagcccgacgtggtgtcctacaacacggtcataaacgggttctgcaagcaggggctggtgaaagaggcccagagggtcctctcggagatggtcgccgacggcatggccccctgcgccgtgacctaccacacgctcgtcgggggttactccagcctggagatgttcagcgaggccagggaggtcatcggctacatggtccagcacggcctcaagcctatggagctgacctacaggagagtcgtcgagagctactgcagagcgaagcggttcgaggaggctcgcggcttcctgtccgaggtctcggagaccgacctggattttgacaagaaggcgctcgaagcctatatagaggatgcgcagtttggaaggtagagagagggagagtggctgtgctaagaggtgggcttaggtacagttcgtacggttttctttggttacaggcaactgtcggtttgcaattcgcttgttatatatatatgctcaagttttgatagccacattctgaagcaagtttcgatcagcgcatagtgtgtacctacctatagccacattctgctggtgcatactttttagattgcgacaacctgaagcaagcctgaagaggggcacctgatgttatgtatgtatgtatgtatgatgtgtcattcgttctgaatacaaactacgccattcagtt

SEQ ID NO: 1062 - DNA, 1961 bp, Zea mays
  Clone ID: 700100934_FLI
caagttgggagaaaccagttgagttgatgacacctttggagagggctgatgcctcaactgaatggaaagaatttactacaccagaaggacggaagtactatttcaacaaagtgaccaagcaatcaaaatggactattcctgacgagttaaaggttgcacgtgaattggcagagaacacatcaaatcaacaacctgatcgagaatcaggaatagctactagtgctcttgtcagatctgctgcctttgaaccttctactgcacctgctaatcagtcgtcatctgctgttggtataattgcttccagcgcacatgatggatcatcaaactctgttctttctggtcctcccctgccgcacaatgtggagaatacttccagttctattgttggcatgcaaaatggtggttcgagtactgctgttgttcctgttgcagcaagcacagaagttccattagttgcaacagatgcagggtccagcagaaacaacgatgaaaattcatctctgaccactggggctgacgcagaggatggtacatccgctgaagatttggtggaggccaaaaagaccatgccagttgcagggaagattaatgtcactccagtggaggagaaaacaagtgaagaagaacctgtagtctatgccactaagatggaagcaaaaaatgcgttcaagtccctgcttgagtcggtaaatgtggagtctgattggacatgggatcagactatgagagtcatcataaatgacaaaagatatggtgctttgaaaactcttggagagagaaagcaagctttcaatgagtacttgaaccagcgcaaaaagtttgaagccgaagaaaaacgtatcaaacagaggaaagcacgtgatgatttccttgcaatgttggaagaaagcaaggagcttacatcatcaacaagatggagcaaagcaatacttatgtttgaagatgatgaaagattcaaagcagttgagcgtccaagggagcgtgaagatttatttgagaactatcttgtggaactgcataagaaggaaaaagccaaggctgctgaagaacacaaaagatatgtagcagaatacagagcttttctagaatcatgtgacttcatcaaggcaagcactcagtggagaaaagttcaggaacgcctggaggacgatgaacgttattcccgacttgagaagtttgatcggttggatatttttcaagagtacattcgacacctagagaaagaagaggaagagcagaagcgggtacaaaaggatcaagtgagaagacaagagaggaaaaaccgtgatgggtttcgtaaaatgttggaagaacatgttgctgatggcacacttaatgcaagaactcggtggcgtgattactgtgcacagataaaagattcacagtcctacttggctgtagcatcaaacacatctggctctacaccgaaagagttatttgatgacgtgatcgaggaacttggcaaacagtatcaagaagacaagatccaaattaaagaagtggtgaaatctggaaagattcctatgacaacttcatggacattagaggaattccaaactgctactctggaggatgatgctcttaaaggaatatcaaccatcaacatcaagcttgtatatgacgatcagcttgaaaggctcaaggaaaaagagcaaaaggatgctaagaagcgccagcgcttgggtgaaaatttttcagatcttttgtattccatcaaggaaatatcagcttcttcaacatgggatgattctaaacagcttttcgaggatagccaagagttcagggccttggacagtgagacttatgcaagagagctttttgaagagtgcgttgtccacctgaaagaaaggttaaaagagaaagaacgtttgagggaggaagaaaaggcaaaaagagagaaagagcgtgaggagaaagagaagaagaaagagaaagagaaagaaaggaaggagaaagaacgc

SEQ ID NO: 1063 - DNA, 1055 bp, Zea mays
  Clone ID: 700100959_FLI
catagagctaggtcattcgaagatgtttctgggaatccccttgtgaaggatgcctatgatgctgctcatgagactgagaggaagcgtgcattatcagcacttctctcccaaacaaagcagcaagaacgaaaggacgccgagactttagcagaagcaaaacgtatcatggaatctcgtgctgctagcaaaaatgttgatgtagctgtaatgcctccgaactctgataatgctatggtacctgttgatggtgtatctccttcaagcagtactcatccatctttagcacatccaaatacatcagctaacatcttgatacctaattcactacgaacgcttcgagtgtatttgagaacccatgcgcttgaccaaatggtccaagcagtaggtgcttcagctggccttagagttatcaaaagggttgatcagacactacaagagctagcggtgaatttgaagcctaaggtcccaacgaaagcagtttgcatagagcatattgaactgcggaatgagctactcacattgcttaacctacaaaagcagctgcaaaataaagaggctgaagtttcagctaaccgggaaagttccttcacagaggcaccaagcacacctaagcgttctaatagggacattgatcggcccttcatccctgatacaagtgggtttacaggtgaaagagcaggcaaacgggatcacaagcggaagtccactggaagatttatagatgcgcctccatcaccaccccagtcgaagcggcctagaaaattgaagggatctgactgatagtgctgttcaaatgtcaggatgaaaactctagtcaaacaaccaagcacttgcagtcttacagtagagatgaactagtagaacctaataggtcagcaacggcatcaatggaaatccgttgggctggccagtcatgcaggaaccgactttcgctgcttgccctgacttcgggccatatgctgggtggaccggttttggatttataatgtatctatctattattgtcatgtaatgttacacagataactgagaggtcgaaatcgtcacttttcagc

SEQ ID NO: 1064 - DNA, 1697 bp, Zea mays
  Clone ID: 700100967_FLI
atcccgtcgcatcccatcccactaccacccatctcgtcgtccgccgattcgatccggttcttccaacccagggtgagtctccggatccgtcgccgtctggtatccgtgtgctctcgtcgccgtcgccgtcgccgccgtctgactgcccccctcgcctcccgcggcgtcgggtctctggtgctgctgctgctgctgctgctgctgcgtgcagggcagtgatggcgacgaagaggagcgtgggcaccctcggcgaggcggatctgaaggggaagaaggtgttcgtgcgcgccgacctcaacgtcccgctcgacgatgcccagaagatcaccgacgacacccgcatccgcgcctccgtccccaccatcaagttcctcctcgagaagggcgccaaggtcatcctcgccagccacctgggtcgtccaaaaggtgtcaccccaaagtacagcttgaagcctcttgttccacgcttgtctgagctccttggagttgaagtcgtgatggccaatgattgcattggtgaagaagttgagaagttggctgccgctttgccagaaggtggagttctgctcctagagaatgttagattctacaaggaggaagagaagaacgaacctgagtttgctaagaagctagcatctgttgctgacctttatgtcaatgatgcttttggcacggcacacagagctcatgcttcaaccgaaggagttaccaagtatttgaagcctgctgttgccggcttcctcatgcagaaggaacttgactaccttgttggagctgttgccaacccaaagaagccatttgccgctattgttggtggatccaaggtctcaagtaagattggtgtcattgagtccttgctggcgaaggtcgatatcctcatccttggtggtggtatgatctacacattttacaaggcacaaggatattctgttggaaaatctctcgtggaagaggataaacttgagctcgcaacttctcttattgagaaggcgaaggcaaagggggtttctcttttgcttcccactgatattgtagtagcggacaagtttgcagctgatgctgagagcaagattgtccctgccactgctatccctgatgactggatgggtcttgatgttggccctgatgccaccaaaacattcaacgaagcattggacaccaccaagactgttatttggaacggccccatgggagtgtttgagttcgagaagtttgcagctggcactgaggcgattgccaagaagctagctgagcttacaaccacgaagggtgtcactaccatcatcggcggcggcgactctgttgctgctgtcgagaaggctgggctggccgacaagatgagccacatttcgaccggcggcggtgcgagcttggaactcttggaaggcaagactctacctggtgtccttgccctcgatgacgcctagatccgctgctgctgctgctactcaggttctgccagctttgcgtgtcatcttgtttcggaccttggtgtagcactgcaaggctaaggtttactcctccgcacatggacttttggggataggcttgccaccgtgttttgctagatgagtcgtggaataagcttttacttcctcgctgctgtgggtgaagtgactggaattcggaaatttggaactaacaaaaccccccgtggatttgtatgatatgttttgttcgacagtttgcgtcccatc

SEQ ID NO: 1065 - DNA, 1412 bp, Zea mays
  Clone ID: 700100978_FLI
tctcctccaccgtcggagctccggcctccaccccgaccaggagcagcttcctcgggaagaagctcaacaagccgcaggtgtccgcggccgtgacctaccatggcaagagctccagcagcaacagcaggttcaaggcgatggctgccaaggaggtggacgagacgaagcagacggacgaggacaggtggaagggcctggcctacgacatctcggacgaccagcaggacatcaccaggggcaagggcctcgtcgacaacctcttccaggcgcctatgggggacggcacccacgtcgccgtgctcagctcctacgactacatcagccagggccaaaagtcttacaacttcgacaacatgatggatggcttctacatagccaagggcttcatggacaagctcgtcgtccacctctccaagaacttcatgaccctgccaaacatcaaggttcccctcatactgggtatctggggaggcaaaggccagggaaaatcgttccaatgcgagctggtcttcgccaagatgggcatcacccccatcatgatgagcgccggcgagctggagagcggcaacgccggagagcccgccaagctcatcaggcagcgctaccgtgaggcctccgacctcatcaagaagggcaagatgtcctgcctcttcatcaacgacctcgacgccggcgcgggtcgcatgggcggcaccacccagtacacggtgaacaaccagatggtcaacgccaccctgatgaacatcgccgacaaccccaccaacgtgcagctcccggggatgtacaacaaggaggacaacccccgcgtgcccatcatcgtcaccggcaacgacttctccacgctgtacgcgccgctcatccgcgacggccgcatggagaagttctactgggcgcccacccgcgaggaccgcatcggcgtctgcaagggcatcttccgcaccgacggcgtcgacgaggagcacgtcgtccagctggtcgacaccttccctggccagtccatcgacttcttcggcgcgctgcgtgcccgggtctacgacgacgaggtccgacggtgggtgagcgagaccggcgtcgagaacatcgccaggaagctcgtcaactccaaggagggcccgcccacgttcgagcagcccaagataacgatcgagaagctcttggagtacggacacatgctggtggcggagcaggagaacgtcaagcgtgtgcagcttgctgacaagtacctcaacgaggctgctcttggtgaagccaacgaggacgccatgaagactggctccttcttcaagtagaaagcaactctttgttattgctagctaggcgcgaggccggcataggatcgaggaggtgaatatatatattacttggatagttttgtaatatataattgcagctgaacgaggacatgcatacat

SEQ ID NO: 1066 - DNA, 1152 bp, Zea mays
  Clone ID: 700100990_FLI
gcagaaaccgacgcgcaggcacacgcacgccagactagcggctctccacgcaagcggagccgaagagaaataatggccacggcgacggccctctccctcagcggcggcgggggcggcactcccctgctccgggggcacgcggccttggcctcggggcggtgctgcgcgttcccgcgctcgcggtggaggccgccgcgcctgtcggcctcccgcgcggacgactcctcaccggcgccgttcgagatgacggtggagggcgcgctgaagctgctcggcgtcgctgagggcgcgtccttcgacgaaatcctgcgcgctaagaactccgtcctggcctcctgcaaggatgaccaggacgccgttgcccaggtcgaagcagcctatgacatgttgcttatgcagagcttatcacagcggagggctggaaaggttgctaataacagcatccgctatgctgatgttaaacctgtaaagagtgcaggagctggggcagtcccacagtggatgcaggcaaccatgaagaatgcacctattacattcgagactccatcttcgagtagcttgggcatccagtcttgtgtttatggtgcactaatggttttcacgtatgctagtggaagctcgacatctttgccatctgcatacactagccctgatgtcccaggttttatcctagcaacaggatttggtgcatcactgtatttcctggcaaagaaaaatatgaacttaggtaaggctgcattgatcactgtcgggggacttgcagctggtgcaactgtcggatctgcagtggaaaatttcctgcaggttgatatcgtgccctttctaggcatccactcccccgccgtcgttgtcagtgaatttattctgttctcccagttgttggtatcactgtttgttaggtaggatctgaaatcaagctgtcatcctgatcatggcatgtaagtaactgaaatggttcgtgttcaaacttcaaagggtcagggaaatgcttattttccgctcaaggtgcaagcagctgtgtatagcaaacaatacatggacatctctgtcccttataaagatcacttgtatctagttctctcaaccccaatcccaatctttcagaagaaagtttgtatcgattgcagaatgtggaatgagaattcttggatt

SEQ ID NO: 1067 - DNA, 1455 bp, Zea mays
  Clone ID: 700101003_FLI
gtaccacttctcgtgccagttcaccactgacttgattgcaatgaaccatgccgacttcatcatcaccagtaccttccaagagatcgccggaaacaaggacaccgtcggccagtacgagtcacacatggcgttcacaatgcctggcctgtaccgcgttgtccacggcattgatgtgttcgaccccaagttcaacatcgtgtctcctggcgcggacctgtccatctacttcccgtacaccgagtcgcacaagaggctgacctcccttcacccggagattgaggagctcctgtacagccaaaccgagaacacggagcacaagttcgttctgaacgacaggaacaagccaatcatcttctccatggctcgtctcgaccgtgtgaagaacttgactgggctggtggagctgtacggccggaacaagcggctgcaggagctggtgaacctcgtggtcgtctgcggcgaccatggcaacccttccaaggacaaggaggagcaggccgagttcaagaagatgtttgacctcatcgagcagtacaacctgaacgggcacatccgctggatctccgcccagatgaaccgcgtccgcaacggcgagctgtaccgctacatctgcgacaccaagggcgccttcgtgcagcctgctttctacgaggctttcgggctgacggtggttgaggccatgacctgcggcctgcccacgtttgccacagcctacggcggtccggccgagatcatcgtgcacggcgtgtctggctaccacatcgacccttaccagggcgacaaggcgtcggccctgctcgtggacttcttcgacaagtgccaggcggacccgagccactggagcaagatctcccagggcgggctccagcgtatcgaggagaagtacacctggaagctctactcggagaggctgatgaccctcaccggcgtgtacgggttctggaagtacgtgtccaacctggagaggcgcgagacccggcggtacctggagatgctgtacgcgctcaagtaccgcaccatggcgagcaccgtgccgctggccgtggagggagagccctccagcaagtgatgcgcgacggcggccacagacctgatcgatcgatgagcgagagggagcactcggagtgtcgtgtcttttcccttgccatttctttctttttttcccttcccggaggcgaaaaaaagagtctgcttttgctaggcggcgggcgttcgttgctgctctttgcttcaagagttaaatttacctaccttgtcaaggtcttgttccatcattgatccgggtgtcgcttttttagtagtctgatggactgttagtagtttgcgttgcgtcggttgagagggaacgttggtggtggtggtgtgtgtgcagtcaggcgtggtgctccctttgtttcctggatgggatgttgctccttgaataataatcgtagtggccttggagcccttttcctg

SEQ ID NO: 1068 - DNA, 1220 bp, Zea mays
  Clone ID: 700101038_FLI
gacgcgcaagcggaaggaagggggagcgcaacacgcgcggtcgccgggagagagagagagagaaagggcgagctagcgagcgagatccccctctcccgctgccggatccgatctgacctgacctcgtcgccgcctgccgtgggagggagaagaggaagaggaggcggaggcggcggagatggcaccggtgtcagcgctcgccaagtacaagctcgtcttcctgggggaccagtccgtcggcaagacgagcatcatcacccgcttcatgtacgacaagttcgataacacctaccaggctacgattggtattgatttcctgtcaaagacaatgtaccttgaagatagaactgtgagactccaactctgggatactgctggtcaggaaagattcaggagtttaattccaagctatattagagactcttcagttgctgtcattgtattcgatgttgcaagcaggcagtccttcttaaatacatctaagtggatagaggaagttcgcactgagaggggcagtgatgttatcattgtgcttgttgggaacaaaactgaccttgttgacaagaggcaagtctcaatagaggaaggggagggcaaggcgaaggaccttggagtcatgtttattgaaaccagtgctaaggctgggtttaacattaaggcgctgttccgtaaaattgctgctgcacttcctggaatggagacgctctcatcagcgaagcaggaagacatggttgatgtgaacttgaggtccggcaatgcaaactcgtcccagtctcaggctcaggctgggggatgcagttgttagttgcagtctctgacacttgcttgctcatgatctttgggactctgagcatcagaaggcgttatcactgatgcttctctcgggaagaagagttgattgcctctcgccagtgaacacaccatagtctttacccggtgaatggaccgttgcattggaacgatacgttttatgagttttctgttatttcctcagtggcctaagctagcaacagtgtatagttgggttgacactcaaacttctaccattcgagttgggtattagaactagttattattggttcatgttgaacttatatatatttccatccttttgcagttagtttgagtcatatttgctgtgtaccaaacatgtattgcaaatttggaatttttgtaagctataataaggccagcacggcaatatccccacatgataaccc

SEQ ID NO: 1069 - DNA, 952 bp, Zea mays
  Clone ID: 700101110_FLI
ccgcaagtggggcaagtgggcggcggagatccgcaacccgttcaccggcaagaggcagtggcttggcaccttcgacaccgctggcgcggcctccgcggcctacctgtccgcctcccggagcttcgccgacgagaagcggcgccgccgcgggctgcccgtggccgcgtcctcagcagacactccggcaagcggcagcaccccgacggcttcctcctcgtcgtccgcctcgaccgctccattcgcgcacccgtcgccgtcgtccgtgcttgaaccgagcaaggaagcgcggaacacgcagtccccagaggcgacgcccgcccggccgtcgaccgactcagcgcagctgccggaggacccagagttctaccaggaccttctgcgcggcctgcagctgcccgacatcgacccgctggacttccgcgccgggctggacgctctggatctctccgatgcggacttcggcctggacgacgaacatgacctcctgctcggggacttcggggacgaggagatggagatcgacctcgacctcgacgacatcaacgacgtcttcccggagatgcccggctgcgacctcggccgcggcatggacgacttcctgcaaaccgttgatttctgcgtgtgaattaaaagggagtgtgcccttgatatgttagggttgtttggtttcataaacgagcccctgagagtgtgcttggaaaggggagatgagatatcttgggttttttccccgggcaagttggatctgctcgtgcccaggagatttcctctttgccgaacacaccaccattagcggccggagagaagaggtaattttggtaggttatattatgtttaaggtttaaggtatagtgcctaagtgtttgctttgttatttggtaattggtaatgcttgtcaaagacattgtagtggacaagttcattgagctgttactattaagcaatgaaaggg

SEQ ID NO: 1070 - DNA, 1271 bp, Zea mays
  Clone ID: 700101128_FLI
gtcagatctttgcagccaccgttctatcttccttatcttcttctccagaacggcaatccttctgcccggtccttcctccagttcggctagcggggcagcgctccctgctgcttctccctccctggtactcctccagtcgcggcctcccactccccagccgatttctctgcgcgcgatactccctccagtcctccctgctcgcgtcgtgaattccctgccatggacgcgcgccgagctcctcgcgcgggtctctggtgcccagccgactagctcatctcccttttctctgatggcgcgcccaagcactgctcctgcaccgtgccgcgttccagctcagactaccctgctcctacgcccggttccagctcgctggagctcctgcgcacgtcggatcccagctcgcggagcttcctcctgctctgctcatcggtcgcgccctgctctcccagccatcttcctcttccccaccactggctcgaccgcacgctctcccagctcggccatggccaccgcgccgtggagccctgcgcaccgtggtgcttctttcctgcccctcccatggcggctcccctggatccctcctctgctcggtcgcctccctggagtccaagtccggacgccgctccagccttctcctttctctcttctctagccctgttcggcctcaagcttcagccatggtggcgtgtccatctccctggtatttccccaagccgcgcccctctgcttgactatggtcaccgtcacgcccaggatttggccgcgcctgtagtttccaaattcgtcttcagctcgcggcgctcctcatcttctgccccagtcctatgtcaacctcgctaaccacccatggttgatcctgtggttcgtgagggtgaatcacagtttgagattgaaaaaggagcttagaaggtgtagataatgaagctccagattgacgtttgccagatgttcggtggaacgcctgaatcaaagttcgtcgtcgttcttgtggattttggatcgatttggcttggttatagttttgtgctgctgttgatggtgttaagtgccggtgggatcggccttcttataagtctaagtaacttttctatactttttattgagcatggtcacttgagctagcatatattttaaacttataaataatttataatatttcaaagtttatttctttgaatcactattgtaatcactccgataaacataatgtaaatttgatgtaacttgtaaaatttggtaataagagttccgctgcaaaattgttggtgtgt

SEQ ID NO: 1071 - DNA, 2197 bp, Zea mays
  Clone ID: 700101131_FLI
ccgggagcagcgcggccatagtcccggccccggtcccgccggcggagggtgagaggagaaggaaggagagagtggaggagatcgggagggaggatgcctggttcaagcagagcagcgcagaggtttctgttgctcctggtggtcgctggaatcggtttaaaacctattcaacaattcaaagaacactggaaatatggggattcgtttttacatttatattcaaggcttggctcaacaatcaaaagttcacatacagaggggggatgactgaggagaaaaagataatgaggaggaaagttcttgccaagtggctaaaggagagtcttttgagattaggccccacattcatcaaaatagggcaacaattctcaaccagggtggatattctcccacaggaatatgtggatcaactatcagagttacaggatcaagttcctccatttccttctgagacagctgtaaaaattgtcgaagaagagctgggggcatctgtaaatgagatatttgatcgatttgattttgaaccaatagctgctgctagcctcggccaggttcatcgggcacgtctgaatggccaagaggttgtgatcaaagtgcaacggcctggtctgaaggagctgttcgatattgatctgaagaatttaagggtaatagctgaataccttcagaaagtggacccaaaatcagatggcgccaagagagactgggttgctatttatgatgagtgtgcgtctgttttatatcaggaaatagactatatgaaggaagcatttaacgctgaaaaatttgctgaaaacttcaaaaaattggattatgtgaaggttcctgaaatttactgggcacacactactcctcaggttttaacaatggaatatgtcccaggaattaaaattaacagaataaagcagttagataagttaggagtcgatagaaaaagattaggtcgttatgctgttgagtcctaccttgagcagatcttatcccatgggtttttccatgctgacccgcatccaggaaacattgctgttgatgatgtcaatggagggagacttatcttctatgacttcgggatgatgggaagtatcagtcaaaatatccgggaaggattgcttgaagtattctatggagtttatgaaaaggatcctgacaaagtgcttcaagcaatggttcaaatgggtgtccttgttcctactggagatatgactgctgtcagaagaaccgctcaatttttccttaatagctttcaagagcgcctagcagcacaaaggaaggagagagaaatggcaaccgcagagcttggattcaaaaagcaattaactaaggaggagaagtttgaaaagaggaagcagagacttgctgcaatcggagaggatcttttggcgattgctgctgatcaaccatttcgcttccctgccacatttacatttgtggtcagagcattctcagttctagatggtattgggaaaggccttgatcctaggtttgatattacagagattgctaagccatatgccaaggaattgctaagatttaatgacgctggtgttgaaatagttgtgaaggatgcaaagaagagatgggaaaggcagtcccgtgccttttacaatttgttccgccaacccgatagagttgaaaagctcgcacaaattattgaacgtttggagcaaggtgaactcaagcttcgtgtcagaacgctggaatcagaaagagcatttcaaagagttgccgctgtacagaaaacaattggatatggagttgctgcaggtagtttgatgaaccttgcaacaatgttgtacttcaattcaatccggggaccagcaaccattgcatactccctctgcgcatttttcgggctgcaagttctgatcgggcttgtcaaggttaagaagttggatcggcaggagagactgataaccggtactgcatgagctatgagttattcatgatcaatcggtgagaactgaaccgccacttttcagcgttgtgcgtcgtcgcgacaccttttttttgcttttgcccaaattttacccccaccacgatttagcataggcatgccggttacccctccccccccggttgtatgatagttgtatgtaaatgtgatgataacatataaagatgtacatagtgtataatagacattctccatgtattgtttcgttttcatgatgtagcagtacgtacaggattttctttc

SEQ ID NO: 1072 - DNA, 1536 bp, Zea mays
  Clone ID: 700101143_FLI
ttggccaatcctgacacattatcttctcatccaagccgagagcgtgaccagctcacccagatcagaatccagacctcgtcagagagcattcccttgtgcatctcggcctctccttcctcccttcctcgcccgcccagtcctctaaccatcttctccaaacgcccggagatggtctcgctgcgatgcaccaccgcgcaccactccctcctcggctcgccgacctgcctcgcgcgcccgcggcggcggccgtgccccgtcgtgcgcgctgccgtcgccgtggaggccggcgctcaggccaaggtctcactcatccggattgggacgcgtgggagtcctctggctcttgcacaagcccatgaaactcgggaaaaactgaaagccgcacactctgagttagctgaggagggggctattgagatcgtcatcataaagaccacaggagacatgatcttggacaaaccccttgcagatattggaggcaagggtttattcaccaaggagatagatgatgcactcttgcagggaaggattgatatagctgtgcactctatgaaagatgttccaacatatctacctgaaggcacaatattgccctgtaacctcccacgagaagatgtaagagatgcattcatatgcttgactgcaaattcgctcgcggagcttcctgctggcagtgttgttggaagtgcttccttgcggagacaatctcagattctctacagatatccatcactgaaagtagttaacttcagaggaaatgttcagacacggttaaggaaactcaaggaaggagatgtgtctgctacattgttggcgctggctggattaaggcggctaaatatggcagaaaatgcaacagctgtactatcagtggaagaaatgcttccggcagttgcccaaggtgctattggaatcgcttgccgaagcaacgatgacaaaatgatggagtatctgtcctcgttgaaccacgaggataccagactagctgtcacatgcgaaagagaattcttggcagttcttgatggcaactgccgaactccaattgcggcctatgcttaccgtgacaaggacgggaactgctcattccggggcctactgtcttcaccagacggatctaaagtatttgagacggcaagaagtggaccgtactctttcgacgacatggtcttgatgggcaaagacgctggccacgagctgaaggcgaaggctgggcctggcttcttcgatagccttcaatgaacagaatgtgcggccatgcgcgatttcagttggcaccctttcggttgaaaacgagggccaaagtaggttgttgaggggtttgtttttgtttcttctttttttctcctactactagttcctgctagagccttgtactaccactcatgttgagcagccccattcagcttttgttgtatctcatgttcttttagcactctgggttagagagagccggtatctgcacagctatgttgtgtcgaagttgatgtgactctgcagatagttgttgtttcaagaatatttgagcgagctcatgat

SEQ ID NO: 1073 - DNA, 2547 bp, Zea mays
  Clone ID: 700101153_FLI
gttttagttctactaaagataaagtgttgagtgttctaaatgttaaaagcatgataagtgtagaagttaaataagatctaagttagagttcttgctgtttggactgcatgtccaattttattacgtggctagttaagtaaagtaaaccgtgttttctgtagaaatgttatatataaaacttgtagataatctttttatcttgcttgtgtaaaaatttcatgaccataggttcagtagtttaggagttatgatttttccaagtccagtttcagaatctgtccagattctgtactgatttcgaaaatgaccttgtttgtccaagttaaactgagaattagctcttagtaattataggagaattgtagtacttttcttaagctttccaacaaattttggatcaccctttttggtgatctataaattaagttacagctgtttgagttagtatctctgaatctgtccaaatctggacagcaatgtttgtttgtattaactgacttcgatacacattgaatcactttgagatgattataaatgaattatagacaattctattagctttctaaaaagtctaggatcacctgatttggatttatgaaactccagttatgcatttttgaagtgaagagccgaattctgtccaaatctggacagaattaaagtttagcactgtttgaccattcaaactgttgaatcatgttgtgatgataatataagagttatataggactttctaagctttccagaaagtcctagtttactatttttggatgcatattttgtgagttatgaataaaacaattaatcgttgtgctgctgtctacatgtttttgtgcatgtccgagaacggttgctcgacttcttcatgaatgaggtgatagacattagtggatcatgcagggttgagggtgcttcatataactaaatctagcatggcttcctaggaaaagatggaatggccacaccagtgtcgagacttgatttcatatatatttagttaggcacaacgatagcgcaaacagttgattaccaaatttgtcaattagtattttagtttggatatagagtacgcttatgcatgagctatttcacaatgtttatttatgagatatataatggtaatttagaatgatatcatcctactttcatatatttgatggacttcacatatgcatctagatttttctccaagtttcagcatgtagtacataggactaggtgtcgatccggattgtggcgcccgacgaggtgggggcgtcgtttgagagggccgatgaggtgatcttcgaggaggaggaagatgatggacagacaacgaggacacgccctgaagacccctcacctatcactagcggcgtggagagtggcagggaatcctcattttttgtactgacggtacgatatacaacaggggaacttggtacagaaccagccaagctgcaagttgaagaaatcccaagccaagctgaacaggttcttatacagaaccagcagctcccggccatggagaaagagaagcaatccgttcctgaatgctcgctccaaaaaagtgttagttctggatgcctcaactcagcagattggatgaatggacctgccaggccaaactttcttgacttccaggggctggactttgaggcagcatttgggctgaggagagcttacagtgaaggagacattcagatatgaaatgaggttgagatattacaagggcagctttttccacgagacctcgccttgcatggagatgtagcgcaagactgtatatttctggtaatactggtgttgttgtcatgctttatgagcccagatataagcacagtgtcagcagactagaaagggagcctggggttaaatttaagcatatctctgcgccacaacccactgatgtagcacaatctgctggcagtgaagctgcagatgccattgcgagtgtgtcagacagtgttattcctatcttcaggcagcaagcagagcagttgctaagctcttccagtttgtctgcagctgacttgcttgccaaagcacttgcgaaggcagttggttacacggacataaagaaaagatcattgttatcttccttggaggattacagtacactacatcttcaaactggcagaccgatgtggtcacctgggtttgctataacattccggtgatcgtgtttcttcatcgtcggggtcatatttgttcccattggtgttatcttcagtttgacgtcggcaacgtggtcatggtgaccggcgggaggaacaccgggcatgtaggagtgatcaagaactgggagaagcacaagggcatcttcgaggtcatcgatgtgctgcttggagtttttgcatgctatgtctagttttctcctatttgttgtggaggaaaacataaaatggaattcaaatttggtggtcctaaaagtgtggagactttaattcatataaagttaggcttaacattagtgcaaacagttgtattttagtttagatttagagtacacttatgtatgcgttgtttgacaatgtttatttatgatatattgaatggtacttattt

SEQ ID NO: 1074 - DNA, 1847 bp, Zea mays
  Clone ID: 700101161_FLI
gttcctccgtccgggaggacgaggaggaggaggcgcatccctccatcctctgcgactgcgtgcgtctctcgagctcgagtcgattgatgattcatcttcctagtctcgtctccgcgccattctccaaatccatctatcgtcaccatcccgatcccagccccagacccgatgcagcaacagcaggacccagcacccgccgatcccgacccactgccgccccccgacctcggtgatgccgccgcctcgtccgcaacgcagacgatcccttcccgcaacgcctcctccaagtacgatttcgtcaaggtcaaggtctggctcggggagaacgccgaccactactacgtcctctccaggttcctcctcagcaggatgctcacagtcaccaagattcctaatcatgtcgccatcaagattgcccttgagctcaagaagctgcttgtcgacaacagcctgcttgatgtatcccagagtgatctagaggctaatctgttcaagcttatggaaacggggatacggagaggagtatataaatcgctataaaatgatgacaaggttccatcatcaacgggttccactagtaattttggtgtgtggaactgcctgtactggaaaatcaacaatcgctacacaacttgctcagaggctcaatttgcctaatgttttgcagacggacatggtgtatgagctgctgcggacatcaacagatgcgccacttacttcagttcctgtgtgggctcgcgattttaattcacctgaagagcttatcactgaattctgcagagaatgcagagttgtacgcaagggtttggctggcgatttgaagaaggccatgaaagatgggaaaccaattattatagagggaatacatttggatccaagcatttatcttatggatgaggaaaagagtgatggtaattccaggacggagaagacagtaacagattctgaaaatccaggcatctctgtagaaaggaaggttgaacatcaattcaaaaatggactagcagagaacagaatggattctactgaggacaacaaaaacttcgtcaaaagcaaaaaaagcacactggagaaaggtagaaccagtgaaggtctatcttatgctcagaaccacgaaaccaaggtccatgattctgcacgttctcaagaaaaaaatcccaaggatgaaagtgatgggcacaaagatttggaccaacagaagaataatgccaccaagaaagacaaacctgctgctgagccgataattgttccaattgtactgaggatgtctgattttgatcacaaagcattgctagaggaatggatagccactagagctttcagagataattgcattcctcaggatcatcggaaacttataaacaaccttaagcttattcaggactacctttgttcttttgagtcacagggattgaccattgttgatatctcagcaaattcgtttcctcaaacattagattggcttcacagctatcttcttcagtgcatcgagcgaggtcttttggctgcgtgtttagaaagctgcaatcaaggtcaatgacactcttggatgtaacctgtccaaccacacctcagtgggcattatatgctggcaatggacactaagaatatcattgtaaaggattacgcatgagtctggatatcatctccaaccaagaccgatatgaaaataccatcgtgatgttgtcaataccagccataagcgtgggtctgtctgattggggttactcgcattaatattgtactgtattgtattagaggttatgcggcatactcataatctgaataagataacaaaatttggcattgtttgctttatctgaatataaacttgtaaagatttatct

SEQ ID NO: 1075 - DNA, 1549 bp, Zea mays
  Clone ID: 700101202_FLI
agctagccggacgaattcgggcgtgcggcttcgagctctcgcttatatcagcgccgcgcgcgccggccggcggccggaggagccactatcatccccggcgtttgattcggccagagcagcggccatggtcgaatatatttgatctctctcgatctgatctgagctgagccggctggtggcccgggaaggacgaagtgtgtcgccacctataatttgatgatgtttgtgtcatcatgatcggtggctagcagaataagagatgataagcggcaacctcaacaatgaagagctggggggcggcgggtgcaccaaggccgaggggccgggcgcggccggcggcgccggcgccgtcgtcgcaaagagtcccgtgctgtcgagctcccggcactggccgccgtcgacggagtcgaggatcgtgcgcgtgtcgcgggtcttcggcggcaaggaccggcacagcaaggtgaggacggtcaaggggctgcgcgaccggcgcgtgcggctgtccgtgccgacggcgatccagctctacgacctccaggaccggctgggcctcagccagccgagcaaggtggtggactggctgctcgacgccgcgcaggacgagatcgacaagctgcctccgctccagttcccgccgcaagggcaggacctcgtcgcccatctcccgccgtccatggtggcgcccttcgccaacgttgcagccgaccgggccgccgccgccgctgccgccgcgaacgcgtcggccgcgatggccgaaggcggcaaacgccactgccacggaggcatcaaagggctcatgggcatgggcctcaacaattctatcggcctcgccaacgccaccatgccgctggctcacggcttgtactacacgcccggtgagtcttggaccaatggaggcaatgccgccgtccatgatcatcaggtgagccacggcggcacctcgcctcagacggtggctcaccactcgccgttctcgtctctgctgtctcttgctgctccggggccccagctcgtcttctactcgccggaaggcggcggcttcgccatgaaagaagccaccgatcatcagttcgctgtagatagcctcgatcactcgcaaggccagctctcactgagctcagctagaagcttccttcaccccggcaaccagggatgatattaggtcactgatctctactgctccaagaaggtacgtagaacaataaagcttggtgtagtagtaatcaagtactcgtttgaaggctccgtaaagcttgcaactgcagttttgagatgttattgtttggtatgatcgagtagaggggctctagcgtagagagctgctagcatgcatagtaattaaggttaattttgcaggacatgcaatgcaattcgttgcttcttttttatacaaggaagtaaccggtcatggggtgtgtggtgtgtgtgtgtgttggcaatgtaataacaattttataattcgttcttgaatttgtgcttagctagattgcgttcctttttagactttgttttcatatatactcgatcaatccataccaatatttcgagg

SEQ ID NO: 1076 - DNA, 1673 bp, Zea mays
  Clone ID: 700101206_FLI
tttctgtgtctgtgtcaacaagatgttctagcatcaacaagatcctgattagcatgtccaacttccagacaaaaagagtagagcagcaaaatggagaaccatggaaaatttgatgggtgggatgaagttctggaagaagaagatgagttagcgagtgtatgcaaatatcctattagcacatcgtacctttcttatggaacaagcagaagtatgttatctcatttccagcatctctcctcttagagagaatgttgtgagcaaaggaggactttgttttgttaaactataccaggtggacaatctaatgcgtgtcctctgtttccctactgcagggggcaaaagtgtaaagaagcctagattctctttacgaggatatgattttgttccattagatgttaagactgataacttgtgcattggggagcaagatgtttcttctgcagtgccatcaactaaagcttcacaaaccatggtggctgaacggttggaaaacgttgaggaacaaactgaagatttggcaccagagtttgcccttccacccaaagcaaatacttcagtttctgagctgctagataatttacagcgtaggggtggttcttttgtcaggacaccatctttgttgcaccaacatgctccaagcatatcaatcagggagcaggaagtttcatccggagtgccaccaactaaagcttcacaagctttgatggatgaaccgtttgaaaatgtcaatggacaaactgaagagttgccatcagagctcccctgctcgatcaagagaccaaaattttcagttgcagaacttctagaagacctacagggtagaagtggttcttatgttgagacagcatctttgtcacaccaacacaccagagctaaacattggaagtcaaagttcctttcttccgagaagaaaacaatagctattctaggagacaggagtattgacagtgaggaccccttggagcatgtaattgacggaacatctagcgaggaggaagatgctactcaaaaccacttgagtttggtgaacaaagatgagaaccagcaaactatggctgacctatttcaagaagtttttaatccaacaaacatggatggtgccatgaaatcaatgacatcaacaggagctggtaactatggaagaatgcaacagattatgcagatggaaaaatattggcatgtggaattcttgagacagtatagcagagagcacagttattcaggtgatttaaagggaactactgttcagattatgtcaaggtcattggaaggaaagctaacagtctgcagctgcatgttccaggaaaagggcaatgatgccactataagtaatgcctcagcagacggcaccatggatgaaagcagaactaggaggactattatcttcagtccaaagatatgcaacaatgtagatcttctggttggaaacataattcatatcttcccaccatggaaggaagttaaaatacaagaagagcatgtgattatttgcacctacttctcgcaccaccaccggacttgatactcggagatatttctgtgctagctgcaaagctagaggcagaccgccagcataaccgttgctgacagtttaatgttgatgtactcgcagtgtctattctgtttgttttgtaatcacaagtgtactggctgcaaagctataggcagaccgc

SEQ ID NO: 1077 - DNA, 211 bp, Zea mays
  Clone ID: 700101213_FLI
cgcgatctcgaccacatacggtagctagcctagcttcttcgtcacagctcaccacggcgcagcaaccgcagcccacgaaggcgacgaaaagctgccgaaccaccagcagaggagagcgagggaccgcgcaaccgagccactccctagtccctccttctccctctctctctctctcttcgcctccggatctcgcatgcgcggtggccaccgc

SEQ ID NO: 1078 - DNA, 698 bp, Zea mays
  Clone ID: 700101218_FLI
atcaaagacccccaaaaggtgaaaacggtcgatgagatgagggagcggctgaggatgcgtggtctccgctgccacatcatgtactgcaggaactcgacaaggcttcaggttgtccctctgctagcatcaaggtcacaggcactcaggtatctttccgtgcgctggggcgtatctgtggggaacatgtatctgatcaccggggaacatggcgacaccgatctagaggagatgctatccgggctacacaagaccgtgatcgtccgtggcgtcaccgagaagggttcggaagcactggtgaggagcccaggaagctacaagagggacgatgtcgtcccgtctgagacccccttggctgcgtacacgactggtgagctgaaggccgacgagatcatgcgggctctgaagcaagtctccaagacttccagcggcatgtgaatttgatgcttcttttacattttgtccttttcttcactgctatataaaataagttgtgaacagtaccgcgggtgtgtatatatatattgcagtgacaaataaaacaggacactgctaactatactggtgaatatacgactgtcaagattgtatgctaagtactccatttctcaatgtatcaatgtatatagaagttaacgtgcatgaggagataatgatgactcagaagttactaacgattaattcagttttagttccggtcc

SEQ ID NO: 1079 - DNA, 1567 bp, Zea mays
  Clone ID: 700101244_FLI
attttgagtgttcagaagtctccagtgatccatttgtttagtgaatcaattgctggtgctgctacaataaggggttttggtcaagagaagcggtttatgaaaaggaatctttatcttcttgactgttttgctcgccctttattttccagccttgctgctattgaatggctctgcctgcgaatggaattgctttcgactttcgtctttgctttttgcatggcaatacttgtgagctttcctcctggcacaatcgaaccaagtatggctggcctcgctgtaacatatggacttaatttaaatgctcgcatgtcaagatggatattgagcttctgtaaattagagaacaggataatctctgttgagcgcatttatcaatattgcaggcttcctagtgaagcaccattgattattgagaactgccgtccaccatcatcatggcctcagaatggaaacattgaactgattgatctcaaggtccgctacaaggacgatctaccattagttcttcatggtgtaagttgtatgtttcctggcgggaaaaagattgggattgtagggcgtactggaagcggtaaatctactcttattcaggcccttttccgcctaattgagcccactggagggaagattataattgacaacattgacatctctgcaattggccttcatgatctgcggtcacggttgagcatcattccccaagaccctacattgtttgagggtactatcagaatgaaccttgatcctcttgaggagtgcactgatcaagaaatttgggaggcactagaaaagtgtcagctaggagaggtcattcgttccaaggaagagaaacttgacagtccagtgctagaaaacggggataactggagcgtgggacagcgccaacttattgcactgggtagggcgctgctcaagcaggcaaaaattttggtactcgatgaggcgacagcatctgtcgacacagcaacagacaatcttatccaaaagatcatccgcagtgaattcaaggactgcacagtctgtaccattgctcaccgtattcccaccgttattgacagtgaccttgttctggtccttagtgatggtaaaatcgcagagttcgacacgccccagaggcttttagaggacaagtcatctatgttcatacagctagtatcggaatactccactcggtcgagctgtatatagagaggcttagcttaaaaccccgccccaaacctggcaacagaggctgggaggcaaatagcccgtatctgccatgcttgcgccatagaggtccctgcgaacaccggagggcggcgtagaagacgaggtgtacatgagtgggaggaacactgggcgttccctgacctgaataccgtggaatcggcgagggagcgcggttggtattggtaggcaccaggggaggagttggtgacactagtacattacccgaagctgatgcttcagtatgtatgtataacaacaatgcatactgcttctccctttgcagagtggagaaccaagggaataactcgtgcgtaataagaggagaaagatttgttttttggcattatttttttaaagg

SEQ ID NO: 1080 - DNA, 1576 bp, Zea mays
  Clone ID: 700101251_FLI
gtccgttccgctccttcctccccctatctagctagccttcccgttcctgcatcgcggcggagatgggcgcctccaccacgccgctcgcgtcggcggcggcgctgcttctgctgctgctcgcgccgctcgccgcggcggcggacagcatgtcgatcgtctcctacggcgagcggagcgaggaggaggcgcggcggatgtacgccgagtggatggcggcgcacggccggacctacaacgccgtcggcgaggaggagcgcaggttcgaggtgttcagggacaacctccgctacgtcgacgcccacaacgccgccgccgacgcgggcgtccactccttccgcctcgggctcaaccgcttcgccgacctcaccaacgacgagtaccgcgccacctacctcggcgtcaggagcaggccgcagagggagaggaggctcggtgacaggtacctggccggcgacaacgaggacctgccggagtccgtcgactggcgggccaagggcgccgtcgcggaggtcaaggaccagggcagctgcgggagttgctgggctttctcaacaatagcggctgtggaaggcatcaaccagattgttactggcgacatgatctccttgtctgagcaggagcttgttgactgtgacacttcatacaaccaggggtgcaatggaggtttgatggactatgcgtttgagttcatcatcaacaacggcggaatcgacaccgaggaggattacccttacaagggcacggacggacggtgtgatgtcaacaggaaaaacgccaaggttgttactatcgacagctatgaagatgtaccagcgaacagtgagaaaagtctgcagaaggcagttgcgaaccagcccatcagtgttgcaattgaggctggtggcagagcatttcagctctacaactcgggtatcttcacaggaacctgtggaacagcgttggaccatggtgtcacggccgtcggctacggcacagagaacggcaaggactactggatcgtgaagaactcttggggcagcagctggggcgagtccggctacgtcaggatggagcgcaacatcaaggcgtccagcggcaagtgtggtatcgccgttgagccgtcgtaccctctgaagaagggcgccaaccccccgaaccctgggccgaccccgccttcccccaccccgccgcccaccgtctgcgacaactactactcgtgccccgacagcaccacctgctgctgcatctatgagtacggcaagtactgcttcgcctggggctgctgcccgctcgagggcgccacctgctgcgacgaccactacagctgctgcccccatgactaccccgtctgcaacgtcaagcagggaacctgcctcatgggcaaggacagcccactgtcactgtcagtgaaggctacgaagcgcaccctggccaagccgcactgggctttccctggcaacacagctgctgacggcatgaagagcagcgcatgagaaaaacgcagcatggcattaggccgccaacagccagcatgattagagcccccctgcatgcagaatgatcacccggtcccgtagttcacgacgaaagcatggct

SEQ ID NO: 1081 - DNA, 2154 bp, Zea mays
  Clone ID: 700101255_FLI
gaaatccaatggaaacatttggccggtatattcggacgacctcgccgaaacgggtgaatttcaccgaaagtgagtcatttcggggtgaatcccaaagcccggtggagggtgaggagttacaaagtgctattacaatgcaacgcttcacttccactggttggcgcagatgtcagcgaggtcgacgaccctctgcgagtagccccactcgttgtcgtaccaggagatgaccttgaccatgtcgtcgcccatgaccatggtgagggaggcgtcgatggtggaggagacgtcggagcacctgaagtcgacggacacgagcggcacgtcgcagacctcgaggatgcccgtgagctcgttggccgcggcgtcgcggaacgcctggttcacctcctcggcgagggtcttcttggagacctgcacgacgaggtcgacgacggagacgttcggggtgggcacccggagcgcgatcccgttgagcttgcccttaaggttggggagcaccagcgagacggccttggcggcaccggtggacgtcaggaaacggacgagaggcttttctacaagcttttaattgataatgtggtggagctgcttccttttgtttacacaccaactgtaggtgaggcctgccagaagtatgggtccatctttggacgaccacagggtctgtatgtcagcctgaaggacaaggggaaggtcctagaagttctaaggaactggccacataggaacattcaagttatctgtgttactgatggtgagcgaatcttgggacttggagatttgggttgtcagggaatgggaattcctgtaggcaaacttgctctatacactgctctaggaggagttgacccatcagtttgcttgcctatcacaattgatgttggtacaaataacgagaaactgcttaatgatgagttctacattggactccggcaaaaacgtgcgactggcgaggagtatgatgagcttattgaagagttcatgtctgctgttaagcaattctatggtgagaaagtcctcattcagtttgaggactttgccaatcacaatgcctttgatttgcttgaaaaatatagcaagagccatcttgttttcaatgatgatatccagggcacagcatcagtggtccttgcaggtttgttagcagcactcaagatggttggtgggaccctggcagagcagacgtatttgttccttggtgctggggaggctggaactggtattgcagaacttattgctcttgagatttcgaaacagacgaatgctccaattgaagagtgccgcaagaaggtttggctggtggactcaaagggtttgattgttgactctcgtaaaggctcccttcagccattcaagaaaccttgggcgcatgagcacgagcccttgaaaaccttgtatgatgctgttcagtccatcaaacctacagttctgatcgggacatctggagttggaagaacattcacaaaagaaatcattgaggccatgtcttccttcaacgagaggcctatcatcttttcattgtcaaacccaacctcgcattctgaatgcactgctgaacaagcatatacctggagtcagggccgttcgatctttgccagtggcagtccatttgcccccgtggagtacgaaggaaagacttttgtgcctgggcagtcgaacaatgcctacattttccctggactcggcctcggtcttgtgatctctggggccgtccgtgtccacgaggacatgcttctcgccgcctcgaaagcgctagctgatcaggccacacaggacaacttcgagaagggctccatcttcccacccttcaccagcatcagaaagatctctgcgcacatcgctgcagccgtggctgcaaaagcctacgagctcggtctggcgacccgtctgcctccccccagcgacctggtgaaatatgcagagaactgcatgtacactcccgtctaccgcaactaccggtagtgctgcggggatcaattttgcagtaataaaaaatctactatcaacgcggatggtactctgttgtttatagtccctgctgctaaccacccttgttgctggtgctgctggagaggcattgtacctgtccatgcatatatgatatatatgttgtaacgttgtgaaagcaaacaatcttgggtaccaatgtttgtt

SEQ ID NO: 1082 - DNA, 1449 bp, Zea mays
  Clone ID: 700101269_FLI
cgctcacctacatctccgtccgcaagcgtcagccaggctgccccgggaggccgggaggaagcagatcggagaaggtgatctgttgtaatggctcgattgtacatcggcaacctggatccccgggtgaccgctcgggagctggaggacgagttccgcacgttcggggttcttcgcagtgtctgggttgctcggaaaccacctggctttgcgtttattgattttgatgataagagggacgcagaggatgcaatccgtgacctagatggcaagaatggatggagagttgagttatctcgtaatgccagcggtggtcgtggaggtcgtgaccggcatggtgggtctgagtccaagtgttacgagtgtggtgagactggccactttgctcgtgagtgccgtttgaggattggttctggaggtctaggcagcggaaggcgccgaagccgtagccgtagccgcagtcgcagtcccagatatcgccggagtccaagttacggtagaaggagttacagtcctgcagcacgctctccaaggcgtcgtagcgtctcaccagctcgtggacgcagctatagcaggtcaccacagcacaagggtgcacgtgaagaatctccctatgataatggataccgccgcagcaggagctagagccagatcgttgtatccgacgacgagcgttatgtgacagatattgggaaagctatggtcaataacctgcttgacagatccttcgtcgactgcttgactttggttaaggcatcgtcctgcactgcttaaacgactcggccgactacggctttcagttctgtcttcatggttttgttctgcgctctacattcttcgcacaccctcgcatgcttcattcagtctgccgtgtgttaatctgcctgcgtatcttctcgaagatgctgcgcatcgcaaaagcagtaatgaccttccttctcataccatttggtaaggtttgatttgctgacaaatgcagcatctggtaagtttctccccgtaggtttggtctccgtgctgcgtgcgctgctcctggttcaggaactgcagtatgttagatggatgaggatgactgaatgactcacctactcacgttatcatgccttcagaggacccaagttagtgagcgccaggaagtgaattgaccaggccaaatgctacgttgagccgactttggctttgctctgcgatctccacttgccaacatgtgttgccttcgacgaagtcttcttcgccttccgcttccttctctgcagcatcctgattgatattcttcattcttcgagtgacatgcagtcaccctaattgatcgtcatagagcctgcgttgaagtcgaatcccccctaatggacaatgtagttaaattgttattagcttgtttcttgttggatagactaatgtcagatgctgtttggtataaaatggtaaccatctggttgatgattggcggcg

SEQ ID NO: 1083 - DNA, 806 bp, Zea mays
  Clone ID: 700101313_FLI
gccgctcgggtcgccgcgcccgatgcgccggccagcttccacgtcgagtttcgacagagtggggctaggacaccacagtgcactatgcttggtgccttaactaagcctagtgatgaatctgtgttgaagaagctttctactaggtggcaaaagaaatttggggaagagattgatcaagatcttttgtatttaatatctgttgaccggatcttgcacatggaagatttcaatgaggatggcatgtgggtagttccatcagactacaccagtgcagaacctgatcctctacgcaattttgctgaaaacatcgtggaggaatttaacaacaaaaatgctgaagacgtccgtaggatatacaacatatatgtcgaatcagatttacaggtggcagacgtgaagatgatatgggttgacaggctaggtttcgatctccacgctcattctgcggaaggcgttttggctgttcgggtcccttttcctagggaggtctccgacgagaagggggtgaaatcgtcgttcaacatgatgtctcatcatgcgtgggaggtggagaagagctacgcgagcccagagtttgagaaggtgcagttcttgaagaaggtcagatagcattgcgaattctgtttccgtggtggacgatctttcgttattgagaggagtgatagtttgaagttttgtttcctttatcatgaactgtttgtcttgtatattggtcatatttttttgtgcctaatacattggatgcaattggcatcttgaattatctgctagtaatttatttgagaagggcaatgagttttgaccgt

SEQ ID NO: 1084 - DNA, 632 bp, Zea mays
  Clone ID: 700101356_FLI
agaaccgaaaaaaaaaactctgcggagattgaccgaccaccaccaccgcctgcgttcccgcgccgccaccgccatggctgccgctgccccccatgcatactcctccctcgtgcctgtttcggctgcgcggcctctctccggaagcacagtttctttcggtgcttcgtgccacaagtggaggaaggttccggcatggcgactccactgtgttgctgaagacgaagaggaagtcaaagattttggagtcaatatggcactatccatgctaaaattttacaaacgagaaatatcacctttactaccttcaagctgccgatatgtaccaacttgcagtgagtactctatgcaggcgtacaaacgatatggtgttgtaaagggttccatcttgactgcttggcgcctttgccgttgtaatcctcttggtggatatgggtatgatcctccaaaatggtttggcgaggaagatgtacctctgcaatagtaatgcctagtaattgaaagtacaggcattgtaattcttcagatccagacttgcagcagtttttatgtaatttactgaaactaaacccagaaacacaaggataaaattctgcaatatctatgcacctctgaaggagcatgtattttttttg

SEQ ID NO: 1085 - DNA, 1079 bp, Zea mays
  Clone ID: 700101367_FLI
ggaaagggctttgcaggaagatataccacaaactccagatgattttgagaagttagttaggagctccccaaatagtagttttatctggataaagtatatggcaactttgttagatcttgcagatgttgagaaagcacgtgcagtagctgagagggctttaaaaacaataatccccagagaagaagaagagaaactaaatgtttgggtagcatatttcaatctggaaaatgaatacggtagtccaagggaggatgctgtgaaaaaggtattccaaagagccttgcaatattgtgatcccaaaaagctgcacttggctcttcttgcgatgtacgagaggaccgaacagtatgagcttgcagatgaacttctagacagaatgaccaaaaggttcaaaacttcctgcaagatatggttatgccgcattcagtttgctctcaagcaaggcaaggatgttgagtacatcaaagccattgtaaaccgtgcacttctaagtttgccacacagaaagcgcataaaattcctctcacaaactgctattctagaattcaaatgtggggtgcctgaagaaggaagatccagatttgaactaatattgcgggagtacccaaaaagaacagacctttggagtgtttatctagaccaagaaatccgccttggtgacgtagaagttatacgggcattgtttgagagggtgacttgtctgaccctacctccaaaaaagatgcagttcttgttcaagaagtatcttaatttcgagaagtcactgggtaaagacaacgaaagaattcagcttgtgcaacagaaggcaatcgaatatgttcagagttcactgccgtcacaagacaactcttgaactacatggagacttaataagcccacaaacaatcattaggaaataccagtcgtactgtagatgtgatctctttgatgactccttgaacattattgtgaaaaggtcaatgtaaaatgtgggctgttcaaaattttgtttgaaacctttatataagttatgagtctagtatgtcatgtttcacccaattttttggaaggaactattctaagccggatctggttcgaat

SEQ ID NO: 1086 - DNA, 1024 bp, Zea mays
  Clone ID: 700101412_FLI
ttttgagttggttaactaccagctgaagcaaataagaactgcacttgcggttgcgtccttgttaaagcggacactggtaatgcctccattatggtgcaggcttgatagaatgtggtttggacatcctggaattttagagggaacaatgaccagacaaccttttctctgcccactggatcatgtgtttgaggttcatgttatgctgaaggacttgcccaaggaagaatttggtcaacatattgatttcagagaatactcctttcttgagaatccatcattacctaaagaggtgaaagattcgttactcgaggttgaactttgtgacgagcatagctccagatgctctgcaattgatgaaatcgataagcatggaccctttcttttaccaagaaatagtactgaagaaaagctgttggatttgttgtcatcatataaggatgtcaaaatcatacaattctcatctatggttgatgccttcggtggttttgctgatgcagctgtggagaagaagttccgaaatcgtgtgaacaggtatgtgggcctatggtgctgtgtggagttccgtgaaattggtcacatatattatgacatgtactgggacgagaaaccagggtggaagccacaccctccagagactagggaacaggaccatccaccttggtcatgactactgacaagaagatgctagaaagatcgtaatgatgaagatctgagatcttccagagcaccctgctccaatcgattcttcaggccaattttgtgctgttctagttctgttctaacatgggtcgctgttgttcacttgtggccccttgttcgcagctcatcggtcgaagcatggggctcaatgatttagttggggcaacatttagatcacgacttagttccattttccatagtttttgcatcatgttcatagttgatacaggcatcagctccaaaggagaaaaggccattattgttaaatgttgtggaaaacttggctgccagctgctgcaataggaagctgtcgtaactgttgtgc

SEQ ID NO: 1087 - DNA, 1409 bp, Zea mays
  Clone ID: 700101417_FLI
ggggcaaaccaaggagcttctcagcctaggccagagcaagaaagcatcctgctgcaggcacagcagcaggtgcaaatgcagaaactcgtataccaagtcggaggtgccctgccgacaaaagttgtctgcctgacacaggtagtgacagcagatgaactgagagatgatgaggaatacaatgacattgtggaggacatgagggaagaaggacgcaaatatggtaaaccgcacgaggcccatcgagttctcttataccttctttgttttaaaagctcttacattcagctgttatgattatgattgcctaccctcagttactgaattggtttccttttgtgtttttgtcttttgtgtgtcttttttgtagtcccacataatgccattgcagagtgttttatagtccgaccctatgcaatattggcaatcgggctttaacccacagaagacactattcttttgagtttgattaatcattatatcattagcctcttgcctatatatctactcactaacacttggacaggtaacttggtgaaagttgtaattccacgacctgaccccagcgatgccccagttgctggtgttggaaaggtgtttttggaatatgcagatgtcgagggctcgaccaaagcaaagacggggatgcatgggcggaaatttggcgggaaccaggtggtggccgtgttctatcccgaggacaagttcgctgctgagcagtatgactgaaagttgtagaacctgttctagagttgcaacacacaatgtgtttttttaaaatctttgagggtaccggtttctcttgaatttgaatcttatccagttataagtttggtgcaggaccagtcgataagcgataagtttgtgcaggactattaggctttgtttgggtactttagtattgatcccaatccaaatccatatatgttaaggccttgttcggttattctcattccatattgattggagtgtatcggaatggattttaacatgctatggatttaaacaaactcaatatcatccaatccacatggattgatgaagaaatgaataagccctaaggtggattgaggtcaatagtagaatacccaaactaggccttagttggaggatttgtacttgctactagggcagctaagatgaattcattcgctgtttgttctgggtccattgtttgctcaaattaacaggtgttgttatggtgctagagatggaaagacgtatggctcctagtttagaatgtgctgctgctgctgaggtaatatggaatatccgtatgatagcttgagtatgctggtttgggtttgtcaaacttggaaagtgtctacattcctcctgagtgtggcttcgtgcccagtaaatgatgtgatctcttatgacgattttgcagtgtgcaatgtcgtcattattat

SEQ ID NO: 1088 - DNA, 1855 bp, Zea mays
  Clone ID: 700101424_FLI
cgcgttcgttgtactcttaatagagtagtaaagatgaacaacccaacttggttttatacctgtttctgataaaaaagatatttctttcttttggctagctcattattttgcatactttctatcacatgaagaagaattatgactatatgtgcgtaatttaagttctaccacagttgtttgtaactagagattaaaaatttctatgtagcaccttatgacagtttttttcttcttccttgcagtcgggaattaagtgagacaatgtagaaggtgaaagaggcgagcatggcacaaaagtgtgaacaagcgacagtgatttgttgaacgaatgacaatcttttgaagacgcccactgccaattctctgcctttgtcatgtgtgagaaaccttaatcggtactcaaactttggcatgaatctaagctactagcccaactaaatacactgataaataattatgtagtgaatttatttagcatgtgtagtgagggtaatctggatttttacactttgcaattgctatgtttcaatgtttgaactttggtgtacaatatcccgcctctgccccaaagaggatgttatccaggattcatcttgtttgggttccttttgacatcaaaataagttggtggataaggtgctgtttacaataaaaaaaatcccaacatattactctaacaagcaaaatggtacattagttgccttttttgtttgttttcttttctaccgcttgaatttttcaggtgactggaatttctggcacaaatgctctaattattctaggtacaagagcacaatggttgttgtagcatatgaaccctgccgtggttattcatgctaaatgtgaataacagaattcttgctttgtttgtggcctttgatctgcaagagggtctagcactgctaatctcctctatccaggctctgctagaactggtggaaggtgattatacgtgcgaaatgtccctactgttgctgtttacactaaaaaattgctttcctgataatttatcatgattcggacatcaatattgcagcagtttgtacgggctaaccaagaagatgtggctgaggataacgctatgcttcttcctaggtcctatggtgattgtcatgtacccagatagtcattggtaatcggagctccgaccgagggactgcaaccgtgctctgtgaccatgtccaggccgaggggttcagctcgggagccttctctgacctcgtcatgagggttcaattcgatttgcatgtcattgcaccaaacaagtttatgcttcgtctgcagccacctgacttcaagacaaggaaggtgatgagttgcataggaactccgatgtgctagaaatcttcatgaataccaggtttctaatggtctatgtgcagtatgagcgttcactagaaacaatcataggacacaatcaaatcatctggctcgggggcctaaattaccgaatcatgctttcccatcagttagtgaaggcccttgtcgagatgcgcaattctagagaaagattaggtgagagcttggtaaccctcaggtttcttttggttacccagtagtccagctaccaacacttgaaacaagctcttcagatgagaagcagcagaagcaacttttctttagaatctacttggtttctaaggattgtcagcatcataagttttccgccacatcctttcttataggtgattgtttgatccccaacctagactcaaagaaactttactgttagttgcagaattgatgctcagttcctttaaaaatgtctcttatagatggaatcggaacacacttgtgcagattagtatcacgatgtaattatttttatttataataatgagtattatttattcct

SEQ ID NO: 1089 - DNA, 838 bp, Zea mays
  Clone ID: 700101522_FLI
gaaagacgcagcaatatcaccgcgatcacgaaaacactggacagattgtacaatctggattggtatagcagtgctgctaagaacgaatgtacggctgccgtggggctgaaatggatgctcaatcagggtctaatgaagcaccatcaagagatagttgaatacttcaaccgaaggggtgtttccgcaatttttctactaagaagaaatcttcttcggcgttacgtctctatattagcaaatgctcatgatagtgccatgaaacagttgaatggaactcataaagctcatgtgcactccaaacatgaggctgaaatccttgctcaatataagccaaccattgacaaaaaaacattgattactgaactaaaacggtctgataagttggcagctgatgctctggtgaatttcaagaacaccaggcacgttgtcctgtactacgaggatgttgtcagcaatcgcacgatgctcatggatgttctggattttctcagattgccaaagaggaagctgttcagtcgacatgtgaaaatccacacaaaacgattgtgcgatcatatagataactgggcagatgttactgattttttgaagggcacaccgttcgagagttttttgaatggctcaagaagatgacatggctagctgatgtatatagtgctatagtgagttgtccttctggcgcctcgtaggtttttttttttgataccatgatgaaataagtatgggccactgagagaagtagttaggtagagatgcttgatccaggctattagtctcatagatatggacttcagagctgtagaataaagattaaaaacaatacatttgtgattatcag

SEQ ID NO: 1090 - DNA, 626 bp, Zea mays
  Clone ID: 700101530_FLI
cgacacgcatcgactcccgccgccgccgcttccgctccgtcgctcgcctcacgcctccggcgccacctccaccatggccccgaagaaggagaaggccccgccgccatcgtccaagccggccaagtccggaggcgggaagcagaagaagaagaagtggagcaagggtaagcagaaggagaaggtcaacaacgctgtgctcttcgaccaggccacctacgataagctgctctccgaggtgcccaagtacaagcagatcaccccatccatcctatctgagcgcctcagggttaatggatccttggcacggagggccatcaaggatctgatggcaaaggggctcataaggatggtctctgttcattctagccagcagatatacaccagggcaaccaacacatgatgggtgttttgcgtcttgtggacgttatctagtctagacgacttgatgttgctattatatcaagtttaatttaatcgtggctcgatcaatcttactgtcgtgttgaatgtcgaatatttttgagattattgtactattttaatatcatgttttttataacatttaagaccatgttgccatccaaattttaatcttggtgaggaatatcaaccaatctctgctctgc

SEQ ID NO: 1091 - DNA, 1101 bp, Zea mays
  Clone ID: 700101532_FLI
cgtccgtgatgacgagggacgagacgtcggtggcgatgccgacgtcgttcatgaccgggtctgtggtcggtaagcgcttctaccgcgacgccaccgtacggcgcgccgacgatggcaatgggtggaccgtgatgctggactaccgcacgctcaagtcgccggccaagcgggtcctcaagctgccctcgcgcgccctcgccatggccatcgccgccgagtgggagtaccaggaatcagatggaattcgacctttcacaatgcctcttatgaagcttgcttgcactgcattggagagagttcctttgacacgcagaaaagtgattgacaatttgatgaagaaatttcatcaagatttggtattttgccgctcacctgctgatagtgaactgaccattggagttcatcaaaagcagaaggagaaaatcgatccgattctggagtgggtagacactgaatttgggttcaaacccgttgtctacacaagcttctttggggggaagcaagacgagggccttgctaaagctgtagaaactgttctgaagaaagcaactgactgtgagttggcatccattgatgctatggctgcagcagcccattccttggtgatccctcttgcaatatttagagaaaggttgggtattgaggaggccattgagttgatcaggcttgaagaagaccaccaggttgatcgatggggcttggtggaaggaggtcatgacgttgatatcgcggatcttaaagtgcagatgtcctcggctgttgtatttcttggactttcacggggactgtgaatgtttcttacctatatggctagttgtttatttccaagcttgtatgaatctgagaccaagagttgtagagaataattgccgcggaaggtcgatagcaaaccaagtatctgtactgtattcagcaatcagcagttctgatgttcgattttggattgagtccagaaaatgctgttgaggtttgaactagggagcccagcattcctctggctttgtactgttgtgagagtaagaacatatctaggaactagtattgcagtggcagtcactgagtcgatatatctacttctgcacctttcagctccagcagcac

SEQ ID NO: 1092 - DNA, 1584 bp, Zea mays
  Clone ID: 700101540_FLI
cccccgcggagaggagaggaagaagaagaacccagccaaatcctcagtcttcaggctgctcacagctcgtgccgtccactctcccccgaggcagtctcttgcgttcgctgctcgacatggcgctccaggcggcgacgtcctttctcccctcggccctctccgcgcgcaaggaggggtcggtgaaggactcggcgtcgttcttgggtgttcgtctcgcggcggatggcctcaagctggacaccaccgctctgggcctacgcaccgtgagggtgagcaggtcggcggacatccgcgcgcagacggcagcggtgtcctccccgtcagtgacccccgcgtcgccgtctggcaagaagaccctccgcaagggcacggcggtcatcaccggcgcgtcgtccggcctcggcctcgccacggcgaaggccctcgcggagacaggcaagtggcacgtcatcatggcctgccgcgacttcctcaaggcgtcgcgcgcggccaaggcggccggcatggacaaggacagcttcaccgtcgtgcacctggacctcgcctccctggacagcgtccgccagttcgtcaggaacgtgcgccagctggagatgcccatcgacgtggtggtctgcaacgccgccgtgtaccagcccaccgccaaggagccgtcctacaccgccgacggcttcgagatgagcgtcggcgtcaaccacctcggccatttcctcctcgcccgcgagctcctcagcgacctccagtcctccgactacccctctaagcgcctcatcatcgtcggctccatcaccgggaacacgaacacgctggcggggaacgtgcccccgaaggcgaacctgggcgacctgcgcggcctcgccggcggcctcaacggcgttggcagctcggtgatgatcgacggcggggagttcgacggcgccaaggcatacaaggacagcaaggtgtgcaacatgctgacgatgcaggagttccaccgccggtaccacgaggagacgggcgtgaccttcgcgtcgctctacccgggctgcatcgccaccacgggcctgttccgcgagcacatcccgctgttccgcctgctcttcccgccgttccagaagtacatcaccaaggggtacgtctccgaggaggaggccgggaagcggctggcgcaggtggtgagcgaccccagcctgaccaagtccggcgtgtactggagctggaacaagaactccgcgtccttcgagaaccagctctctgaggaggccagcgacgccgacaaggccaagaagctctgggagatcagcgagaagctcgtcggcttggcgtgatgcccaccgtggccggcgccggcagccggcgacagtttttcctacctaggacatgctcattagttggtctcactctcagtcgagtagtcgacgtgtggtgcgcccgtgtcagagtgccaagccaagacagaaagtgagtacaaacgtgtaaaatatgtgctactgcgacgtgatggtttgggcagtggactgtatgtatctctactctctaggcttctgctttgctttgcatatttaattttctgctaataagaggacagcaaatgcctttcgagct

SEQ ID NO: 1093 - DNA, 1471 bp, Zea mays
  Clone ID: 700101558_FLI
gtttggttgagagttccggccatgagcgagaagagattcatgcatggcgcaaatttcatgtgtgttttgcagacaaggatcgtgaagtaattaatataatgacaaagtcgtcaggggcgctagatcttgctcggagcaccggagggtcgcttagcaaggaccaagtcaaatccgccgttgatcagtatgtgaagtaccacgacctccacggaggcgaacaagaatcaaggaagtcaaattacgctgatttggcaaacaagtactatgatcttgtcactggcttctacgaatatggatggggcgactcattccattttgctggcggatatccgggtgaaacttcccgtgaagccattaagcggcaccagcattttatggcactacaattggggctcaagaagggtatgaaggttctggacgtgggatgtggaattgggggacctttaatagaaattgccagattcagctcaacttcaataactggattgaccaacaatgactaccatgtctcaaggggcaaggtttgcattttagccttctttttggaatacaaaaactgtatagcatatggatatgcaccatttaatttttggttgcaggagcacatcttttcagcaggtttgagtgagcaatgctgctccttgaagggggacttcatgaatatgccaatagctgataacacctttgatgcggcctatgcaatacaggctacatgttatgcaccggaggcacaaggtgtctatagtgaggtctaccgtgtgctgaaacctgggcagtattttgcactagatgaatggtgcttgaccgaccgatttgatcccaaaaacactaagcatttgaccaccaaggctgagattgagcttggcgatggcctgcctgacatccgtaccactcgccagtgtgtccaagctatgaaagatgcaggattcgaggtcgtttttgcaaaggatcttgctcaagattttccttgcccatggtaccagacgatggatcctaactacttttcatggactaacttccaatgcacacgcccaggacggatcatcacccgtgcaattgtcaatacacttgagttcctccgtattgccccagcaggcagcgtgggagcctacaacgtcctgacgagtgcctctgatggccttctaaaaggtggtcgggaaggtatcttcacagcgtccttcttcgtcctgggccgcaagcctctcaaggaaactgaaatagtgaacggcggcaacctttgagctgcaacatgagtatgggactatggggtcgtacttataagagctatgaatcatggccaacgtgttacgtgctgaggtgtgcttaccggtttgtcttatggctcttgcgtgtgtgctgggtcatgttcccgcagtagcatactagcatgtatctgcttcttgtgtgttgtactatgaactatctgaataaatgctgtttacgcgttgtattaatcgcaccatttcttggc

SEQ ID NO: 1094 - DNA, 1158 bp, Zea mays
  Clone ID: 700101582_FLI
cgtccatcgccgtcgccggggcttcctacaacttcaaaatggcggctaccgccaccgccatggctatagcaactatctcccccgccgctccgattccatccgcgcccttcccatcccttcccctccccctcggcctccgcctccgctctcaacccctcctcttcgctgcttcccgccgccgcttcctccatgttcccaaagccgcctcctgggacgaatccgtccccgaggatggtggagatgcggaggaatccgttgccgctggggacgacgaggacgaggacgagaagccgcggcccgagccggtgtcctcctccgagttccagttcgcggcgccacccgagggctacgtcgagcccgcggcgtttgacgagctaccgccggagtccccagaagacgtggcggcggcgtacgaatctctctacgggccggccttcagcggcgagacattgctggggaacaatgtctttgaggtcaaggtggtcgaccccatcgacatggaccgggagcagcgcccgaacgacgatttcaccgagcgcgtcgtgcaggtcaaccgcgtcaccaaggtcgtcaagggagggaggcagctctcctaccgcgcaatcgtcgtcgttggcgacatgaagggccacgttggtgtcggcgtgggaaaggccaaggaggtcacggaggccatcaccaaggccgccatgaacggccggcgcaaccttgtcacagtgccgctaactaagtactccacattcccgcacagagctgatgcggactatggagcagccaaggtgatgctgaggcctgcttgccctggatctggtgtcattgctggtggagccgtgagggttgtgctggagatggctggtgttgaaaatgctctgggcaagcagctgcgcagcaagaaccccctgaacaacgctcgagccactatcaaggcgacgcagatgatgaagcagttcaaggatgtcgctgaggagcgtggtattccaatggaggagctgtggaaatgataaaaacaattcgaaaccaagaccccccccccctttgtagcattctttctcctgtcgctgtaattttcttaaggtcttcatttttctgctgtatctatgggatgaatcccgcctcacggtttcttttttgcatctctcttctgagattctgtgtgtg

SEQ ID NO: 1095 - DNA, 1175 bp, Zea mays
  Clone ID: 700101589_FLI
cattaccacgcctcctcacaggcacacctcacacgagcagcagcggacgataagagatgtgctgaagctgaacggtggccatgtccaccggacgcacagaggaggccgccgggagcgcggagacggcgtgcgtgacgggcgccggcgggtacatcgcctcgtggctcgtcaagctcctcctctcccgtggctacaccgtccacggcaccgtccgcgacctcagtgacaataaaaccgctcatctgaagcggttagagaatgcttccgaaaacctcaagcttttcaaggctgatgtccttgactacgacgctatggcgggtgcagtcgcagggtgccagggagtctttcatgtcgccactcctgtgccttcagggaagatcaccgatccagagcgagagatgctgggtcctgctgttaccggcaccataaacgcactcaaggctgcgtctgctgcaaatgctcgtcgagtggtcgtcgtttcatccatggttgccgttgagatcaacccgaaagactggcccagagacaagatcaaagatgagaactgctggtcagataaagagttctgcaggaacgaagagaactggtattctgtcgccaagatctcgtcagaagaggccgcacttgaatacgcgaagcagaccgggctggatgttgtgacggtcaatccagctgtggtctttggccctcttctgcagccgacgctcaacacgagctgccagttcctcgtctacttcctgaaaggaggacctgatcgaatgagggacaagctttggcacatcgtcgacgtcagggacactgccgatgctctcctgcttgtgtacgagacaccacaagcctccggcaggcacatctgcgctcctcatttcatcagcgcgcgtgacctgctggagctgctgaagacgatgtaccctgatgattaccctttcattagcaaggagagcatctacgacatggagcacccagctccaatgacgtccgacaagctcaagaaactgggatggaaggtcaggccgctgaaggaaacaattgcggaaaccgttgagttctgccagcatgctgggtttctcgaggacgtggagggattccgttttcctcccctgtacaacataatctagtttacaataacgtcagtagtgtaagagcaactccaacggaatccgtaaaatttacac

SEQ ID NO: 1096 - DNA, 1552 bp, Zea mays
  Clone ID: 700101596_FLI
cgcatccccgccggcgcccggctgcacagcagggcggcggcgtcgtccaggcacggcgtgcagaggctggacttcgccgacttctccgggctcaggccggggtcgtgctccgtgagcgctgccgcgcgggaggcgtccttctccgacgtccttggcgcgcagctcgtcgccaaggccaccggggagaacgccgtgagggcgcccgccgaggcgaagctgaaggtggcgatcaacggcttcggccgcatcggccggaacttcctccggtgctggcacggccgcgaggactcgccgatcgacgtcgtcgtcgtgaacgacagcggaggcgtcaggaacgcgtcccacctcctcaagtacgactcgatgctcggcaccttcaaggccgacgtcaagatcgtggacgacacgaccatcagcgtcgacggcaagcccatcacggtcgtctccagcagggacccgctcaagctcccatggggtgagctcggcattgacatcgtcatcgagggcaccggagtcttcgtcgacggccccggcgccggcaagcacatccaggccggcgcgaagaaggtgatcatcacggctcccgccaagggcgccgacatcccgacctatgtcgtcggcgtcaacgagggcgactacgaccacagcgtcgccgacatcatcagcaacgcgtcctgcacgaccaactgcctcgcgccattcgtcaagatcttggacgaggagttcggaatcgtgaaggggaccatgacgacgacgcactcgtacaccggcgaccagaggctgctggacgcgtcccaccgcgacctccggcgggcccgcgcggcggcgctgaacatcgtgccgacgagcacgggcgccgccaaggccgtggcgctggtgctgccgcagctcaaggggaagctgaacggcatcgcgctgcgggtgccgaccccgaacgtgtccgtggtggacctggtgatcaacaccgtgaagactggcatcacggccgacgacgtgaacgcggcgttccgcaaggccgccgccggcccgctgcagggcatcctggatgtctgcgacgtgccgctcgtgtccgtcgacttcaggtgctccgacgtgtcctgcaccatcgacgcgtcgctcagcatggtcatgggcgacgacatggtcaaggtcgtcgcctggtacgacaacgagtgggggtacagccaacgcgtggttgatctggcgcacctggtggcggccaagtggcccggcgccgcggcggccggcagcggcgaccctctggaggacttctgcaaggacaaccccgagaccgacgagtgcaaggtgtacgaagcatgaggccagggttctttccacgacgaaacgtacagcacgggcgcgagggttctttccatagagaataatatacagattattcgcccaaagagacgtatgttatatatatgagttgtatgcagtcaccgaactggtacaggcttccgctttccatttcctgttgggagtcgtgtagtgtaatcctggggtgtgtatttgtttcatcaatcatgccagccgatttgaatctcgtttc

SEQ ID NO: 1097 - DNA, 1204 bp, Zea mays
  Clone ID: 700101622_FLI
cttaattaattattaagggagagccatctcgaaacatgcatatatagaaattatttttcctcagatctcgccgtcaagcatacatgcattcggacgagaggcttttctacaagcttttaattgataatgtggtggagctgcttccttttgtttacacaccaactgtaggtgaggcctgccagaagtatgggtccatctttggacgaccacagggtctgtatgtcagcctgaaggacaaggggaaggtcctagaagttctaaggaactggccacataggaacattcaagttatctgtgttactgatggtgagcgaatcttgggacttggagacttgggttgtcagggaatgggaattcctgtaggcaaacttgctctatacactgctcttggaggagttgacccatcagtttgcttgcctatcacaattgatgttggtacaaataacgagaaactgcttaatgatgagttctacattggactccggcaaaaacgtgcgactggcgaggagtatgatgagcttattgaagagttcatgtctgctgttaagcaattctatggtgagaaagtcctcattcagtttgaggactttgccaatcataatgcctttgatttgcttgaaaaatatagcaagagccatcttgttttcaatgatgatatccagggcacagcatcagtggtccttgcaggtttgttagcagcactcaagatggttggtgggaccctggcagagcagacttatttgttccttggtgctggggaggctggaactggtattgcagaacttattgctcttgagatttcgaaacagacgaatgctccaattgaagagtgccgcaagaaggtttggctggtggactcaaagggtttgattgttgactctcgtaaaggctcccttcagccattcaagaaaccttgggcgcatgagcacgagcccttgaaaaccttgtatgatgctgttcagtccatcaaacctacagttctgatcgggacatctggagttggaagaacattcacaaaagaaatcattgaggccatgtcttccttcaacgagaggcctatcatcttttcactgtcaaacccaacctcgcattctgaatgcactgctgaacatgcatatatgatatatatgttgtaacgttgtgaaagcaaacaatcttgggtaccaatgtttgttattctttcgctccattatgatggtctgtt

SEQ ID NO: 1098 - DNA, 1271 bp, Zea mays
  Clone ID: 700101688_FLI
gcgtagtgtcatcttatctcttcctcctaccttcactctcaaaatcttcagggagccgtagaggagcagcaggtgcaccaaaaggatggcagcgccaggctccctgcgacttctccaggccccgtccttcggtgcggccaagtgccagccgatggcgggccgggcatcggcgcggcgagcgccacggccactgttcgccgtgcgcgcttcggctgctgacgccgccaacagggacgccgtgcttaaggccttccgcgagaacagggctctcaagataatttccgggcttcagaactttgacaggagcagtgttgcatctgttgtcacagctgcagataagggaggtgcaacccatgttgacatagcatgtgacaaggacttagtaaagcttgccatggatcttaccaaccttccgatctgtgtctcatctgtagatccttcagcgttccattctgcagtacaagcaggagctaaaatggttgagattggaaactatgattccttttatgagatgggcattgagttttcctctgagcagatactgaagctaacaagggaaacaaggaagatgcttccagacatcaccttatcagtaacagttcctcacacacttagtttgccagatcagatgagactagcagagctactcgaagaggaaggagctgatataatccaaactgagggtgggaaatgttctagcccgacaaaacctggagtgcttggattgattgaaaaggcaacaccaacactcgccgcagcatactccatctctcgggctgttagtattccagtgatgtgctcgtcagggttaagctcggtgactgcaccaatggcagtaactgcaggagctgctggagttggagtcggttctgctattaacaaactcaacgacgttgtggcaatgatcgctgaggtgagaagcattgcgcaagcaatggagcttgcgccaagaatcgtgtccgaaaccctgagaacaattagttactagtggctaggaatacccttgccatttctgagcaaacttgagcagtcaataagaaagcaaaagagaggcatcgactctgcattttattctctctacgctgtcttttgcctgtggcagtgaatagcgcattagcatcatagaagtattagcttgatcaatggaagttgttcatgcgcttcttcatcgctgcaagtgttgtcatcttgtcgaactcacaataagcttagataagtgctgggtttgtgggaacatcgtttgtgcaatataaatgagatcttgcacctac

SEQ ID NO: 1099 - DNA, 1951 bp, Zea mays
  Clone ID: 700101735_FLI
attacggtgatgactgggaaggtctttttgaagctattactggttatggccttggtggttcttctatggctcttttcggccgcgttggtggtggtatttataccaaggctgctgatgttggtgctgaccttgtggggaaggtagaaagaaacattcctgaggacgatccaagaaacccagctgttattgctgacaatgttggtgataatgttggagatattgctggaatgggatcagatccctttggctcatatgctgaatcatcatgtgctgctcttgttgtggcctctatctcgtcttttggaatcaaccatgaatttactccgatggtgtaccctcttctcgtcagttctgttggtattatagcatgtctcataacaacgctgtttgcaactgatttcttcgagataaaggctgtggatgaaatagagcctgctctcaagaaacagctcataatttccacaattgtgatgaccattggcattgcactaatcagttggcttggtcttccatacactttcactattttcaactttggagtccagaagacagtgcaaagctggcaattgttcttgtgtgtggcggttggtctctgggctggcctagtcattggttttgttactgagtactacacaagcaatgcctacagccctgtacaagatgttgctaattcctgcagaactggagcagctactaatgtcatttttgggcttgctttgggttacaaatcagtcattatcccaatttttgctattgcgtttagtatcttcctcagcttcagccttgctgccatgtatggtgttgctgtggctgctcttggaatgctgagcaccattgccacaggtcttgctattgatgcatatggccctatcagtgataatgctggaggaatagctgaaatggctgggatgagccataggattcgtgagagaactgatgctctagatgctgcaggaaataccacggctgcaattgggaagggttttgccattggctctgcagccttggtttcccttgcactatttggtgcgtttgtaagccgggctgctatctccactgttgatgttctgactcctaaagtattcatcgggcttattgtcggtgctatgctcccgtactggttctcggcaatgaccatgaagagtgtgggcagtgctgcgctcaagatggtggaggaagttcgtcggcagttcaacaacatccctgggctcatggaaggcaccacaaagcctgactacgcaacttgtgtcaagatctcaacggatgcatccatcaaggagatgatccccccaggtgctcttgttatgctcacaccactgatcgttgggattctatttggggttgagaccctctctggagtccttgctggtgcccttgtctctggtgttcagattgccatttctgcatccaacactggtggtgcctgggacaacgccaagaagtacattgaggctggagtttcagagcatgccaggacccttggcccaaaaggttctgaccctcacaaggcggctgtcattggtgacaccattggagatcctctcaaggacacgtctggcccttccctcaacatcctcatcaagcttatggcggttgaatcccttgtcttcgcccccttcttcgctgcccatggtggcattctcttcaaatggctctaagccagcgagagacgcaggataaaggccgtagttttgcaaggcgagtagagcagtatgtcagtaatacagcatctatggcatgtgcttttgctcgtccagttcatgagccccgttgtgtatttggtttccgttttcttggttggagtttttagttccaaggtccgatcatgttttgatcccataaattctcttccagccttcgagcaactgagtccatcttcctaagtcatcagccccagcgagacattgaagcatggggaaacttaaacagtatggtgatgattaatctcagc

SEQ ID NO: 1100 - DNA, 478 bp, Zea mays
  Clone ID: 700101742_FLI
atgccggtgatcgagttccaccaggacgaggtgtgggagctgccccccggcgccgaggcgctggcgcggtcggacaagacccgcgtcgagatgttccgcctcggcgcccgcgccatgggcgtccagggccacccggagtacagcaaggacgtcctcatgagcatcgccgaccgcctcctccgccacaaccacatactggactgccaggtggaagtggccaagacgagcttcgacgtgcggcagccggacaaggagctgtggagcaaggtgtgcaggggcttcctcaagggaaggctccagtcgtcgcagcagcaaggtgtggcgctatagcaggaggaaattgggggggcattggatgcctaggttaatccgtcatattgtttgttttttatatatcaagagttgtacagaaactgctatcgtcgtccgaagcattaataaaaaaaaggagggaaaaaatagttcgttggtttggttc

SEQ ID NO: 1101 - DNA, 1270 bp, Zea mays
  Clone ID: 700101743_FLI
cgtagtgtcatcttatctcttcctcctaccttcactctcaaaatcttcagggagccgtagaggagcagcaggtgcaccaaaaggatggcagcgccaggctccctgcgacttctccaggccccgtccttcggtgcggccaagtgccagccgatggcgggccgggcatcggcgcggcgagcgccacggccactgttcgccgtgcgcgcttcggctgctgacgccgccaacagggacgccgtgcttaaggccttccgcgagaacagggctctcaagataatttccgggcttcagaactttgacaggagcagtgttgcatctgttgtcacagctgcagataagggaggtgcaacccatgttgacatagcatgtgacaaggacttagtaaagcttgccatggatcttaccaaccttccgatctgtgtctcatctgtagatccttcagcgttccattctgcagtacaagcaggagctaaaatggttgagattggaaactatgattccttttatgagatgggcattgagttttcctctgagcagatactgaagctaacaagggaaacaaggaagatgcttccagacatcaccttatcagtaacagttcctcacacacttagtttgccagatcagatgagactagcagagctactcgaagaggaaggagctgatataatccaaactgagggtgggaaatgttctagcccgacaaaacctggagtgcttggattgattgaaaaggcaacaccaacactcgccgcagcatactccatctctcgggctgttagtattccagtgatgtgctcgtcagggttaagctcggtgactgcaccaatggcagtaactgcaggagctgctggagttggagtcggttctgctattaacaaactcaacgacgttgtggcaatgatcgctgaggtgagaagcattgcgcaagcaatggagcttgcgccaagaatcgtgtccgaaaccctgagaacaattagttactagtggctaggaatacccttgccatttctgagcaaacttgagcagtcaataagaaagcaaaagagaggcatcgactctgcattttattctctctacgctgtcttttgcctgtggcagtgaatagcgcattagcatcatagaagtattagcttgatcaatggaagttgttcatgcgcttcttcatcgctgcaagtgttgtcatcttgtcgaactcacaataagcttagataagtgctgggtttgtgggaacatcgtttgtgcaatataaatgagatcttgcacctac

SEQ ID NO: 1102 - DNA, 1086 bp, Zea mays
  Clone ID: 700101744_FLI
cgtcaacctcgagcagatccgatgcgtcattacagccgacgaggtcctcctgctcaactccctcgacagctacgtcctccagtacgccgccgagctccagcgccgcctcctccagcgcgctgagggcgaccagctaccattcgaattccgggcgctcgagctcgccctcgaggccgcatgctccttcctcgatgcacaggcagcggaactggaaattgaagcatatccattattggatgagctgacatccaaaatcagtactctcaatttggaacgtgtccggcgattaaaaagtagactagttgcattgaccagaagagttcaaaaggtcagagatgaaatagaacaattaatggatgatgatggtgatatggctgagatgtatctcaccgaaaaaaagatgaggatggaatcatctgtctttggtgaccagtctttgttgggctacaattcagcaggtgctgctggggcatcagtttcagctcctgtatcgccagtctcatcacccacggaatcacgaaagctggagaaagctttcagtttgtgtagaagcaggcatgacagcacgaagagctccgataacacaacgacagatcatatccaagagttggagatgttactggaagcttatttcgttgttatcgacagcactctcaacaagctgacatcgcttaaagagtacattgatgacactgaagacttcatcaacattcagctggacaacgtgcggaaccagctgatccagtttgagttgctcctaacgactgcaacatttgttgtggccatttttggagtggttgctgggatatttgggatgaactttgagacatcagttttcaaaatagagaatgcattccagtgggtccttgtaattacttcagtggtgggcgttttcatcttctgctccttcatttggttcttcaagtacaagagactgatgcctttgtagagtgtatatatgccctcctcctcctcctcctcctcccatatagcaccgatgaatcagttcaccgtgtagaccttctaccctgttgaggaacttgatcagatccctgaatttctgccgatgtgaattaccattcttat

SEQ ID NO: 1103 - DNA, 1667 bp, Zea mays
  Clone ID: 700101765_FLI
cgttccgttcccagcggttcccaccgcgcatcaatcaaaccctaaaccctgctctcgcgccgccgcccgcccgcccgcccgctatgtcgctgccacacccggtgccccgagagacggtggccagcgccgtcgcctccctcacgatgtggatgaagaagcgcacagcgcagacgcgcccaaacctcctcgccgacgagcgcgacgacctcgtcgtcctccagctctcgctccgccgtatccccgcctcgtccagcgccaggccgcgcctcctcccgctcccgcatcccgtcatcggacacgacggcgcctccgtctgcgtaatctcggacgaccgccccaagtcgcggtccgcttccgcctccgatctcctccacgcgtcgaagtcgctccaccgcctcccagtctctgacgtcatcccgctctccacgctccgcacggactaccgcccctacgagtcgcggcgccgcctcgcagcctcccacgacctcttcatcgccgaccgcgccattctcccccttctgccgcgcgtcctcgggaaggcgttctacgccaccaagaaggctccgattggagtcgatttcagccgcgtcggatggccggagcaggtccgcaaggtccttggctctgcttttctgtacctgcggtcggggacctgctcggggatcaaggtgggtaggctggacatggaggaagaggtgatcgtggacaatgtgatggtcgcggtggaggaggctgtcgagaaggtgccaaagaagtgggccaacgttagggcactgcatctgaaggctgtggattcagttgccctaccaatttaccaggttgtaccagagttgggtatgaaaatcgaggtgcctgaaattattggatctggggaggttattgatgccgctgaagcggagacttgtgggaagaagattgacaagaagggggatgctggtgcccgtggaagagaggtatttgccaatgtgagtgccaagaggaagaggaataagaaggggcaggttgaggatgatgttgcgatgcaggaagaagtccaggtggagatagagaaaaagaagaggaaaagcattgtgatttctgctaatgacagccagatggctggcaagaagggtgaaaagaagggcaaacgtggtttggaaaataaggtgaacgaagccagtttcgacaacaagaaggttaagatggggaagactgagcagaggaagaagaagagcatgaacggtgatggtgaagtcggtactgaggaaatgcagggagataagaagatcaaggtggagaaatcagatgtcaagatcaagaagttgaggaccaggataagagtataaggttgcagttgatatcactgttggaggtgcctcttaaaatattcagttctgcgtatttgtaggctggatatccaaatcatcgatgaattgagttagtcaattgttatcagctggaagaactatatcatctgttaaagttccaagatttgccatcaatcagatatacctcaaaacttggtcccttaggtttcttctgaatttgtttcttcaggttttgcgagcttggtagctcaaacctattggttatagaagtatggcagaattgtttcttgctaaagctatgtacttcgctcgactcacaacgattgtgtgttgatcttctaagaatatgcttatgttgtc

SEQ ID NO: 1104 - DNA, 1370 bp, Zea mays
  Clone ID: 700101791_FLI
gaatcccccgatggctcatcgcgttctcctcctcctctctctcgcgtcggccgccgcggttgccgccgccgtcgacgcggaggacccgctgatccggcaggtggttcccggtggagatgacaacgatctggagctgaacgcggagtcccacttcctgagcttcgtgcagcggttcggcaagtcctacaaggacgccgacgagcacgcgtaccggctgtccgttttcaaggccaacctgcgccgcgcgcgccggcaccagctgctggacccgtcggcggagcacggcgtcactaagttctccgacctcacgccggcagagttccgccggacctacctcggcctccgcaagtcccggcgcgctctcctcagagaactcggggagtcggcgcacgaggcgcccgtgctccccaccgatggtctccccgacgatttcgactggagggaccacggcgccgtcggccccgtcaagaaccagggttcgtgcgggtcgtgctggtcgttcagcgcgtctggagcgctggagggtgcgcactacctcgcaactggcaagctggaggtgctttcggagcagcagttcgtcgactgtgaccacgagtgtgattcatcggagcctgattcatgtgattcgggttgcaatggtgggctaatgacgacggcattcagttatctccagaaggccggtggccttgagagtgagaaggattacccttacactgggagtgatggcaaatgcaagtttgacaagtccaagattgttgcttcagttcagaacttcagtgttgtgtctgtggacgaggctcaaatttctgctaacctcatcaaacatgggccattggcaatcggcatcaatgctgcctacatgcagacatacatcggaggcgtgtcatgcccatacatctgtggcaggcaccttgaccatggtgttctccttgttggatatggtgcttctggtttcgcccccattcgcctgaaggacaagccttactggatcatcaagaactcgtggggcgagaactggggggagaacggatactacaagatatgcaggggttccaacgttcgcaacaagtgcggcgtcgattccatggtctctaccgtgtccgcagtccacgcctcgaaggagtagactctggtcagcggtgataatcgtgattccatatattgtagaactataatccctgctagtaatccatttgtgctgtttatgtatcgaaggcagcaaagatgtgtgaagcggcaatgggatgcttgctgtaaggtaatatgtttggcttgctaggcatgctacacgctatttggatgtagcaacgttatcaccagctgtatacgctttttaatcgacaacatttgaataatatgtacataacatt

SEQ ID NO: 1105 - DNA, 2306 bp, Zea mays
  Clone ID: 700101803_FLI
gcctccggacccctcccatggctctgcttgcgctacggttcgggccgcttctccctgccccgccccaccaccgtcgggtcctgcggaaccgatgccgagtccggatcgtcgcctccaatgcccccacccccgtgagggacgggggcgctgccgcggtggtgtggtttaagcatgatctccgcatcgacgaccacccgggcctcgccgccgccgtctcggagccgcggcgccccgtcgtgccgctttacgtcttcgaccgacgcatcctcgccggctattcagataaaatgctggaactgctgctatttgctctgaaagatcttaagatgacgttgaaatctcaagattctgatttgctcataggcctgggaaacgctgaagatgttgtgctgaagcttgtgaatgaggtacaagcaggtctcgtttttacagaagaagaagttgaatatagagtgcgtgatgttcttgccaatgttgaatcatctttatctaatgggtcattctcatggggaagccctcccaagatagtggcttggagtgccccattgtatgactataagaatctgggagcagtaccgacatcacatgacgattttttaaagaaaaaattaccattggccacacctcttgctgcggcgaccttgcctgctctaaatttggagttagacacaggttctctacccactctggaagaattaaaatgtttcctgaaagaaataacaccagaggacaattgggctcctctcaagagaatgcccgcaagatctatccttaaaaggacaatcagtcaaaggaagatcaaaagtaatgctacattaagcaccatcaatgaagaaaacatagatgatgctgccaccatggattctgttgcatcaggaaagaggattataaactcgaagtttgcatcagagaactcactggaagttagtggtggaacagaaattactttggatgctttggctgcttacctaaaatatcttgaaggcacaggaaatgctagttggcaagagttgcatgataaagtgcgtttagctgaaaccagatatggtgcttcattctacatcttgtttggtcctgcaattcaacttggagtcatatctaggaggaaagcttacactgagactatccaatatgaaaaagatcgcaatgcaggttttctatcaccatttgggtactcaacacctacagtaacatcagcagtagatgctatatgttcaatggagtggtattggctcttggcatcaaaatcccaagtatgcatcgaggggaaatattctataagaatttggagatggaagggttatcttgtacagtacacctttcttggcaacgaaggtccacctgttcttcttgtgcatggttttggagctttcctggagcattttcgtgacaatatagacaagattgctgctacgggccaccgagtttgggcaattactcttgttggctttgggaaatcagagaaaccaaatgtcaactattcagaacttttctggtctgaactactgagggattttattgttgaaattgtgagggagcctgttcatcttcttggcaactctattggaggttatctctgtgctattgctgctggtttatggccttctcttgcaaagtctctggttcttttaaactcagctggttcagttgttccaaattactccttcatcccactgagtgaagaaagacgaacatcatggatttccaggttgcaggcacagctccttttgctcttcttgaggtcaagggcagaaggcattcttaaagaatattatcctacaagaactgaacgggtggacaagccacttctggaccagattgtaagagcttcatatgatcctggtgctgcaaaagtccttgagagtgtattcaacttcaatctttcaattcctcttaacttcttatttgattcttttggagggaagatattagttatccagggtatgaaagacccccttacaaaatctgaggcatttgtcaccatgctccgagaacattgcagcaaggttcaaatcagagagttaaatgcaggtcatgctccacatgatgaagttccagatgaagtaaataccatactatgtaaatgggtggagcagattgaagttaagccagccctggagaagaccaaggcaatataggtaacatttagaattatggacaccctatccattggttgattgtttaacatgatcttcaggagcaccttggtacattttcagtgacctaccaaaacttgtgtgattaaagcattgtgaattgttagccctatacaaattgtgattaaagtattgtgaattgttagctat

SEQ ID NO: 1106 - DNA, 1701 bp, Zea mays
  Clone ID: 700101806_FLI
ctcgcttgccgccggcctcgccgtccgcttcctcgtgccgcggccggccgaggtaaccccagaggcctggcagctcctctccatcttcctctccaccatcgcggggctcgtcctcggcccgctccccgtcggtgcgtgggcgttccttggcctcacagccaccgtcgccacccgcacgctccccttcaccgccgcgttcggggcgttcactaacgaagtcatctggctcatcgtcatatccttcttcttcgcgcgcggctttgtcaaaaccggactcggcgaccgcgtcgccacgtacttcgtcaaatggctggggcgcagcactttgggcctatcctatgggcttgccatcagcgaggctttcatctcccctgccatgcccagcaccacggccagggctggaggtgttttccttcccatcgtcaagtcgctgtcgctctcgtccggaagcaagcccaacgatccatcggcgaagaaactcggctcttatcttgtgcaatcgcagctacaggcagctgcgaactccagtgctctcttcttgacagcagctgcgcagaacctgttgtgtctgaagttagcagaggagattggtgttagtatcggaaacccatggattacttggttcaaggtttctagcgtgccagcacttcttgggcttttagtaactccttatttgatttacaaaatattcccccctgaaataaaggacactcctgaagccccagcattagctgccgagaagctaaagaacatgggtccagtaacaaaaaatgaatgggtcatgattgggacgatgcttcttgcagtctcactatggatttttggggaaactattggcgtatccagcgttgttgctgcaatgattggactctcaatacttcttgtgcttggagtgctgaactgggaggattgtttgaatgagaagtctgcatgggacaccctagcttggtttgctattttagttggcttggctgggcagcttactaaccttgggattgtgtcctggatgtcgaattgtgttgccaaggttcttcaatctttctcattgagctggcctgcagcatttgttgtccttcaggcctcatacttctttattcactatatatttgcaagccaaactgcacatgttggagctttatactcagcattccttgcgatgcatttagcagctggtgtgccagctctaatgtcggcacttgctttggcatacaatgcaaacctttttggagcactaacacactatagtagcgggcaatctgcagtatactttggagcggggtatgttgaccttccggatgtattcaagctgggttttataacagccgcaatcaatgctgtaatttggggagttgctggtgcattatggtggaaatttttgggtctttattgagtgtcggggcagtgtaagtacgtgaaaatcgtaccatattatcaaacaagtaattcatgatccagcatcggaggtggccaggtgggttcgtttttcttccgagggcctatgaatgcatcataacagaggaacgctcatctttagaagtttttgagcattatcatcaacctagaaagcagatatgttttcgtaggttcttaaatcgacggtcgttatatatcctttgatttgattgttgtaccctcgtatctcctccccaaggtaaataaaatgcatgagggacttttgaattttgatggtccaaatccatg

SEQ ID NO: 1107 - DNA, 1923 bp, Zea mays
  Clone ID: 700101807_FLI
ggctgacattgccccctcagtgtctgattcacgttttttttcctggtgggcacgctctgtcaagctggtgcccaaaatagtccggaaggggtttaacactctctgtattttagatgtctgggcaatctagaaattcagaaacctgtgtgtttgagggcacccagccaaatgttcaactccttctccataggatatgaagtgagggtctcctttggtgtgccgctggagcttctaagttgcatgagcttcttagtaggttgctgaacccagctgtttaggtgctggaagtcctggtcgtttatgttgctttttacgtaaaccctcttaggctatctccagcagcttgctcatcatcatctctcatttcaaactgcgctctgtaaatagtgcagtctacagtataaatcagtgcaaaaacagtgttttgcatggccatataatgtacctgggttgggtcgcttgaccttttctcgctgttttcctccttaaatgaaatgacacgcagctccactatgtcgttcgagaaaaaataatttatgaagaaaatgctttatctttattttagatgcagaccaagtttctcaaccttttggtttgctgcatttccattacatcaattatggatttcttttcttttccctgacattacagatgaaaggtccaaaattgatgatcacaattcaaagtttgatctcggggtgccagatgatcttgatgtatcaattgaacttagaaattggctatttgcacttgaaggaactgaagaagtaggataccttttttctcctcgtggaggtgatggtatcagtagagaagaaaaatgctggcattcaaccttcaggaatctacatatctctggcaagagcagtgaccgacttaaattgggaggcagaagaaaggtgtcacccgaaaaggcatttccagtggaacgctttacggctggaattgaaggtttgcaggcaataaaacctcgtctgagagatcagtgcactaaaaaaggaccatcaaacaatcatgagatgggcagagattttaatagttcaagttctgttggtgaccatggagttgatgtcgaagctaccatggtcattggcgaagacgagattgagggtgccaaatggacaatggataatgtcaaattttctgtcaaagaaccaatcgaggcggttgcaacaaaagaagaactagagcaccttgtgatgctttgcagatctgaggctgatgcaatggggaggatcactgctggaattcttcgtctccttaaacttgacaaatctcttgggcaaggaactatagaacaactacgtaacctaggaagtggaggcatggacaatatcttttcacccaggaggctcagcaggcagaacagttttggtagcataggcactcctcggactccaactatgcaagccattgcagacgtcatgggttcgaaaaccacactggaagcaactatttcctcattacaaggcgagatttccgaatccaaggccaaatgtatggcactgatttctcaggcaagcagcactgaggatcaaaaccgtgccgaggacatcaggcagcttagcgaaaagctcgagagcatgcaatcgttggtgacacgattgagaactttgatcatttgatctgactatctgagttgtgcatggttttttttttgtgtacagtacacaaggtcgttctgttcaaactcggaagtggcaaatgttgcttcctggtggctggttgagttattcttttgtgtacatttatatatcttgggaggcggtgtgtaaagattaaggggggtggaataatcggttgataggcagctggaggaaattttgtaggcagctggtactggcaaatatgctttgtagcacggcatcatatgatcaaacgggtcactaagaagagtgcagtgccatttatatcattgtatgt

SEQ ID NO: 1108 - DNA, 889 bp, Zea mays
  Clone ID: 700101811_FLI
gccacggcgtcgccatgaatgcgctcgtcgtcaccgccttggtggacatgtactgcaagtgcggctccgtagacgatgcccgccaggtgttcgatgccgcaaggtcgcaaggcttggccaagctatcgtcttggaactccatgatgcaggggttagcggtgcacgggcagtggcgagaagcggtcgccttgttctcggagctgaaatcctacgggctgagccccgacaacgtcaccttcatcgcggtcctgacggcctacggccactccggcatgcccgacgaggctcaggccgcgttcgcgtccatgtccagtgaacacggagtggagccggggatcgagcattacggctgcctcgtggatgccctcgcccgcgccgggcggctccgggaggccgaggacgcgatccgggcaatgccgatggcgccggacgcggccatctggggcgcgctgctctccgggtgccggctgcacggcgacgccgagctgggtgcgcgcgcggcgcgcgaggccgtgcggtgcgatccgcgcgacagcggcgcgtacgtgctcgcagccagcgtgctggcgcgtggtggagaccccggccgcggcgcgggcatcaggggccggatgagggaggccggcgtcggcaaggtccccggttctagcatgatcgaggttaacggcgtcgtgcacgagtttgtgagctagcgtagccagtagtgtagtgtactaatccacgatacattgggacaagctacatttgtacatctacagtatagaactagttatgtatatgtgacgacaaataactacggttaaatgactcgaatgcccgaaggcattggttgtacaagcgtaaagagtaatggtcagttccgttgaggtaatgtatggacatcatatgt

SEQ ID NO: 1109 - DNA, 1078 bp, Zea mays
  Clone ID: 700101827_FLI
ctggagtctgctcatatggtgttgtcatccattggtagcaatgcctaaacatgcacttggcagatttttgcattgtactattaattatttgttccttctgtaaaggtctgggatagagcagatgagttcattccagagaggtttgatttagagggacctgttccaaatgagtcaaacacagatttcaggtttattccattcagtgggggtcctcggaaatgtgctggagatcaattcgctctcctagaagcaatagtggcacttgcagttgtgttgcagaagatggatatgcagcttgtgccagatcaaaagattaacatgactactggagctacaattcatacaaccagtggactatatatgaatgtaagcctgcgtaaagttcagcaagaagctgagttagcgctgagcgaatcgaaatagatggaaacgacttcagacaagaatagagcacctgaactggctacaaatatgtttctccagtttctcgttgaaagctctactgtactatactagatgtcaatgcgtcggcatacagattacagattcgcttctcttgaaacatgaaaggatccttcgctggctgattcgtttggctattcgtgtgtaaaatttatcttaggctttgtttagatactcaaacattgaccccaatccatatgtgttgaggtggatttaagtgtaaattagtttaagttacacccaaatccatctcaatactcaatacatgtggattgaggtcaacactagagtacccaaaataggccttagtggtaatccaagaccaaacagaaacattgtcagggcctaagaggcccacggaggggctgtggcagcagcagccatgggctctccaagagggattagataaggatagttagagataagattagaagattagttaaaattatttaggagattagttgagattatctaggaaggttattagttagtagttgtttagagtttttataagagttttaaggagataaggatttctagctagatagggacaggcagctgacctatttatgtaatcaatggatgacaaataaagtagccaagaattagaagcgag

SEQ ID NO: 1110 - DNA, 1545 bp, Zea mays
  Clone ID: 700101841_FLI
tagtcgtgttcttgtgcggccggtgctcccggtgctccccatcacaccaccaaacggaccaggcgaggcgtcctccaggccctagctctgtggtgtgcgcctctgcgatactgcgactgcggggcgccggtgcccgtcccatcggccgccgaactgtgcgccccggttgcccactaggccactactgcagtctgcactctgcagataacacagaggaaggcggaagccgatggccgccgtggcaagccccgccctccggctccgcccgagagccgcctctacgtcggcgacctcctcctccgcccctcctcgctgtcgcttcggctccttctctcactcctgtttcaagtttgggaggtcatttccagttcagagagtcaatggaagcacgatgcagcatttcggtactctaaaagctcaagtttttagcagcactggcgaccatgatggacgatttcatattaagaggactatatgctttgctgctacggacaagcaggagccggtcgtttcacgttactcagacatgccggttttgcatgaggcagaaagtggtactaaagttacccctgcatctgaaaactcctacttcgctggcagaggtgctggaaaaccaggattcatctcttttcaagaaagcaccttccgaaagtcaactgtggagagcgtgccacatcctggcaaggaagcatctcgattagtttggtttattggccctactattctcgtgtctttcttggttcttccatctctttacttgcgcaaagtactctcagcagtgtttgaagattccttgttgacagattttcttatactattctttaccgaggctttattttatggaggagttgcaatttttgtcttcttgattgataaagtctggagacctttgcagcaagtagcaccaaagagttacatttggtcaaaatccagatttttccgtatttcctcagtaacaacaatggttctgagcttgataatacctcttttaacaatgggcatggtatggccctggactggaccagcagcatcagcgactcttgccccttatttggttggactggttgtacagtttgcatttgaacagtatgcacggcatcggaaatcaccttcttggccagtgattcctattatcttcaaggtatacaggctacaccaactgaacagggcagctcagctggtgacggcactcacattttctgtcagaggaacagagacaacaaatcaaaccctagccatcatgaactcattaggagcattactgactgtccttcaaattcttggcgttatctgtgtttggtccctctcaagctttctgatgaggtttcttccctcttcagacattcctgatccctgactcctagacgttttggtagaacttttggagcgtgggcatagcttcccattgtaaattggttacacggaaccagtttcacatgtttgcaatgtttagcatttctttagggcatcttgatgcaatcttcggctgagtaattggaagagaaactgacgctggaatcaaataaacagcaaattaaaaggtcc

SEQ ID NO: 1111 - DNA, 988 bp, Zea mays
  Clone ID: 700101858_FLI
tgatgctcgtagaccttgtgcaccgggtccggaacgatgtcggcgggaggtgaagcagagatgaaggagctgcccgaggagcttgcctgcctcgcatgcgaaacatcggcccaagtggtggcggcgggacctgccgcgtcggcaccgcttatgtgtcgcatgtgagcttcttttccgtttgtctgccgacactaggacctcccctgcccccacgagatttgtatctgtacctgactacgatgaggagtacaatgactgtgatgatgatgactatgatggaaccgaatatggcatcaaccatcctgttaatatggggaaaggaagaagggcgagcccatcaagctcgtcttcaccggcaagaagaagggaatcactcccgtcgcctccttcagcgccctcgacaaggagggcgaggaccccaccccgtctgccgcagccgagccgaagcccagcaacgatccagccgaggacgacataagcactttgtaaatctcccactcctctcccatggttttcccctatgtcgcttggtttcttctttttgccaagcttttaaggtttaagaagctaactatgaaactactaaaaaagatttttgggtaacaaatttacatctggacatttgggttgaaatgttactttatttttctccatgattttgtagtagcatgttctctatgttttgtattaagtgcttttgtgttttattaaattcgtgcttccattcaacctcacttactgctcacttactgcagatagaaaataattctcacaggtggaagcttgttgcagtctacagaattaggcgacactcttactggttgccttttgatttaactaccattcaaattagcaactcttgagcagatttattagatccaattgctgtcaaaggataagatgacctttatatagattgttcagttgccatttcaacgatttattgtgattgtaatgctcgcccctatatcaggaaggtgggcatatc

SEQ ID NO: 1112 - DNA, 2185 bp, Zea mays
  Clone ID: 700101868_FLI
acggcagtaaagcatggcttagatgcaaatgtttttgtgggcagttcactcatcaacctgtatgtgaaacatggctgcatctctgatgcaaagaaggtgtttgacttctccactgaaaagaacattgtgatgtggaatgctatcctttatgggtttgttcaaaatgagctccaagaagagaccattcagatgtttcagtatatgaggagagctgatcttgaggctgatgattttacatttgtgagtgtccttggcgcgtgcattaacttgtattcacttgatttaggtaggcaggtacactgtataacaatcaagaacggcatggatgcagacttgtttgttgctaatgcaatgctagatatgtactcaaaacttggagcaattgacgttgcaaaagcactattcagtctcattccagttaaggatagcgtatcctggaatgctcttatagttggacttgcacataatgaagaggagggagaagctatcaatatgcttaaaaggatgaagttctatggtatagcactagatgaggtttcttttgcaactgcaattaatgcctgttccaacatttgggctattgagactggaaagcagattcattccgcatctatcaagtacaatgtctgctcaaaccatgctgttggcagctctctgattgacctgtattcaaagtttggagatgtagaatcttctaggaaggttttggcacatgtagacgcaagcagcatagttccaataaatgcgctaattacaggtcttgtgcagaacaatagagaagatgaagccatagagttatttcagcaagtgctaaaagatggtttcaagccgtctaacttcacatttacaagcattctttcggggtgtactagacctgtcagttcagtaattggtaaacaagtccattgttacacactgaaatctgctattttgaatcaggatacttcacttggcatctctctggttggaatatatttgaagtgcaaattgcttgaggatgcaaacaaactcttagaggaggtgccagatcacaaaaacctggttgagtggacagctactatttcagggtatgctcaaaatggttacagtgttcaatctttggtgatgttttggagaatgcgcagttatgatgttcgttcagatgaggccacattcactagtgttctgaaagcttgttctgagatggcagctcttacagatggaaaagagatacatggcctcattgtaaaatctggttttgtttcctatgaaactgcaaccagtgccctcatggacatgtactccaagtgtggggatgttatttcttcctttgaaatcttcaaggaattgaaaaacaggcaaaatataatgccatggaactccatgattgttggttttgcgaaaaatggttatgcaaatgaggcacttcttctcttccagaagatgcaagaatcacaaataaagcctgatgatgtcacactccttggtgttctgattgcttgtagccatgctggtttaatttccgaaggcttacatttcttcgattctatgagccaagtttatggtatagtacccagagtagatcactatgcatgtctcatcgatctacttgggcgtggtggtcaccttcaaaaggctcaagaagttattgaccagttaccattcagagctgatggtgtgatctgggctacataccttgcagcatgtcaaatgcacaaggatgaagagagagggaaagttgcagcaaagaaacttgttgagatggaaccacaaagctcatccacgtacgtgttcctttcaagcttacatgctgcggctggtaactgggttgaagccaaagtagccagagaagcaatgcgagaaaaaggggtgatgaaatttccagggtgtagttggatcacagtggggaacaaacaaagcgtatttgttgtacaggacacacatcatccggacgctctgagcatctacaaaatgcttgatgatctaactggaatgatgaataaagatggcagaatcaaggaatgcttacttgagggacaatgaccctgtttaactaatatatcatgctaaataatcaagggcctagattgatcttctactgtaatagaaagatgtctggttatttaggtgaggaatttggtacccttgcatagtataagtaatacaattactcataaattaaggatttaggcttttatcacatctc

SEQ ID NO: 1113 - DNA, 1045 bp, Zea mays
  Clone ID: 700101881_FLI
gcagaatctcagcttgctgcagttaccacaaggataatgcaggccctacagaataacctagatgggaaatctaaacaatataaggatcctgcattgacacacttgtttcttatgaacaacatccactatatggttagatctgttcgcagatcagaagcaaaagatatacttggtgatgactggattcagaggcatcgcaggattgtgcagcaaaatgccaatcaatataaacgtgttgcttgggcaaagattcttcagacactttctgttcaaggtgcgggcagcggtggtgaccttaccagcagtagtgtttcaagagccacaatcaaagaacggtttaagtctttcaatacacaattcgaagagcttcacgcgaagcaatcacaatggatcgtacctgatcaagaactacgagaatccttgaggctcgctgtagccgaagtcctgttgccagcctaccgatcttttatcaaacgctttggcaatcttgtggacaacaacaagaacccgcagaagtacgtgcggtacagcccagaagcagtggaccaacttctaggccagttcttcgaagggcagcaatgggcggagcaaaagcgctgagcaacatagagtgagagtgacggcatgagtacagccagatgccagcactacctagttttcttttctcagaaaaagcgcgcctaagtttcttttctcgccatttgggtggctggaacggaaagctaacggcaaaaaagtgttggtggaactttcttgctggaggttcctaaacttattagtgttgatctataaaaggtaaaagaacgagacctctacggttgtggccttgtgggttcacaatcagcagttccaacaccaaggactagtttgataattccatttttccaaaggattttcattttcaagggaaattcattcatttttccttaggaaaacgggaatcccttagaaaaatatagtaactttttttgggtgccgtagaagtattgttttcatcagtatagaaccctatgttgcaataaaattgttccttaaagataaaaac

SEQ ID NO: 1114 - DNA, 1119 bp, Zea mays
  Clone ID: 700101915_FLI
caaaccctatttttggaattttatagcattgtttcgtgatcagtcagttatatttaacatatgatctaattatcccaagcacgcttcctcgacttcctatctcgactctcccaagtcacaaccctcgacctcccccctactccaactactggaagcgccgatccatcaggttctgatcgattcttctgccccgatccgcagcggcaagcggagatgaactgcgagacctgtcagctgaaagaactggagctggaactgacggagatcagggatgttctgcgctgtattttgcacaccatattcttccatagaaccctcagcctggttcgtcccaaagatgttgactgtgatttcctcgatattacttatgtacaatgtggtctaccggaactagaaaaggaagttgacgaaaagatagaccagttcagtgcatgggtggagaaacacccaaaccgcagaagccagatctgcctctcctttttcgacgagaaacacagacaccctggttggtttgtcaacaaaacagagcgcatctattgggagcaatggttcatcaatttgcaagtcatgttccccaaaagatacagcaagtcaaacagctccaaagggctgacaaacatccaagcaaatgccgtggaggagaccagcacaaggcgtgctgcattggaggcgtcgattaacgaagtgctgttccagatcataaagttcgccaacgagaaaaaggaccacattcctgctatccctgacaggattttcaatcacgagatcatgatcccaaggtgaccccttttccttggacgtgttgacagctcggattctgtatttggatggaacacggacgtcattcgcagagttctgaatagcgggcacccatactcgctttaactgaagacgacatctcagtgggcgcccgtattcagtttattagcgtgctgccgccctgtttggaagacggctctgttaaccatcgtggtgaaccatataatatgcctaaggaaaaacctagttctgtgtacatcaccctgctcatctggcatgtacatactgtgttgggatcttgctcatcggtcaaacattcttaagttcgattaagtttataaataacaatattatgattct

SEQ ID NO: 1115 - DNA, 1205 bp, Zea mays
  Clone ID: 700101928_FLI
acggcagcggggactacacgacggtggcggcggccgtggcagccgcccccaccaactcgaagaagcggcacgtgatctacattaaggccggcgcgtacatggagaacgtggaggtcgggaagaagcacgtcaacctcatgttcgtcggcgacggcatcggcaagaccgtcatcaaggccagccgcaacgtcgtcgacggctacaccaccttccgctcggccacagtcgctgtggtgggcaacaacttcttggcccgcgacctgacgatcgagaactcggccgggccgtcgaagcaccaggcggtggcgctccgcgtgggggcggacctgtcggcgttctaccggtgcagcttcgtggggtaccaggacactctgtacgtgcactcgctgcggcagttcttccgcgactgcgacgtctacggcaccatcgacttcgtgttcggcaacgcggccgtggtgctgcagggctgcaacctgtacgcgcgcaagccgctgccgaaccagagcaacatcttcacggcgcaggggcgggaggaccccaaccagaacacgggcatctccatccagaggtgcaaggtggcggcggcggccgacctcgccgccgcccagtcctccaccaagacctacctgggccgcccatggaagcagtactcccgcacggtgtacctgcagtcggagctggactcgctggtcgacccggccggctggctcgagtggaacggcagcttcgcgctcgacacgctctctacggcgagtacatgaacacggggcccggcgccggcacgtccgggcgggtcaagtggaaggggtaccgcgtcatcaccagcgccgccgaggccagcgccttcaccgttggcaacttcatcgacggcgacctctggctcgccggcacgtccatccccttcaccaccggcttgtgagcgcgcggcggtatgtatacgaggggtttcacggcaagggatgacaataaaccaaattggcggcggcggaagttcgtcgtttgtacgttcgttcatttcaatcagagctaaaaaaaaggcaccgtatcgatccggtcgatcgtgttactgtagttgattattttgtgcttggggacgcaggccaatatatttatttaatttaaccgtcccatatatatgtacacgtgcttgttatgattcggtgtattatttatatgtattgatacggtatcaatatataattaat

SEQ ID NO: 1116 - DNA, 2060 bp, Zea mays
  Clone ID: 700101960_FLI
gcgcgcacagggacagaaacagagacagagccagccatgtcgaccaccaccctgcagctggttccgtggccgccggagccggcgcgcgccgccgtgcttcttgttgcggcggtcgtctgcctgtgggtgcttctgtcacgcaggcgggccgccggagggagcaaggacaaggagcgggcggcccggctcccgcccggcagcttcgggtggccgctggtgggcgagacgctggacttcgtgtcctgcgcctactcctcccgcccggaggccttcgtcgacaagcgccgcctgctgcacgggagcgcggtgttccggtcgcacctgttcggctcggcgacggtggtgacgtcggacgcggaggtgagccggttcgtgctgcacagcgacgcgcgcgccttcgtgccctggtacccgcgctcgctgacggagctcatgggcgagtcctccatcctgctcatcaacggcagcctgcagcggcgcgtgcacggcctcgtcggcgccttcttcaagtcgccgcagctcaaggcgcaggtcaccgccgacatgcagcgccgcctcgcgcccgcgctcgccgcctggaaggttcggtgcgcctccgcgccgccgctccgcatccaggaccacgccaagacgatcgtgttcgagatcctggtgaggggtctgatcgggctggaggcaggcccggagatgcagcagctcaagcaccagttccaggaattcattgtcggcctcatgtccctccccatcaagctgccggggactaggctctacaggtccctccaggccaagaagaggatggccacgctgatacaggggatcatacaggagaagaggcggcggcggagggccgcccttgaggatggcggagagggcgagggcgaggccggtcccccgcgcgacgtcatcgacgtgctcataagcggcggcgacgagctcaccgacgagctcatatccgacaacatgatcgacctgatgatccccgccgaggactctgtgcccgtgctcatcacgctcgccgtcaagtatctcagcgagtgcccgcttgctctgcaacaacttgaggaggagaacatgcagctgaagaggcggaaaaccgacgtgggagagaccttgcagtggacggactacatgtcactgtcgttcacacaacatgtgataacggagacactgcggatggggaatatcatcaacgggatcatgcgcaaagcggtgcgggacgtggaggtgaaggggcacctcatccccaagggctggtgcgtgttcgtgtacttccggtcggtccacctcgacgacaagcgctacgacgagccctacaggttcaacccgtggaggtggaaggagaaggacacgagcaccatgggcttcaccccttttggcggtgggcagaggctgtgcccaggcctggatctggccaggctggaagcttccatctttctccatcacctggtgaccagcttcaggtgggtggcggaggaggaccacatcgtcaacttcccaaccgtgcggctcaagcgaggcatgcccgtcaggctcaccagcaaagactagctagctagtcactacgacctgcttgtgcatgccatgcatgcagatttcagtcacgtcatatgcaatatatattggaccctggaggttgcacgtgtacagaagagaggatgcaggagctagcagatgatcggaggtatttaggcagactgaaattgaatcgaccgcgaagagtagcacactactataccacgagtatgatctgtagtagtagtaataagaggaatataatatcattagtgtggtagtatttacttattatactactctctcttttcgtttttatttatcgtgttttagtttaaaaatgaactagcgaggttagtcaataggcgtgcatgcatggcccatcatggtcatggatatataggccttgatggttatactagtataagcagtagtgttatgtcacaagggattactgggatctgggatgatgatccacaatcccatctaaaacgaaaagagttaataaagattgttaagtttactgctgggagcctgggactttgact

SEQ ID NO: 1117 - DNA, 815 bp, Zea mays
  Clone ID: 700101991_FLI
cgaccaggagcaggcgcgccgctccgagttcgccggctacacgggccgcccgctctactcctcctgggtcggcgccgagtccgagcgccgggcggtgttcgtcgacgaggtgcgctgcgtcggctgcctcaagtgcgcgctccacgcgtcccggaccttcgccgtcgagtccgtctacggccgcgcccgcgccgtcgcgcagtgggccgacgacgaggacaggatcgtcgacgccatcaacacctgccccgtcgactgcatctcgatggtggagaggtcggacctggcggctctcgagttcttgatgtccaagcaaccgcgcggcagagtccgcgtctccgaaggcaacgcggtgggagctcgcgcgcccaacatcttcaacgaagtcgccaagttcaagaaaaggttcgatgagatgaagcagaaatctgcggccagagaattccaggagtcggaggcggcacggcagtcgaggacttcagcagtccacgccatcagatccatgtcgaactggtggtactggcggccattcgggttcgggccatcggccccggtcaccattgtcctcgcttcgcgcctcctgccgccgccgccggcggcacccgctgaccccgtgacggagaggctccaagaagcagccgccgcccggcgcaagacgggaggcgcggccacggccacggcgcacgcagggcgcgaagactactggaccccgcagctgaacctgccgtcgtcagcttctccgccgagcattcaccagaggggaaggggcactcccgctcaccaaggccacggccgcaggcgaggagcagccggtg

SEQ ID NO: 1118 - DNA, 1208 bp, Zea mays
  Clone ID: 700102025_FLI
ccggataaaagataaggagtgtctctcctttgccatcctcctctctttcagctaagtccctgccccctctctttttcttacattcaggtcctcgcagctcctctcttttttcttgtttctttcgatctgcgagccgtccaagtccagtactcttctttccctcaaggaactcttgcagccggcccctctggtttcctcgaattcttgttccccggtccctcctcctgtccccgcgtagatccgtccgtccgaggagcacaccgtccccacccccatgtttacccaccagttcctctgacggccgccgtgctccgatgaagctgagcgtgctccgtatccgccgctcccactccttctccgtcgccttcctctactggttctacgtcttctcatgaacgcatcgcccctctccaactgctgatccttcgccgtctctccctctctctttctctctgagatagtctttcgaatccatctctagggctcctgtttctccccatcctccccccaccccaccccccaccaaacagattcaatccgacaagacaagcatccatgtcgtcgtcacgccggagctcgagccccgacagcaacgacacgacggacgagcgcaagcggaagcggatgctgtccaacagggagtcggcgcggcggtcgcgcgcgcggaagcagcagcggctggaggagctggtggcggaggtggcccgcctgcaggcggagaacgcggcgacgcaggcccgcaccgcggcgctggagcgcgacctgggcagggtggacggcgacaacgcggtgctgcgcgcccgccacgccgagctggccggccgcctgcagtcgctgggcggcgtcctcgaggtgctccagatggccggcgccgccgtcgacatcccggagatggtcaccgacgaccccatgctccgcccctggcagccgtccttccccccgatgcagcccatcgggttctgagaatctgagcctcagccggcgggagagagccaatttctgtcgtcgtgccgctgtctatctcgtattggtatatctattcataaatcatccttgtcatggtttgctcttcttgtcagtgttataaatttgcttcttgttagtgttataaatttggccatcggaaaggatgtgtttgtagttgtaatatcttgtttggagttgtaatatcttatcttgcttatgaaatcgaatatgcctatatatat

SEQ ID NO: 1119 - DNA, 1084 bp, Zea mays
  Clone ID: 700102026_FLI
ggtgcaagtcttctcttgcttgcgcgtaaacacaacacagcatacatgcgttccacaaacctactctctccgtaacacatcatccaccaaagaacttatatatccacaaagatccagtccatcttggttattcgtccgcacgatggcgtccaagaaccaagttgatctcgagtcccagaagcccacgccgatgcacgccgtcgttgcatcggctcccgcagctgccgtgccggcttcttctggtacaggctccgtcgttgctggcatctccgacgctgcgccggagacccagccactcctggctgagccgaacggccacagccaggaggaggggctggaagacggtggggctaccgacgacgagacaacgcagctggagcgagcaatggcgcaggcgttccggagcaccgccgagctggccaagcacctccccaccggcgcggtgctcgcgttcgaggtgctgtcgccggtgttcaccaacggtggcaagtgcgacgatgtgaaccgcgtcatgacgtcctggctcgtggggctctgcgccgcggcgtgcttcttcctctccttcaccgacagcttccatgacgccaaggggaccgtgcggtacgcggtggccactcgccgcgggctgtgggtcatcgacggcacgccaccgccgccgccagcggaggccgccgagaaacggatcaagttcatcgacttcttccacgcgttcctgtcggtcatcgtgttcatgtccgtggccatgttcgacgggaatgtcggggcgtgcttcaaccctgtcatatcctacgacattcggcaggtgctgactgccgtgccgcttgccggagggctcgtcggcacgctgctcttcgccaccttcccgtccacacggcacgggatcggattcccgatccacgcttcctgagatacgcatattgttgttgctacgaactagcagctgatttctttgggttgcgtgtcttcatgttcttagagctaggtttgttgtgccggtgtcgtattgggagggttgacaaacatagacagtaccattggttgggaacttcggatattcctggacatgcattattgtttatatttt

SEQ ID NO: 1120 - DNA, 1577 bp, Zea mays
  Clone ID: 700102039_FLI
cactgcaccgtccagcacacaccagcattgtcctgaggcctgagcagcgctgcgccgcccaaccagaacgacgaagcggagccagcgccaacgaaccaactaaccaacggacggaagtggcgtggcgaggcaaggccgccgcgaagccgagcaaatccaagcctccctcctctacccgttcctctcctgccttctcgggatctgcccgcccgccttgtgtgatcttgccgcctcgccccccgcggttggagctccggctgcacgacaccatgagcccccgcgcgtagaggctgggagagagggagcggggaacaaagttaggcaccaacaaagttaagtggggaggccagagctgcccagctgggtcgctgttctaccagagggatggacgggagcgccggctccttcgtcgccgtccgccggctctccggctccgaccgcgccgccgccttccaccactcctcttcggcggaggtcgtgacggggtcgacggcgtggatcgggagggggctctcctgcgtctgcgcgcagaggagggacagcgatgcgcgcctttccttcgatttgacgcctgtgcaggaagaatgcctacagaggttacaaaaccgtatagaagttcagtatgatagtgcaaacagagagcatcaggaagcactacagtccctttggtgtgcttcttttcctggcaccgagcttcgggggctaatatcagaacagtggaaagagatgggttggcaagggaaagacccatctacagattttagaggtggaggcttcatctccttggagaatctattgtactttgctaggaactatccaaaatctttccaggaactccttcgcaagcagaatggtgaccgtgcaatctgggagtatccatttgctgtcgctggtgtaaatataaccttcatgctcattcagatgcttgatctccaatcagttaaaccgaggtcattgttcggagcagttttcctaaagcttctttcagaaaacgatcaagcttttgacattctctactgcataaccttcaagctgatggatcagcaatggcttgacatgcatgctacttacatggacttcaacacggtcatgaagtctacacggcgtcagctagaaagggagctgttaattgaagatattcagaggattgaggacatgccatcatacaggcttctggcccggtagctagaagaaactgaaaccttaacatggctacatattgcaaggcggcttgagatgctaatggatcgcaacttatgtggacggcgacaatcttgaaatgtagatgacatgtatccttgtgtgttaggtacttgtggtctctggtaacctgatctctgaagattacaaggtagggtttttttcctggtgatagaatgccacgtagggtaactgaagtgtctgatcagctcccatggccaaaaaaaaatttgtagggtgtgttattacaatctggtcgttgtccatcataccacgaaaggaagtattcctagggttgttgttgtaaacaggaggatttgggaaagatgatctgtgttgtctcccatttgcttgaagataagaggctagttcttttt

SEQ ID NO: 1121 - DNA, 491 bp, Zea mays
  Clone ID: 700102047_FLI
ctttcttctcctgcacctgatgatcctcaggatgctgttgttgcacaacagtacctgcgtgactatccaacatttgccgctacggctcgctactggacagaggccttcgcgaagagtgcatcaacgggcatggaagagaaggtgcagaagctggttgagatgggcttcccagaggatcaggtgagaagtgccctgaagagcgtggatggcgacgagaacatggctctcgaaaagctctgctctggctctgggtgaaccattctcttggggccaatacatgagcagctgtacatttcacagtgcctgctaatgctcctgctcagccatttcatataggggccgtgccatggcccatgggactggagtgagactctcctaggacaacattcgtttctttaaactcttttgctgttgtgtctggtaggctgaatcgactctttgcccatggaaccctggtaatatctgatgcaaaggaaacatgaggttgacat

SEQ ID NO: 1122 - DNA, 571 bp, Zea mays
  Clone ID: 700102086_FLI
gacagttttccacaaaatcagacgtgttcagttttgggatccttgttatagagatcataacagggcggagaaacattgggcactacttctttgatgagcaaaatgaagatattataagcctcgtatggagacactggactgagggaacaattgtagagatgatagatgattctcttgggagaaattactcggagagcgaggtgctaaaatgcgttaacattggtttgttgtgccttcaacatagtccaatggatcgacctacgatgtccgatgtcatggtgatgcttaatggtgatgatactagttctataccgtctgctgcgaggcccacatttttcttggatagaagcactccttactcctataattcatgtactattacacatatgtctcctaggtagcacaaacaattgttgatagtagcatattgttacttgttcgcatcttgatgtatagtagtttagatcaactagtttgatttatcacaaagtgtgatttgtagttgccatttgtaattgtggatttgaaagttgcctagagaggggtgaatatgtgaaacctaaaatttatc

SEQ ID NO: 1123 - DNA, 883 bp, Zea mays
  Clone ID: 700102091_FLI
tgctgctgtaaattctctgaagacagggatgttgcaacgatttaagagcagctttgtctctggatcttcaaatacaccaagcagcagtgcaccttcctttgtaagaccagcactccgtggctttgtgtctggcggcaccattggaggagacacacggcctgcacaggcagcccccactttcatccctgcatcccggcctgcacagcctgcccccgcggtccctgcatcccagcctgcaggaaataacaacgaaaatgggaacccgaatccagaaagttcacgggatcagttcagggagagaaaacgaccatcaggttgggatcgctagtccctgctaactggtatgcccaattgtgattccttccccgctttgttatattgatgtagtctcttgggagacatcctataaaaaagcactgtagattacatgatgtcaggtaagtgttgttttagttagtttggcctttattctttatccttcaactactgttgtatctggccgttgtttcacatttttcatcagagcaaaatttaccatttgtattcgaagttggcaccgaggcctcctttggttcatagaaaaaacagaggaaaaacttagttcatgcttttagttcatagaaatggagtatgtgaatagtgtatgaagttttccagtgtagcactagtgtttgatgggatcctgagagatagggaaggccagagttgacatgaaaatgaagacatccagatagttgacatgaaaatgaagttctccagaggcatcatggatcctggtaagagaagtaggaaaagttgacgttgacatgagaagatgcaatataagcagacttgaaaagatgaaatatacaaaacattcttcaaagtcactatgtgacatctc

SEQ ID NO: 1124 - DNA, 1754 bp, Zea mays
  Clone ID: 700102139_FLI
aggccccacgccccacggactacggtaagccagcggacgagccgccatccgccacgccatggcctctctcttcgccccggcacgccgcctgctcagccttggccgccgccgccaccgccgcggaggacagctccccgtgcccccctcgtctcgtagcaacagcgcggaggagcgaccaccgccggcgcggtcgctgagccttgattccacgctgtttccgctgggccacccgagcacactccttgtgccggagatcgaactgtgggcggcgcggcccagaaacctcctccgagccgttgagctccaacgcatcgtcaaggagctccgcaagcgccgccgccaccgccaggccctcgaggtctctgagtggatgaatctcaagggtcacgtcaaatttctgccaaaggatcatgctattcacctggatttaattggtcaaatccatggggttgaagcagcagagacctacttcaataacctatctgacaaagataagacagagaaaccctatggtacttctcaactgctacacacgagaactcttggtcgacaaagcgttggcccattttcggaatatgaaagagctgggtttcgtgttctccacgctcccctacaatgacctcatgggcctctataccagaatagggcagcacgagagggtcccttcggtgatggcagaaatgaaaagcaatgggattgttcctgataattttagctacagaatatgcataaattcttatggcacaagagcagacttttttgggctggagaacaccctggaggagatggaatgtgagcctcaaattgttgttgactggaatacctatgctgttgtggcaagcaactacattaagggtgacctaagggagaaggcatactctgcgttaagcaaagcagaagcaaaactggataaacaggatcctgatgcatataggcacctgatttccctgtatggcaaccttggggacaaatcagaagccaagaggctatgggcggtgcaaatgtcgaactgtaagaggtacattaacagggactacatgaatatgctttcggtgctcgtgaagcttgatgagatcacagaagctgaagacttgctgaaggagtgggagtctagccaaaactcattcgacttccgtgtcccaaacgtcctgctcacagggtaccgccagaaggccttgctggacagggccgagatgctgctcgacggcttcttgaagaagggaaagacgcctccttcgaccagctgggggattgtggcaatcggctatgcggagaaaggtgatgtggcgaaagcttatgagatgaccaagaacgccctctctgtgcacgcccccaatactggctggatccctaggccttccatgcttgagatgatacttaagtacctcggagacgagggggaggtcaaggatgtcgaagctttcgttagtctgctgaaagctgctgtgccagtggactctgatatgaccgaggctttgtcgagggctcgtgcgagggaagaaatgaaggctgaagaggcaacggaagctcctcgcggggatgttattgcctgagctggttgtcggtgtttcagcgctgctgtctgatcctatgtgctagtagtagaataaattaatactgtagttagttataatccttcctttgatagctccttgttttcattagctataagttttatgttggtgtttggttcgccacttcgtaataactatagttatcatatcaatgatgcgaagcgatacccgttttggctg

SEQ ID NO: 1125 - DNA, 1045 bp, Zea mays
  Clone ID: 700102161_FLI
caatatatggactaaaatataataaaatagaggtactaaaaattagtccagacatccgtttattgtttaatgcatgctccaccataagattcttgatggcgctaacacacgtgagtgacgtacgccctttcacaacatggttttgtttcagagaatggactaaaaatgctgcttccctggacccgctccttaaacttaaaccaccacggagcacagtttcgccatccatgagccttctactacaggggtgccatggcctgacgccggctccaaagggggacctgaacctgaccgatgaatgcgctcaaggtaaccatttgcttgggttatgaatgattcctggcctactggatttctgaacttggcacccctggatgacccacctccaggccatcacaggaaagccggaagcttatcgagcaccttgttgccgaggagagccgggcaagggctggccctgaggccaaagtctggcggtcgggcagacacgaacggcatccagcaggatctgttggctgcgtgggtgccctcgtacggggacgggttgcgcgcggtgaagagatcgtcgagcgctccggagttccaggattcggacagcgtcagcctcgcctcggcgtggctgaagagcaagtggaacctgaaaccggattatgccttcaccctggcgctgttcgacggcatctccaagcctctcctggacagcatccccaagcctctcctcgacaacatccccaactcgatcgttgcttggagaaacaaggcggccagagattagcagcttcgtttcgtctctttacagccaacaaaaaaaaaggcctcgaacggttggacacactgtgctgaaatggcgcgatggatacagtgacacattacttgcacatacatactgtgctgaatctattgtgccaaagcagcagcagcagcagattgggagctgggagatgagcctgggggtgtattcttttcatttttgtacgtacacatctaggaatgaaggcaaacgcctggcagcattcccatgacctaataaagaaatagcttgttc

SEQ ID NO: 1126 - DNA, 1285 bp, Zea mays
  Clone ID: 700102188_FLI
caacaccactccactccctccatttccctcacctcccgcagcagctagccgccagccaacaaccgaaccaaccaaccaacccacaggccacagcgagcgagtaaagcgtccaatggtagcgatggcggccgtgcagcagcagcagcagcagcagcgccgcgacgcggaggcggagctcaacctgcccccgggcttccggttccacccgacggacgaggagctggtggcgcactacctctgcgcgcgcgccgcggggcgccgcccgccggtgtccatcatcgccgaggtcgacctgtaccgcttcgacccctgggacctgccggagcgcgccctcttcgggcgccgcgagtggtacttcttcacgccgcgggaccgcaagtaccccaacggctcccgccccaaccgcgccgccgggtcgggctactggaaggccacgggcgcggacaagcccgtggagcacgagggccggacggcggggatcaagaaggcgctcgtgttctaccacggcaagccgccgcgcggggtcaagacggagtggatcatgcacgagtaccgcctcgccgaagccggcggcgcccgcgccaagaagtccggcgccggcacgctcaggctggatgactgggtgctgtgccgcctgtacaacaagaagaacgagtgggagaagatgcagcagcagaaggagaaggagaagaaggcgatggagtcggaggcgtcgctctcgcactcccactccgacacgcggacgccggaatcggagatcgacgacgacccgttcccggagctgggctctctaccggcgttcgacgacatgggcgcagccccagcccctgccggcgtcgtcctgcccaaggaggaggtggaggacttcggcgacctcggcggcgacgactggctcgcgggcatcaacctcgacgacctgcagatgccgggggacgccgccgatttctacggctccatgctcgtctcgccgatggccgccaagatggagccggacggcggcttccccttcttctgagatccttcggcgactccggggacgaccggatgcagcgcaacgcaaactgtgtatagttcagattttcttcatggaaccaacaacaacaaaaaaagttcttgctaatatcttgttctagtggtgtagtgcagaagtagcagcaacatgattgaagttccattgtagtactgatgttcatcgccacttgagctgtgacaagtgacgacattctttcgtttcttggctgcaaattcttcgttgtccagaatataatttcagatgggtaatgcc

SEQ ID NO: 1127 - DNA, 1240 bp, Zea mays
  Clone ID: 700102195_FLI
cagactccaccaccccgcttcgatcttctgttgcagctgaaatctgtcagattctgcagttcattccaaatggctgctgcagcagagcacggcaactgcgatgcttgggcggccagagacccttctggggttctctcaccatacaagtttaaccgcagggcagtgcaaagcagcgacgtttcgctgaagatcatatactgcggggtgtgttacggtgacgttatgtggatacagaacaagcacaacgactcagtttatcctctggttcctgggcatgagatagctggggttgtgactgaggttggcgcagacgtcaaggccttcaaggtgggtgaccacgcaggcgttggaacctacgtgaactcgtgccggcactgcgagaactgcaacagctctctggagaactactgcccagaaacagttttcacttacaacacaactgatgctgatgggaccatcacaaaggggggctactccactcacattgtcgtccatgaaaggtactgcttcaagatacccgatggctaccctctggcgcaggcagcgcctcttctgtgtgctggaatcaccgtctataccccaatggcgcggcacaacatgaagcagcctgggaagtcgctgggagtcattgggctcggtggcctaggccacatggcggtcaaatttggcaaggccttcggcctcaaggtcacggttttcagcacgagcgaatcgaagagggaagaagccattaacctccttggagcagataactttgttatatcgtcagacacgcagcagatggaggccctgaaaaactccctgcacttcatagttgacactgcttctggtgaccatccattcgatccgtatctctcgctccttaaggttggcggtgtgatgacaatagtgtgctttccaagtgagatcaagatgcaccctgcgagcctcaatcgtggtgggcggaccttgtctggtagtattgtcggaggtacaaaagacatccaggagatggttaacttttgcgcggagaacaaaatctatccagagatcgagatcatcaagatggattatatcaacgaggctctcgccaggcttgttaaccgagacgtgaaataccgctttgtcatcgacatcaagaactctttcgagtagcatgctcattcacatgatccctgtcttctttgtcaatgtatgagagataatgagtcgtttcgaataaagcttagacatgataaataacaagtatgcttgtgactgt

SEQ ID NO: 1128 - DNA, 1313 bp, Zea mays
  Clone ID: 700102202_FLI
atccatcgttcgcagttcagttcacacttcacaggcgagcagcgaccatggatacccaagcacgtccggttcctccccgcgtcaagctcggcatccagggattcgaggtgtccaagctggggttcgggtgcatggggctgacgggcgcgtacaactccccgctggacgacgaggccggcatcgccgtcatcgcgcacgctttcagccgcggagtcaccttgttcgacacctccgacgtatacgggcccctcaccaacgaaatcctcctcggcaaggcgctgaagcagctgccgcgggagcaggtgcaggtggccaccaagttcgggatacggcatgacgagagcggcacgcggaccgtgtgcggccggccggagtacgttcgcgcctgctgcgaggccagcctgcgccgcctcggcatcgactgcatcgacctctactaccagcaccgcattgacaccacaactcccatcgaggagacgattggcgagctcaagaagctggtggaggagggtaaggtcaagtacatcggattgtcagaggcgagcccggacaccatcaggcgtgcacatgctgtgcacccgatcaccgcggtgcagatggagtggtctctctggtctcgcgacattgagcccgaaattgtgccgctctgcagagaattgggcattggaattgtaccatacagtcctcttggccgtgggttttttggtggaagaggagtgaaagaacaagtgtctgctgaatctaatctgcatgggatcccaaggtttgctccagaaaatttggagaagaacaagcaaatttatttgcgaatggaagaactggccaataagcaccagtgcagccctgctcagctagctttagcatgggttctgcatcaaggagatgatgtggttcctataccagggacaaccaaaatcaagaatctagattccaacattgactccttgaaggtgaaactgacagacgaagatctgaaagaaatgggcagccagatacgggaagaagatgtggctggtggaagacaattcacttcatttgcacataccacctggaagtacgctgatacgccaaagaagcagagctaaaaaatacttgaaagcaacaatgatgatgcgattggtatggccctctccctgcagatgccctcaggaacattgccgatgcccctttgtgaacagcctcttctagtaaataataatgtatggagaagaacaatgaagggcccagtcttgttggaagtacgaataatgtacagttacaggaatgtgtgctaccatatatttcgtcgcatcagtttgagttgtggttgtgtg

SEQ ID NO: 1129 - DNA, 1710 bp, Zea mays
  Clone ID: 700102205_FLI
ggtcgacgacatggacatcttcaaggggatcagcctcaagctgcttgccatggaggagctgctgcggcagcaccccgagtggcggggcaagctggtgctggtgcaggtcgccaacccggcgcgagggagggggaaggacgtcgccgaggtgcagaccgagacgtacgccatggtgcggcgcatcaacgaggtgtacggtgagccggggtacgagccggtggtcctgatcgatgagcctctgcagttctacgagcgcgtggcctactacgtcatagccgaggtgtgcctggtgaccgcggtcagggacggcatgaacctgattccctatgagtacatcgtctcccggcaggggaacgagaagctggacaggatgctgcggcaggggaagccagaggagaagaagagcatgctggtggtgtccgagttcatcgggtgctcgccgtctctgagcggcgccatcagggtgaacccgtggaacatcgaggccgtggctgacgccatggagaccgcccttgtgctgcctgagaacgagaagaggctgcgccacgataagcacttccgctacgtgagcacccacgacgtcgggtactgggctaacagcttcctcctggaccttgagaggacctgcaagtatcattctcagaagaggtgctggggcattggcttcggcctgcggttcagagtggtctcgctcgacctgaccttcaggaagctttccttggagaacatccttatggcataccggagagccaagacacgggcaattctgctggactacgatggcacgctgatgccacaggcgattaacaagagcccgtccactgaatctgtgcggatcctgaacagcttgtgccgagacaaggacaatgtggtgtacctatgcagcgggtatgaccggcgcacccttcatgagtggttcccttgtgagaaccttggcatagccgcggagcatggctacttcctgaggtgtaagagggacgcggaatggaagacctgtgtcgctgccacagactgcagctggaagcagatcgcggagccggtgatgtgcctgtacagggagacgacggacggctcaaccatcgaggacagggagacggtgctcgtgtggaactacgaggacgcggaccccgacttcgggtcgtgccaggccaaggagctcgtcgaccaccttgagagcgtgctcgcgaacgagcctgtgtcggtgaagaccacgcctcactcagttgaagtgaaaccgcagggcgtgagcaagggcttggtggctcggcgcatgcttgtgtcgatgaaggagcggggccagtgcccggacttcgtcctgtgcatcggcgacgacaagtccgacgaggacatgttccagctgatcgccaccgctgcctgcggggactcgctggcgtccaaggcggaggtgttcgcgtgcaccgtcggccgcaagcccagcaaggccaagtactacctcgacgacgcggcggaggtggtgaggctgatgcaggggctctcctacgtctccgaggagctggcgctggcgaaccagcgggatgaagacgaggactcctctttggacgacgtgtgggaataggaaggagcgttcccttcccgtgctgctcctgcggtaatgtctgtttgtgttgttggctcggctggagctttcgctgagtagtttaggtgtgtaaatgaggtatgctttccagcgtaatgtattgccagtggtct

SEQ ID NO: 1130 - DNA, 1192 bp, Zea mays
  Clone ID: 700102209_FLI
gtctcagtctcagcaagacggcgacagccgggctgccgccgccggcttcgacgacttctccttccacacggccacctccaacgccgtgcgcgcgcacacgacgacgacgtccttaccttccttcgaggagcagcagcagcaagtcgaaaaagccgccgtcccgtcgagcaacagggcgagcggcggcgggaacggcaacactaagctggaggacgggtacaactggcgcaagtacgggcagaagcaggtgaaggggagcgagaacccgcgcagctactacaagtgcacgtaccacagctgctccatgaagaagaaggtggagagggccctggccgacggccgcatcacgcagatcgtgtacaagggcgcgcacaaccaccccaagccgctgtccacgcgccgcaactcatccggaggtggtgcggcggcggaggagctgcaggccggcaacagcagcctctcggccgcagcggcggccggctgtactggaccggagcactccggcgccaccgccgagaactcgtctgtcaccttcggcgacgacgaggcagagaacgggtcgcagcggagcgacggcgacgagcccgacgccaagcgctggtacgtacgtgatcccgcccgagcgagcgagcgagattcattattcgctacccgcgggccgcggttcacaagttgagcgtgtattactactgtttcctcgtgttcctgcaactcatgtatatatgtctgcttgatcaggaagcaggaggacggcgagaacgagggcagctctgcaggcgccggcggcaagccggtccgcgagccccggctggtggtccagacgctgagcgacatcgacatcctggacgacgggttccggtggcgcaagtacgggcagaaggtggtgaaggggaacccgaacccgcggagctactacaagtgcaccacggcggggtgcccggtgcggaagcacgtggagcgcgcgtcccacgacacgcgcgccgtgatcaccacgtacgagggcaagcacaaccacgacgtgcccgtgggccgcggcgccgccagccgagctgctgctgctgcggcggcgggttccggggccttgatggccaccggcggcggccagctcggctatcagcagcagcagcagcagtagccatacaccctggagatgctgagcagcggatcgtacggcggcggcggcggcggctac

SEQ ID NO: 1131 - DNA, 1565 bp, Zea mays
  Clone ID: 700102210_FLI
aacagcttcatcgtctggaacacgcccgagttcgcccgggacctcctgcccaagtacttcaagcacagcaacttctcctccttcgtcaggcagctcaacacctacgggtttagaaaggttgatccagacagatgggaatttgcaaatgagggttttctgagaggacagaagcatctgctgaagactatcaacagaaggaaaccatccttgcaggggaacagccaaccacagcaacctcagtcgcagaacgctcctgtgccttcctgtgtagaggttggtaagtttgggttggaggaagagattgaacggctgaagagggataagaatgttcttatgcaagagcttgtcaggctgagacagcaacagcaaacaactgaccatcagctgcagactttgggcaagcgtcttcaagggatggagtcacggcagcaacagatgatgtctttcctggctaaagcaatgcaaagtcctggtttcctagcgcagtttgtacagcaaaatgagaagagcagaagaagaatagtagcggcgaacaagaaaaggcggctgcccaggcaagatggtggcctagactccgaaagtgctgctgcttcgttggacggtcaaatcatcaagtatcagcctctgatcaacgaagcagccaaagcaatgctaaggaagatactaaagctagattcttcgcataggttggaatctatgggcaattcagagaatggcaattttctgctggagaattatatgccaggcgctcaagcctttgagagctcttcgtcaacaagaaactctggggtcaccctttcagaggtttcagctaacccaggtttgccgtatggcggcggcggcggcacgagctctgggctgtcagccatctgccctcctgaaatccagtgcccagttgtgatggacaacatgtcgtctaaccaagtgcccagcatgagtgctgtgcctcctgtttcgaaggctacaattgacatgggtattcctgaattctcagctctggcagacttggtgaatgaaggctccgtcgatatccctggaggggcctttgagatgcctggtcctgagtttcctctgccagaaggcgatgacagtgtccccatcgagaccgatgagaccatgtacaacaacaacgacgagactcagagccttccaggcatcatcgactccttctgggagcagttcctggtaggcagccctctctctgccgataacgatgaagttgattcggggtcgccacaggagaacggatggagcaaagtggggaacatcggtgatcttacagaacagatgggccttctgtcatcaacaaatcaccgcgactcagggaatgggctgtagtgtatcttaattaatatacggtagactgggattatcggtaataagcgtcgcctgcagtttttgttatttttccttttggccaaaaaatgatatgccggtatatcaaccactcgctcgacctatatgcgcgggaggggcagtcttccagctgagctctgaatgccacagccacctgcttgtatcaatctatgatgttggcagtcttgagaacaccactgtgacttgtt

SEQ ID NO: 1132 - DNA, 1006 bp, Zea mays
  Clone ID: 700102230_FLI
gcaacaaagcaacgcaggcctccggcctccctgaactgacttcagaagtcaccaacgcacccagcacagacataagaccctcgccggacgctcgctctcgccggggacaactcaatcacgaggccaggatggcccgctacgatcgcgcgatcaccgtgttctcacccgacggccacctcttccaggtcgagtacgccctcgaggccgtccgcaagggcaacgccgctgtcggcgtccgcggcgtcgacaccgtcgtcctcggcgtcgagaagaagtccacccccaagctccaggactccaggtccgtgcgcaagatcgcgagcctggacacccacatcgcgctggcgtgcgcggggctcaaggccgacgcgcgcgtgctcatcaaccgcgctcgcgtggagtgccagagccaccgcctcacagtcgaggaccccgtcaccgtcgagtacatcacgcgctacatcgccggcctgcagcagaagtacacgcagagcggaggggtgcgccccttcggcctctccacgctcatcgtcggcttcgatccctacacccagaagcccgcgctgtaccagactgacccctcggggaccttctccgcttggaaggccaacgcaaccggccgcaactccaactccatgcgcgagtttctcgagaagaattacaaggagacgtccggtaaggagaccatcaagctcgccatcagagcactccttgaggttgttgagagtggtggcaagaacatagagattgcagtgatgacacacgaggacggccttcatgaactcgaagaggctgagattgatgagtatgttgccgaaattgaagcagagaaggccgctgccgaggctgcaaagaagggtgcaccaaaggggaactgactccgcacaagcttagattccgcctcttgttccagagcatgtcttatgattcacctcttagatggatgcccggatgtttggatacaggaatatttataaaaaaaaattaagatgaagccgcttggatg

SEQ ID NO: 1133 - DNA, 1103 bp, Zea mays
  Clone ID: 700102231_FLI
ctaacatatgcccacctgcatgaggctaccaatggcttcagctcggaagctcttgttggcacaggaggattcggtgaggtttacaaggctaggctcatggatggcagcgttgtggctgtcaagaagctgatgcatttcacaggccagggcgaccgggagttcactgcagagatggagaccattggcaagatcaaacatcgcaaccttgtgccgttgctaggctactgcaaagttggcgacgaacgtctgcttgtgtacgagtacatgaataatggaagcctggatgtcttgctccatgaaagggacaagactgatgtgggtcttgattgggcaacaaggaagaagattgcagttggctcggcaagaggactggccttcctccaccatagttgcatcccacacatcatacaccgggacatgaagtcaagcaacgtgcttcttgacgataatctcgatgcctacgtatcggatttcggaatggcgcggctcgtgaatgctgttgactcacatctaaccgtgagcaagctcttaggaacacctggttatgtggctcccgagtacttccagtcggttatttgcacaactaagggcgacgtctacagctatggcgttgttcttctggagcttctctcagggaaaaaaccaatcaatccgactgaattcggcgacaataatctcatcgactgggcaaagcagatggttaaggaggaccggtgcagcgagatatttgatcctatattgaccgacacaaaatcctgcgagtcggagctgtaccagtatctggcgattgcttgccagtgcttggacgatcaacctagtcgcagacctacgatgatccaggtcatggcaatgttcagtgagtttcagattgactctggcagcttcttcttggacggcttctcgctcgattcagatagaggaatcatctgaaaaaaaatgtgtaaatgttattgatccctgcagattatatgattcactggatttaggtattagcttagccatgtttaactcatgttaacaggatacaaacagatgtaaatttgtttcggttgccgtacatagtacacaacagcttcaacacagataccatatagagttgtttc

SEQ ID NO: 1134 - DNA, 1661 bp, Zea mays
  Clone ID: 700102266_FLI
cacaacttcgttgttccttccgcagctccgagctccggaatcgagcaaagcacccgagcctgcgccgcgtcaagccgtcaaagctcccccgcttcataccattccctcccccgatccctcgcctcagccctcagctccgcccctcggtttccgaagcgccaccgccgacgtggcctccctcggctccaatggcgttgccctacctggaggccgtgctttgctttatgattttcatgtacatatttgagacatatcttgacatccgtcagcatagagccctcaagctgccaactttgccaaaacccctgctgggagtaattagtgacgaaaagtttgaacgctctagagcttatagcctcgacaaaagctatttccattttgttcatgaggctgtgactattttaatggatactacaatactatactatagagttcttccctggttttggaagaaatctggagagttagttaccagtgttgggctgagtgctgagaatgagataatacacacccttgctttcttagctggttccatggtttggtcgcagattacagacttgccgttctctctctattcaacttttgttatagaggctcgacatggttttaacaagcaaactatatggctcttcattagggatatgatcaaaggaattttactatccatgatattggggccaccaatcgtggctgctatcatctacatagtacagattggaggaccttacctggctatatatctctggggttttatgtttgtattagctctactgatgatgacaatataccccattgtgatagctcctctgttcaacaagttcactcctcttcctgaaggagtcctcagggaaaaaatagagaagctggcagcttccctcaagtttcctttgaaaaagcttttcgtggtagatgggtctaccagatcaagccacagtaatgcctacatgtatggttttttcaagaacaagcgcatagtactctatgacacattgattcagcagtgtagcaatgaggatgagatagtttctgttatagcacatgaacttggacactggaaactcaatcatactgtctattcctttgtagctgtccagctgcttatgtttcttcaatttggaggatatactctagtaaggagctccaaagatctatttggaagttttggcttcaaggaccagccagtaataattggattgatcattttccagcacaccataatacccatccaacaccttctgagcttttgcctgaaccttgtcagcagagcatttgaatttcaggctgatgcctttgccaagaaccttggatatgcccctcagctccgagcagcccttgttaaactacaggaggagaacttgtctgcgatgaacaccgatccttggtattcggcatatcactactcccacccaccactcgtcgagaggctgcaagctcttgaagattcagacagcaaaaaagaagattagtcgatccttgtatgaggtttacatatggatttttccctgccacatgcacaccgattcagtgcttggatggtgagggttttgacataggagtgttgtcaaagctttagagtgcatctttcggtcaggtgtaacagcctttcggtcattgagacatataagcgaattagctattaaaaaaaacagaactgcgatttt

SEQ ID NO: 1135 - DNA, 890 bp, Zea mays
  Clone ID: 700102274_FLI
ggtgccaaggcggcggcggtcggtcggtctgcgatatacgatggcggcgccttactacggaggtcctccggcggcgccggcccccgtggcggtggtgtccccgcagttctgtgcgccgtacgtggtgcccctgacggtgaccaagaaggccatcagcctctccgacggcgacttcaccgtcaccgacgccaacggcgccaccgtgctgcaggtcaagggcgccgtcttcagtatccgccaccgccgcgtcctcctcgacgccgccggccagcccatcctcaccatgctggagaaggtattcagcatgcacaacagatgggaggtgttcagaggggacagctcgaacgagagcgacctgctcttcaccgcgaagaaatcctcgatattccagctgaagacggagatggacatcttcctggcctccaacaccgcgcagcaggtgtgcgacttcaagatcaagggcagctacttcgagaggtcgtgcgccttctacctcggcaactccagcagcatgatcgcccagatgaaccgccagtttaccgtcaccaatgtgctgcttggaagggacacgtttggcgtcactgtgttcccgcacgttgactacgtgttcgtcgctgctcttgttgtgatactggatgagattcatagggaacggtccgactgaggaacataccacaccacaccaccaagcttctccaccgttgctcgaccatgctatgctatgtatcatcatcacaggttattcttgtcaattatatactttccatgtatgtatatgtaagtattaatgagttaatacactatctcctgatgtataagtttttcttcatccatttgaatatagacataaaaatcaaatgactattattttgggatgaaaaaaaaaaccc

SEQ ID NO: 1136 - DNA, 1035 bp, Zea mays
  Clone ID: 700102279_FLI
gaaccgactcctatggaggaccatgatgtgaaggaaagtgatgatggtggtgagggagagaatctcccccctggttcatatgtagtcttgcaattggaaaaggaggagattttagcaccacatactcatttctgcttgatctgtggtaagggtttcaagagagatgctaaccttaggatgcacatgaggggccatggagatgagtacaaaactccagctgctcttgccaaacccacaaaggattcaggtgcagatcatgcacctgttacaaggtactcatgcccatttgtgggttgcaaacggaacaaagagcacaagaagttccagcctctcaaaacaatcttgtgcgtgaagaaccactacaagcgaagtcactgtgacaagagttacacctgcagccgttgcaacaccaagaagttctctgtcatcgcggacttgaagactcatgagaagcactgtggtcgtgataaatggctctgttcttgtggaacaaccttctccaggaaggacaagctttttgggcacgttgcccttttccagggccacacacctgcgcttcccatggaagatgtgaaggtatcagaagcatcagagcaacctcaggacagtgagccgatgaatgaaatggcgaggagcaatgtgtatagcttcccctgtagttcgtctgatggtatatcgaacctcgacatgaaaatggctgatgatgtgcgtggttatttctcgccgctgaactttgatccttgctttggcgcgctcgacgatttcactcgccctgggtttgacatctctgagaaccccttctcattcctgccttcaggatcttgcagttatgggcagcagaacggagatagctgatggatgccgccatcgatgatgacgacaacagcactgccaacctttatttatgttgttgcatgatgctagcttggttcttcctctgttcaagagccatttgaggttatgcctttatatttttccctaaatgtacttacgtttgtggtcattaataatgatcaaggacttctagcatttctt

SEQ ID NO: 1137 - DNA, 922 bp, Zea mays
  Clone ID: 700102287_FLI
ggggaaccccgccatcaccaacctgccgaggaaatggaacgtgtgcgtgatcggctcgcacgacctgtacgagcacccgcacatcaacgacctcgcctacatgccggccgtcaaggacggcaagttcggcttcaaccttctggtgggcgggttcatcagccccaagcggtgggccgaggccctgccgctcgacgcctgggtcgccggagacgacgtcgtccccgcgtgcaaggccatcctcgaggcgtacagggacctcgggttcaggggcaaccggcagaagacgcgcatgatgtggctcatcgacgaactcgggatggaggtgttccggtcggaggtggagaagcggatgcccaacggggtgctggagcgcgccgcggcggaggacctcgtcgacaagaagtgggagcggcgggactacctcggcgtgcacccgcagaagcaggaaggcctgtcgtacgtgggcctgcacgtgcccgtgggccggctgcaggccgcggacatgttcgagctggcgcgcctcgccgacgagtacggcacgggcgagctccggctcacggtggagcagaacgtcgtgctccccaacgtgagcaaccggaggctggacgcgctgctcgcggagccgctgctgcagcggcagcgcctctcgccgcagccgtcgctgctgctccggggcctggtggcgtgcacgggcaaccagttctgcgggcaggccatcatcgagaccaaggcgcgggcgctgcaggtggcgcgggaggtggagaagcgcgtggccgtgccgcggccggtgcgcatgcactggaccggatgccccaacagctgcgcccaggtgcaggtggcggacatcggcttcatgggctgcctcaccaaggaccgcgacggcaaggtcgtcgaggccgcggacatcttcgtgggcggccgc

SEQ ID NO: 1138 - DNA, 1589 bp, Zea mays
  Clone ID: 700102311_FLI
cttagcttttccatctccttttctcctccaccgaaaatgattcgatttggcgatttttttctctctctctctcactctaaaaccgcccattttttcagctataaatggccccctcgtccatgcttcaattccctttccccctctccccgaactcccttgctaggttaccacgttcttctgcccttcaggccctccctcatctgatcatctctctcactctttcagtagcagcgcagttttgttactgacacacgccccctgtcctgcctgtctgtgttgtcctgatagtactagcaaagtttggagactccatccaacctcttgtctctgaaacttggacttgttgccgatcccaaggggaggttctgccaaaatttcggcttctgaacatccatttccagaggggatcgagggaggttctgccaaattttgctcctttgatcataagtttcccagggggaggttctgccgaaatttcatctcctgtgctgtgacgaccatcagctttccagggggagagggggagattctgccgaagttttgtgggctgaccatcagtcttccaagaggaggttctgccgaaattcccttctctcatcatcacttctccaaggccaagcagtcctcctggtcctgccgaagtgttctctgaacaagagggcatgcatgcactccttcttgtccctgatgttagactagctagctagcactagcagagactgaggccgcagcgtctgttgagaattcagatgttgttgttgctcgtcctgtccgagcacctcctcctgtccggatttatgatcggttccgccataacccgcctcgtccagtccttctctgtcgttttcctctactggttctatgtcttctcagtgagctgccactgccagtagtgccagtagttgatctcacctttttcaagttattaataactcggcactataacaaagaggtagctagctatgtcaagtggaagctcgtttgggtcgagccagtggactcagagatccaggtcggcggaggatgacgtggacctggacctccaggccgagatggagaagaggaggaagcgaaggaaggagtcgaaccgagagtcggctcggaggtctaggctaaggaagcagcaacaccacgacgacctcacgtcacaggtagatcagctgaagggccagaacaagcagaactctgtcctgcagacccagaggatggagctggccagcaggctgggagccctgaccgagatcctatggtgcatcagctcaagcaccggcactgctgctcctacgaatccagccatggcggacggcatcacgacgacatggagctggagcgacgcctctggtgatattcttggcgccagcgcatggaaccagcagcagcagcccatagacgcgtaccggtgctaatagagataatgcggaggaaaggaggcttgttgcttctccatcgtttgttttggaggcgacggcgacgttttggtttcttgattgcggacgagcctaaaggatggacaatggcaactttgccttggctttctgtgacgtgaatgcagcgcagttgttctcttgtagttgagggagtatatatag

SEQ ID NO: 1139 - DNA, 979 bp, Zea mays
  Clone ID: 700102324_FLI
gacgcagcgcatgcaggtagcaatggcgggggagacgaagaagggcctggtgctgctggacttctgggtgagcccgttcgggcagcgctgccgcatcgcgctggcggagaagggcatcgcctacgagtactcggagcaggagctgctgggcggcgccaagagcgacatcctcctccgctccaacccggtgcacaagaagatccccgtgctcctccacgacggccgccccgtctgcgagtccctcgtcatcctcgagtacctcgaggaggccttcccggaggcctcccccaggctgctccccgacgccgcctacgcgcgcgcgcaggcccgcttctgggcggcctactccgacaaggtctacgaggccggcacgcggctgtggaagctcaggggcgacgcgcgggcgcaggcgcgcgccgagatcgtgcaggtggtccggaacctcgacggcgagctaggggacaaggccttcttcggcggcgaggcgttcgggttcgtggacgtggcgctcgtgcccttcgtgccgtggctccccagctacgagcggtacggggacttcagcgtggcggagatcgcgcccaggctggcggcgtgggcgcgccggtgcgcgcagcgggagagcgtggccaggacccttcacccgccggaaaaggtggacgagttcatcaacctgctcaagaagacctacggcatcgagtagtagagcggactactactagcagaggagatggtaccggccgtacgtacgtggctgccatgcagtttttgtttcggtttgtttaaacgggactccatgaatggatggaactcttcttgggctccgtgtgctacatacacatctgtaaaggtgaactaaaatcacggtaaaaactcggaaattagtttgtaaagggtccagcccccctcctttataaatagagaggtatacggctgatttgtaatcatcaatcgaatcaatacaacatctatttcgcatttt

SEQ ID NO: 1140 - DNA, 1021 bp, Zea mays
  Clone ID: 700102335_FLI
gctcctcctccactcctcgccttcctcggtcgcatcaagaacacgagcaggaaggagaagaggaggagtcctatcagagccagacagccaatcagtatctgtaccattaccgttcgggcaccagattaccaaaatcctgcagaggggaatggcgccgagcagctacgagatggcggcttccaccctgctgtgcggcgaggacagcagcagcatcctggacctcgaagcggggggccaggaggaggaggaggtgctgctggcgcggagcaggacgcgcggggagcctagcgtggtcttccccgtgccgtccgaggactgcgtcgccggtttcgtggaggcggaggcggcgcacatgccgcgggaggactacgccgagaggctgcgcggcgggggcacggatctccgcgtccggacggacgccatcgactggatttggaaggttcacgcgtactacggtttcggccctctcaccgcctgcttggccgtcaactacctggaccgcttcctctcgctctaccagcttccggaaggcaagtcttggacgacgcagctgctgtccgtggcgtgcttgtccctggctgccaagatggaggagacctacgttcctccgtctctggacctgcaggtcggggacgcgcggtacgtgttcgaggcgaagacggtgcagaggatggaggtgctggtcctcagcacgctcagatggaggatgcgagcggtcacccccttctcgtacatcgactacttcctccaccggctcaaagacggcggtgcgccgagcagacgcgccgtcctccgatccgcggagctcatcctgcgcgtcgcgagaggaacgtgctgcttgggtttcaggccctcggaggtcgccgcggctgtcgccgccgccgtggccggcgaggagcacgccgtggatatcgacaaggcttgcacccaccgcgtgcacgaggagagggtgtcgcgatgcctcgaagcgatccaggccaccgtgcctgcacagccgctgaaagctgaaggcccgagcggc

SEQ ID NO: 1141 - DNA, 1121 bp, Zea mays
  Clone ID: 700102348_FLI
tcggtttataacccggtgatcgagttcctgtgcagcaatggtagcaccgccaaggccgagacattcttcaggcagctgatgaagaaaggtgtggatgacaaggctgcattcaacagtctcatccgtggacatgcaaaagaaggtgtgccagaggcagctcaggagattctcgccatcatgacacgccgcgaggtcccaactgaccctgaatctcatgcactgctagttgatagcttcctgaagaatgagccggctgatgcaaagacggcattagacagcatgatgcaacagggtcacttgccaagcccagctctgttcaagtctgtcatggaggcgctgtttaacgatggccgggttcagaccgcaagcagggtcatgaagagtatgattgagaagggagttactgagaacatggatgtggcacacaagatactggaagctctattcacgaggggccatgtcgaggaggcaatcggccgtgtcaatctgatggtggaaaatggctgcatgcctgatctggataagttgctggtcggcctatgtgacaatggtagagtgatggaggcgcagaagctggctgattttgcgttggacagggactttgatgttagcttctcgacctatgacagagttctggaggccctgtacgccgaagaaaagacgttgcctgcgtactccatgctgtgcaagatcaagaacaaaggaggtgttgtcagccagaaaggctgcgatgacttgatggagagcttaaaatccgaaggatactcaaagcaagcagatattctgtctaggattttggcagagaatgcacagtcgacgcccaagaggggcagaagggttgccatgggtgcttagtgagctttgccagcttgtttagagcatctgtgtctttttttttacttcaagaaagatgcgatttctttcttttcatcgatgcttcttgagctatttatcaagtaggggattttggtcctatgggacgataagcaagggcgtttactttctgtttggaggatccctgatctgttcgtcttggcgagaagaaacatatgcaataatagacaaagatgtacctcctattatgagtggtgttgtcaaatttagaattaattacttttaac

SEQ ID NO: 1142 - DNA, 556 bp, Zea mays
  Clone ID: 700102381_FLI
ggggtggtatgttctcgtgcagccagccttaatttgtcgcatgtcttaatgcaggttgccaaatggacggccatttcctccactgttcaactttaaacaggaactagcaaatgcctccccagagctcatcaacaggttgatcccagaccatgctaggcggcatcttgggctcacattattgcccgctactggaccataggcgaaggctctatggtggtgcggaaggcaacctgcattcaaggtgtagaatctgacaattattggaaggtcaaacatgagctggcgcgtaaggagaggtggtatgttctcgtgcagccagccttaatttgtcgcatgtcttaatgcaaaaatctgatttttgcccaagtagtgagagggaagggggtggtcggtgtattgttaagctattgaaggaattcgatccctgctattgtgttactttctccaacgtttaaacgttgtagtgcgcctgtaagtgttccatatatcccctgttgtcagtcagtgtaattctgtaaatgttattaatgggaaattatttcgtgcttttccaacc

SEQ ID NO: 1143 - DNA, 1076 bp, Zea mays
  Clone ID: 700102428_FLI
gaacgaggggcgctcgtggcacggcatcaaccaccaccacccggccacgttcgatacgctcgccatggacccggtgctcaagcagtccgtcgtcgacgacctcgacaggttcctgaagcgcagggactactaccgccgcatcggcaaggcgtggaagcgcggttacctgctctatggcccgcccggcaccggcaaatccagcctcgtcgccgccatggccaactacctccgcttcaacctctacgacctcgacctctcggaggtgcgcctcaactcggcgctgcagaagctgctcatccacatgcccaacaagtcagtgctcgtcatcgaggacatcgactgctgcttcgacaacgctgccgcgtccaggaacggcctggacatggaccccaactactcatcgggatcgggatcgggatcggattcctcggacgaaaactgggcccagccgcgagtcgctcccccgaaggccaggggcatcaccctgtccggcctgctcaacttcatcgatgggctgtggtccacgtgcggcgaggagcgcattatcgtcttcaccaccaactacaaggaccgcctggactcggcgctgctgcggccgggccgcatggacatgcacgtctacatgggctactgcgggtgggaggccttcaaaactctggccagaaactacttcctcgttgacgaccacaagatgttcccggagatacaagaacttctctcggcggtggaggtgacgccggccgaggtctccgagatgctgctgcggagcgaaaacggtgacgtggccctcgggattcttgcagagttcctccgggagaagagacggagggggagaaaagaaacaaaggaggagaaggacgcaacagaggacaaggatgaggaggaggtagcagagaaagctgcgtagcatagtactgtattctttaggtttcctccatggatcatttttatttctggagaaaggaatcgaaataggtcccgggaataaatagctaggccataggaacaatttattaggccttctcgtcggtactgttatcctatcgctcggttgctgcatgtttttgctgcacgtc

SEQ ID NO: 1144 - DNA, 1052 bp, Zea mays
  Clone ID: 700102440_FLI
gcgcgcacttcctctcctggcactcgggccgccctgcccacgcctccgagctcctctccttccactcctcagaatacatagaggagctcgtccagacgaacgccaccggagccaagaagaagctctgtgagggcacgttcttgaacccgggctcctggggtgcggcgcttctagcggccgggaccacgctctcctccgcgaagcacatactagacgggcaggggaacctggcctacgcgttggttcgcccccctggccaccacgcgcagcccgaccacgccgatggctactgctttctgaacaatgccggacttgctgtgcaactggctctggattccgggcgcgcaaaggtcgccgttgtggatattgatgtgcactacgggaatggcaccgcggagggcttctatcggacagacaccgtgttgacgatgtctcttcacatgatgcatggttcttgggggccatcgcatccgcagagtggctccgtcgatgagattggtgagggcaaggggcttgggtacaatctcaatatacctttgcctaatggaagtggagatgctgggtatgaatatgcgatgaacgagttggttgttccatcgattgataagtttcagcctcaactgttgtttcttgtggtcggccaagattccagtgcgtttgatcccaatggaagacagtgcttgaccatggaaggctacaggaaaattggacaaataatgaggcgcctggctgatcgccattgcaatgggcaaatactggttgtccaggaagggggttaccacatcacttattcggcatattgtctgcatgctacactggaaggagttttggatctggaagccccgctgcttgatgacccaatcgcttattatccggaggatgataaatacactatgaaagtcgttgacatgataaagagctactggaaggaatcggttcctttcctaaaggaaatttagaggaaataatgttcgcgccctcaatgttcaaattgcaggaaactccacattcctggacatcttcaattgaattgggaagaacattgcacgtct

SEQ ID NO: 1145 - DNA, 433 bp, Zea mays
  Clone ID: 700102505_FLI
gcctctgatgatcagataaacagcctgccactatcagtaatcgagggtgaaggtcgttccgatgaaccctgcaatatatgcttggactgccctgctgctggtgattcactccggcgtttgccatgcatgcacaagtttcacaaagagtgcattgacaggtggctcgggatgaagatatggtgtccggtttgcaagtcaaatgtgttctcccagtaggccgtgagcatctcttatactttttggagcagcatcgaagctagattatagttggctgatacgaggcattgttacggctgcagtgtgtacattgcgttcttgacttgtgctctcttctgctccgtggggagcatttgaatgctctttttccgcggagagtttttttggctgtgagagaaggcacggaaaacctcattctgctattctcatttcttgt

SEQ ID NO: 1146 - DNA, 104 bp, Zea mays
  Clone ID: 700102549_FLI
gatcccattcccatggctaggctaattagagaaggagagagagaaaactgctattagttgtacttgaagtgatcgattttcatttggttgattgattcatcaac

SEQ ID NO: 1147 - DNA, 1241 bp, Zea mays
  Clone ID: 700102553_FLI
tggcgcgcccgtgcactcgggtggcgcgggtgagccggggaccaagaaaaagcgtggccggccaagaaagtacggccccgacggctccatgtcgctggcattggtgcccgcatccatggctggggagccggcgccggcggctcttggagcttccggtcctttctcgcctaacggcccgaaggcgccgaacactgcgccgtcagcgtcgccggacggcgcgaagaagcggggccggccgaagggctccaccaacaagaagcacgtggctgcgctcgggccagcgggggcaggttttacgcctcatcttatttttgtaaaagccggagaggacgtatcggcaaagatcatgtcgttctcgcagcacgggacacgcgcggtctgcatcctttcagcaaacggcgccatatcaaatgtgacgcttcggcaatctgccacttcgggtggaacggtgacatacgagggtcgtttcgagatactgtctctgtccgggtcgtttcttctgtcagagaacggtggccagcgcagtcgaactggtgggctcagcgtttcgctagcaggccccgacggccgtgtcctgggtggctgtgttgccggactcctgacggctgcttcaccggtacagatcgtagtggggagcttcgacgccggtggaaagaagcagccgaagcagcagcagcagcagcagcttgctccgtcaccggcgccactaaatctcgcgccgacgggcgtggcggcagggccgagcagcccgccgtccagaggcacattgagcctaagcgagtcgtccagtggcgccccgccgagcccgccgcacgcaggggccagcggtggccatgggcagcagcagcagcagccacagccaggtggcttctccggtctgttctggaaatgacgagacccccggacaccgtctgaccgtggtagaactggcagaaaggactaaaggcgcgtgaggcactcgtcgaggccgaagctcactcggtgagaagcagcggtagcttgtaggtggtgtcaagactgtgtagctcttgctgttgctgtaggtgtaaatcgtgcgttgtgattgtgaggtggttgcttattgtctgtcgtctggaatggatgccgtgtactgaacctgtgcccccaatgcagcatgtcggaagttcttggtttcttctgcttgggtgcatcggcttgccgcacgatatgcatccatgcccataataatacgtgtatagatccaccttgttgtgaaggtc

SEQ ID NO: 1148 - DNA, 933 bp, Zea mays
  Clone ID: 700102562_FLI
agcgcttgaaacccaactccatctcagaggttaatatccacattccccagaggttagcgatttacagcaaacgttggcaggcatttgtcataatacacatttacaatgaacttaataaaactgtcattgctgttaccagccattcacagcacaaacaacattcccaccttgtcagaacggactcaagggagccgtaaaataatgcctagtcctttcaagcagtcatctataactgtcagccttgtacacgtgctagcatcattcatcatctgacaggcataccacatctatctcggaaccaccatttgtagcagaagcaatcgccccaggcgaattactgctggcaggagcaatcaccctaggtgaatcactgatcaacccaagactggttgtagttgtagcaggagttgttcccctaggcacatcactgctcaacccaagactggctgtatttgtagcaggagccgtacccctaggcacatcactgctcaacccaagactggccgtatttgtatcaggagctgccctaggggcatcactgctcaacccaagactggctgtatccttagcaggagctgtagacgcatcattcaacccaagattagctgtaagccatgcatccagcgatagggaaccagaatctggcagctgcatgcctgtagggatggaaggcattgttgcattcgagcctttcggtgccccggcttgtaaagttgggttaggagttggtggcacacgttgtgccaggtgactaggatgcaagcttgagggtaatgaggttgaagggagaacagagtgtaaacttgacaaggctgaggctgctaggggtcccacatgtatatctgatggggatgtgcttgccgccagcactggttgtgtccttgaggacattgcatccacactaattgctggcgattgctgctgatttccagc

SEQ ID NO: 1149 - DNA, 1758 bp, Zea mays
  Clone ID: 700102563_FLI
caagaatacaagcagctgtagaccacgaaactctgcttcgatagcaggagcagcagagagagagacgcacgccggctatcagttcagttcttccgggcatctctcaactcaaggaggaggagagagagacgacttggctcttcttcctctccggcgcggcgcggcgcgtgctccaggaacaagtgtcgtccaccagatccaggctcggcatgttcgtgatcgaggacaagggcggcgccatcgcgctgatgctggcgtcgctcctgttcctgggcacctggccggccgtgctcaccctgctggagcgccggggccggctgccgcagcacacgtacctggactactccatcaccaacctcctcgcggccgtgctcatcgcgctcaccttcggccagctcggggacagcaggcgcggcatgcccaacttcttcacgcagctcggccaggacaactggccctccgtgctgttcgccatggcgggaggcgtcgtgctcagcgtcggcaacctctccacccagtacgcttgggcctatgtgggcctctccgtcactgaggtcatcagctccagcatggtggtggtcataggcaccacgctgaactacttcctggacaaccgcatcaacagggcagagattctgttccctggtgtggcgtgcttcctcgtagccgtcatccttggctccgctgtccattcctccaatgcagctgacaatgagcagaaactcggtgcctccacgaatgcctacaaactcgggacaagtgggactgtggaaccaagcaaacaagccgtagacagagatgctcccaaagacttggaggagagtggagcctctggaatccggcaacctgacaaagctgaggcaggcactgcagagtacctcattgagcttgaagaacggcgatcaatcaaggtattcggttcaaacaccttcatcggtctggggatcgtcttcttcgcgggcgtgtgcttctcgctcttctccccggcgttcaacctggccaccaacgaccagtggcacacgctcagggacggcgtgccgcacctggtggtgtacaccgccttcttctacttctccatctcctgcttcgtcgtcggcgtcggcctcaacgtcctgttcctgtaccgccccatggccggcgtgccccgctcctccttcggggcctacctcagggactgggacggccgccagtgggcgctcctcgccggcctgctctgcggcttcggcaacggcttccagttcatgggcggccaggccgcagggtacgccgccgctgacgctgtccaggccctgccgctcgtcagcaccttctggggcgtactgctcttcggggagtaccgcaagtcgtcgcggaagacctacgtcctgctcggcttcatgctcttcatgttcgtcgccgctgtcgccgtgctcatggcttcgtcaggtcacaggagcacagagtgaattgcaagtcgtgttcgtcctctgcttgcaagcccttcctcttgcgattgatccacggaaagatccatcgtcttcgtgaagcaggggaaatccattccttccagccattaatgagatcttcagaacaatggaatggagatgtacaaaaaaaatggttgttgtatgattgatcaaatgtatagaactatttatattctttccaagacaattggctgataggataggaactgttccaggggtggaaaaaatctctatctttatgaacagggtaaaagcaatgttcagaaaaaaagtagtttgtgcctagtatgac

SEQ ID NO: 1150 - DNA, 1312 bp, Zea mays
  Clone ID: 700102592_FLI
ggctgccaacagcaacgaagccgcaccaggccccgcactgcccatggacgcacgcctcccggggctctcgtgtccctgtccgtctcccgtttgcggcctccacagcaacgcggcgcgcggggtggcggtgctctcgcgatcctcgtgtcgattccagcggcgggggtgccattccctcccctggccgttgcccgcgcctcgcggtcgcgcaccggaaccggagccccgccgcgaatcgagggttgcctccgcctcgccccctcctcccgagactcctagcggcaggaattaggacgagggtaacaggcgacagaggctgcgaaggacgccccttcgtcaaatgcgccggcgaccgatccgtggaggagcagccggagcacgcaggaggttagtctagttgaagggcaagctttgaaaatgtcatccactgtgccgaagtcatcaaatatcttctggcatgattgcctagttggcaagactgatcgccagaagctactcaaccagaaaggctgtgttgtctggatcacaggccttagtggctcaggtaaaagtaccttggcatgtacattaggccgggagctccacacaagagggaagcttgcatatgttcttgacggtgataacttaagacatggtctgaacaaggatcttggctttaaagctgaagaccgtgctgaaaatataaggagagttggtgaagtagcaaagttattttcagacgcgggccttgtatgtattgcaagtttgatatctccatataggagagaccgtgaatcttgccgtgcattgttatcggatggtagctttattgaagttttcttgaatatgtccttggaattatgtgaagcaagggacccaaagggcctctataagcttgctcgtgctgggaaaataaagggttttacaggaatagatgacccttatgaagcaccactgaattgtgagattgagatcaaggaaatagatggtgtatgcccttcgccttctgacatggcggggcaagtggttacttaccttgaggagaaaggcttcctgcacgagtaggctgaatcgaagctacattccgggaaggtttcaatcagactagcgcagaataagtcaaaagcgctgccagttaccgtatggttacatagattgatctggatgcctagtatttttctttccgcgcttgctctaccacaagttccattcagatgagccaagatggttcctaatttctttgacctctggaatagattacctgtaatgcaattctgatgacagcttggggcagtatcgatttgtcacgggaaggtacgcctaatgttgagag

SEQ ID NO: 1151 - DNA, 1036 bp, Zea mays
  Clone ID: 700102627_FLI
agcagcgtgcgtccaggatgtacccgtaccgcatgagcaacgtggcgatcggctacctgaacctggcgacgctgctggcctcgatcccggtcatcggcgcgggcctctggctggccaagggctcggcaacgcccacgtgctcctccatccttcaagcaccgctcctcgccgtcggcttcgccgtgctgctcgtgtccctcgcgggcttcgtcggcgcctgcttccacgtggcctgggcgctgtggctgtatctcgccgccgtgatgctcctcatcgccttcctcctcggcctcaccgtgttcgggttcgccgtcaccgcaggcggcggcggcgagcaggtgtacggtcggccgtaccgggagtaccgcgtcgccgactactccccgtggctgcagaggcacgtgcgggacgccaggtactggcgccccgcactcgcctgcgtcgtcgggtccagggcgtgccccaagatccacaactggactcccatggactacctccagcacgacctcacgccgatacagtccggctgctgcaagccgccgacggcgtgccagtacagcgggggcgtggccgtcggggcgcaggacgaggactgctaccgctggaacaacgccccgggcgtcctctgctaccagtgcgactcgtgcaaggccggcgtcatggagcaggtgcgccaggactggcacaagatcgccgtgctcaacgtcgtcgtgctcgtcgccctcgtctgcatctgctcctgcggctgctgcgccttcaggaacgcccgccgctccctctccgagtacccgtacggggtaaaccaaatgtccaagattgacccgcgctgggactactactggtggcgatggtggcgtggtagaagagaacagctctactaggctagctctagcttctcaatgcttgtatgatatcttagctcctgtcttccatcgaaaagatgaaataatacttgagagctgtgttagccccctatggtgctctacttgtttctagttgtacagcttcctccatgtctgcataattaagcttctgt

SEQ ID NO: 1152 - DNA, 326 bp, Zea mays
  Clone ID: 700102661_FLI
atttttattggcacaagaccgctataggttgtttatgtgctgaaggtaggctgatgcctatctaacatttagttagctaatagtttcatgtgagagacatgctgtatgatgtcgtcagtgagaaacagccaaacaggtcctaagcagctctggtgttctattttgcagctcatacgttaagcctgagcttttactttaacaactgttgtctctgatttgttacttgccaccaaaataaaacagtagaatgtaactgggtagtggtcccttggcatgtaaactttgattcagctgattacaaagctttctgactgcattctggatcc

SEQ ID NO: 1153 - DNA, 1202 bp, Zea mays
  Clone ID: 700102668_FLI
gtgagaggtccgcagcaaaggaaagcaaccagcaaaccatgtctgatcttgatgtgaccatggctgaggccaatacaagtcacccacggaacagtacaccaagtgccaatcctgcatactacagaaatgtaacatttgtggagggcttttccaaaacctctgttgtcaagcatgcatctgatgtcaaagggaattctataaaggttttgaactgccatgattctgttatctacatattagcaccgctgaagtatgctactgtgtacggttgttctgatgctacagttgttcttggtgctgttggtaaggtagtaaaagtggagcattgtgaaagagtgcatatcattgcagctgcaaaacggatttgtattgccaactgccgggaatgcatcttctacataggagtaaatcaccaacctcttgtgttgggggacaaccataaattacaagttgctccattcaatacgtgctacccacaactgcatgaacatatgatacaagtggctgtcgatcccagtgtcaacaaatgggaccaaccttttgtgttgggagttgttgatccacatgattcattatcccatcctgctggagtttcagatgttaaagctgaatcagcaacatgtctggatcctgatctattcaccaattttttgattcctagttggtttggggatgaaaatcaagggcctacaaactgcaatcctttcccactgcctgaaatttatgggacatcccaaagcaaaaagatatccaaaagatgattcgggagctgcagcttgatgagaaccggaaaagggaattggcaactgcccttcacgttcagttcaaggattggttatacgcttcaggcaatatccgccagctctactgtctacagggcgattaacgatgggatttgcaagactgactacccttttgccgactcctactccaaaacattcgacaattgtcgaaagctgaccttccttccctgggagagaggattcccacccgcgcagaaggatgtgaagatgtactgttacctacttttttacagattcatttgggtatattccctttgctgcgagttggaggtactaattaggatgtaatctccaagcctactcatttttttttggcccttgataacgtccacgagtatgtaatagggggactgatggatcatacgttgttgaataaacatttcttcatcccgttttgct

SEQ ID NO: 1154 - DNA, 1301 bp, Zea mays
  Clone ID: 700102692_FLI
gttttttcagtgaggatagcgttacatcaggtgatctggttgtgaaggatcaggaatttattgaagctacaaaggagccagggcttaccttcatggttgcaaaatttgatggcattcttgggctaggctttcaagaaatctctgttgggaatgcaacaccagtgtggtataacatggtgaaacaaggtctcatcagcgaccctgttttctctttctggtttaaccgacatgctgatgaaggagaaggtggtgaaattgtgtttggtggaatggattctagccactacaagggcgatcacacgtttgtcccagtcactcggaagggatactggcagttcaacatgggtgatgtcctggttgatggaaagtccactgggttttgtgccggtggctgtgcagccatcgcagattctggaacttccttgcttgctggccccacagccataattactgaaatcaatgaaaagattggtgctgctggtgtagtcagccaggagtgcaagactgttgtttctcaatatggacagcagatcctagatcttttgctagctgagacacaaccaacgaagatctgttcccaggttggtctgtgcacttttgatggcactcatggtgtcagcgctggaattcggagcgtagtggatgatgaagctgggaaatcaaatggtggtctcaagagtgatccaatgtgcaatgcctgtgagatggctgtggtatggatgcagaaccaacttgcccagaacaagacacaggagctcatcctgaactacattaatcagctttgcgagcgtcttccgagtccgatgggagaatcagctgtggactgtggcagtcttgcgtccatgcctgacattgcgttcaccattggaggcaagaagttcaagctgaaaccagagcagtacattctgaaggttggtgaaggacaggctgcccagtgcatcagcggattcacagctatggatatcccaccaccccgtggccctctctggatcttgggtgatgttttcatgggagtctaccacaccgtcttcgactatggcaagctgagggttggcttcgcagagtcgacctagggatatggtttggcagcaacccgtccagaggcaaacgcgtaatttgtgtgtttatgcgaccggcgatgtgtgtatatatgctactacatgtttagtcatgctttccgagacctgagacaacgcccgtctgttttaacgtggcgcaagaataattatggttctcgatgtattctccgtacacaaaggcgtgtctgatgcaatggtgaccatcttgcggttgcgtgtttg

SEQ ID NO: 1155 - DNA, 770 bp, Zea mays
  Clone ID: 700102725_FLI
gcggaacggccgggccaccagcgcgtgcgatttcagcggcgcggcctccatcgtctaccaggcaccagccgtcacttgcagcagcgcgaagccaagctggtgcgtcgccaagccaggggccgggggcgcacagctgcagcaggcgctggactacgcgtgcggccacggcgcggactgcagcgccatccagtccggcggctcctgcttccagcccgacaccgtggccgcgcacgcctcgtacgcgttcaacagctactaccagcggaacggccgggctagagtggcgtgcgacttctccggcgccggctctattgtttaccagcaacccagcttctgcgccgcgacggcaagctggtgcgtggcgaacccgggtgtcggggacgcgcggctgcaaacggcgctggactacgcgtgcggccatggcgcggactgccgcgccatccagcccgggggagcgtgcttccagccggacaacaaggcctcccatgcctcgtacgcgttcaacggctactaccagcgcaacaaccgggctagagtggcgtgcgacttctccggcgccggctctattgtttaccagcaacccaaggtgggaaactgtgtgcttccatcgaacgccggctgatcaactcgagaaacaaaactacatcacatttagcttgcttgaggcgacgatatgaagatgctaacatatatctcgatcagtatttctgggatgggaataaattttccatcgttctgcgtggcaaactattatctaataaattattaat

SEQ ID NO: 1156 - DNA, 499 bp, Zea mays
  Clone ID: 700102727_FLI
agctgctgctggtcgccggcctgggcggcggcttccagtgagcttctgcgtgtgcgtggctggtgtttgggcagcaggccacgcgaatccggtccgtggcaaggcgaaaaacgtcctcatgtcatgtgcggtgcggcacaccccgcccggtcggtcagacgcgtgaccgccgccatacctgctcgtccttcactcaacaactctgcagcagtcgtttgatcgtgtctccgtcggtgaaaagagaaaccaacggcagaggagggcgcgccctggtttttacagcggctgcggctcccaacttcccaacaagtgagaaaaaaagaagaagaggcgaaacatactaagaccagccctagaaaactagctagccaagtactatgttgatctgtaggccgctttggcgattccgtcttccaaacctgtggagttgtgaatccttttgcagattaaagtaaagttcgttagcaagaactctattagatcccgtgcggtctgcctc

SEQ ID NO: 1157 - DNA, 1020 bp, Zea mays
  Clone ID: 700102734_FLI
ctactgatcgcacaggccaaacaccagaatcccatgtactccactgaagcagaggacaccgaaatggtggactccatgatgatggacgtctccgccctacgggccgccacgggggatttcgacgagagcaacaagctcggcgaaggcggctttggcgccgtgtacaagggtgtcctcccggatggcgaggagatagcggtgaagcgtctgtccagtagctcgtcgcagggggtgcaggagctgaagaacgagctggcgctggtggccaagctgaagcacaagaacctcgtcaggctcatcggcgtctgcctggggcagcaggagaggctgctcgtctacgagttcctgcccaaccggagcctcgatctcatcctattcgacacggagagtgaagagcgtggacgacgacggctggactgggcgcagaggtacaagatcatcaacggcgtcgcccgggggctgcagtacctccacgaggactcccagctcaagcgggtacatggcgccggagtacatgatgcgggggaactactccgtcaggtcggacgcgttcagcttcggcgtcatggtgctggagatcgtgacggggaggaagaacagcgacgatggctgcaacctcttggccacagtatggacgcactgggaggccgggacggtggcgcagctggtggaaccgagcagtatgggcggcagcttcccggagggcgacgtgctgcggtgcgtccacatcggcctgctgtgcgtccaggcagaccctgcggcgcggccggtgatgtcgtcggtcgtcatgatgctcggcagcgacaccgtcaccctccaggctccatccaagccggggttcttcgtcaggaacaacagcgccaacgcagccgcgtcgacggtgtcactggatcgttagctagccagcaggccatgggatcgagcccagaaattgggaacatatatttgtaccgttactctgttaccaaaatgtatgacagcagctaataagcagcgtaagctacaaagattagattttgc

SEQ ID NO: 1158 - DNA, 1246 bp, Zea mays
  Clone ID: 700102740_FLI
cttttgttgtgctgcaagatgcgacaaatcactttgatgagcagatggtcattggagttggaggctttgggaaggtctacaaagcagtgatgcaggatggaagcaaacttgcagtaaagcggggcaaccagaagtcccaccaagggctgagggagttccgtacagagattgaattgctgtcagggctgcgacaccgtcatctcgtgtcgctcgttggttactgtgatgaacacaacgagatgatcttggtgtatgaatacatggagaaaggaactctgaagagccatctttatggcggtgatatgccgcctctcagctggaagaaaagactggaaatctgcgtaggagcagcaagagggctccactaccttcacaccggttttgcccagtcaatcatacaccgtgacgtcaagtcagcaaacatactactcgatgaaaatctcttggccaaggtttctgattttggcctctcaaaggttgggcctgaattcgaccagacgcatgtgagcacagcagtgaaagggagcttcgggtaccttgatcctgagtacttccggagacagaagctgactgacaaatcagatgtgtactcttttggtgtggtgctgcttgaggtgatttgtgcgaggccggttatcgacccgactcttccaagggacatgatcaacctcgcggagtgggctatcaagtggcaaaagagaggagagcttgatcagattgtcgaccagcgcattgctgggacagtcaggcctgaagcactgaggaagtttggagagacggtggagaaatgccttgcagagtatggtgtcgagcgtcctactatgggggatgtgctgtggaacctggagtttgtgctgcagctgcaggaggcaggtccagacatgtccaacatcaacagtatgaatcagatctctgaactcccttcaaatccaaagagagttagctccctggatatcagcagtacagatcaaagccgcgtgcccatcgactactccgacatgtcaacgagtaacgccttctcgcagctaatcaatgcagaaggaaggtgaactggatagaattgttccagtcactgaaaaaaatgtttgttacaaaaactagagatgcctcttgtgtgactacccagcctatcccttctcacatatacaacaccaagttgtgaatcttattgaaattttgtttgccacttgtaactacttatgttctagaaaagggtgagtagctttattgcaatcgtcttttgctc

SEQ ID NO: 1159 - DNA, 676 bp, Zea mays
  Clone ID: 700102746_FLI
gtagctttgatgaatccccaatcactcatccgtcatatgcaaagcaatcacatccaatgtattgcttcaggcggtcagcctccgaactacaagttctttttctatgctcaaaaagatggggctgctgctttcttccttgttgaatgtattgtcaacacagcatcagcgaaggcacagctcaaaatcaaggctgatgatggaactgctgctgaggcattctcgagtttgtttcagtcagccttgtccaaatttgggctttcttgatcctgagtaatttgtctgagcgattcaccggtccacagttttttatgggtttcacagtttgccccaactccactgtcttggcttgtccagtacttgtgatcatattattggagaatcagagtagaaggtgcaaaagggtactggagttttgcggagctaaaaatcctatttgtactatttgggtgaactgtgcatttgtacatgactacatgtcacccagataaatagctgggttatttaggactgtactgtttgatgttctgggttatttaggattgtgatagtttgatgccttgatctcttctgaagggtttcgtttccttgaaggatgtagaaacaacacgcaacaacccctttcatgtatgctatttaccatttcttgcacagatgatcaataagatgtttcgtcttc

SEQ ID NO: 1160 - DNA, 1738 bp, Zea mays
  Clone ID: 700102748_FLI
tgccctctccgatactcttccttcctcggtccacctctctctctttccctctctctctcccggccctctatctccttagctgcaaagaacacgctgttcgatcgtctcgtgctagcgtggtagtctggaagcgtctccttttttttttcttcctgttcgatccagtcctgtccgtccaatccaatccaagctcctcccttcaccccaaagggacgagagagagagagagagagagagagagagagagagagaggggtcctccatggccaggcctgctgtccaccctcgtcacggcagccggccggcgctctgaactctcgagccgagtagccgactctccatcagccacgtcgcgcgcccaggagaaggagctctttaatctgtgctagcagcggccccagagaatgcggcagatctcgtcgctgctgcagggcctggcccggtcactctcggtggggagggataggaaagggaacggcgcaggcgacggcaagaccgccgtgcccgtgccggcggtgctgcggacgtcgggcaccctgtggggcgacggctcggacacgttcgccgccgtctgctcgcggcgcggcgagaagggcatcaaccaggactgctccatcgtctgggagggattcgggtgccaggagggcaccatcttctgcggcatcttcgacggccacggcccgtggggccactacgtggccaaggcggtgcgcgactcgctgccgccgtcgctgctgtgccactggcaggaggcgctcgctctcgcgtcactcatcgacgacggcgagaagaagctcggcgactgccagttcgatctctggaaacggtcctacgtggccgcatgcgccgccgtggacgatgagctgcggcgcagccgccgcttggacgcggtccaaagtggctgcaccgcgctatccatcatcaagcagggggacctcatgatcgtcgccaacgtcggcgactcccgggccgtgctgggcaccacgtccggcgatggcgccattgcggctgtccagctcaccgtcgacctaaagcctaacctgccacaggagaaggagcgcatccggcggtgcaatggtcaagtgtactgcctcgccgatgagcccggggtgcaccgcgtgtggcagcctagccgagagtcgccggggctcgctatgtcgcgcgcgttcggcgactactgcgtcaaggactgcggtgtcatctctacgccggaggtgacgcagaagaggatcagcagcagtgaccaatttatcatcctcgctaccgacggggtatgggacgtgctctccaacgacgaggcggtacatatcgtggcggggacgccggaccgggcgaaggcggccaagcggctggtggagtgcgccgttcgcgcgtggaggcgcaagcggcgcgacatcgccgtcgatgactgctcggcgatctgcctcttcttccacccgccgccgccgtcgtagacacgaaaacctgtaacgtgccgaagtccacgccaaggaggagggggcaacgaaatgcacatctcaagacagactacgattattgtgcccgtggcgttcgtagagtgcactgccgccgtccaccgttcagaaacgtgcagtttgtcacgtgagagcgacactccacgattaggaactgcagccggtgcacggccaaacaaaaagatctccggctttcacacgttaccagtcaagatgtacgagaacatcagagaaaaagggtaggaaagacgcattttgtcctc

SEQ ID NO: 1161 - DNA, 869 bp, Zea mays
  Clone ID: 700102762_FLI
gcaaaacaacagtactaggtatgtttggcaaagttaaaattacaagtttagttaattatacattatgcgaatagcacagtaatggccatatacttctttctacatatgcccccccccccccctcctggcatgtcaaatggcaagaaacaaagactgccctggaaaaggcatgctcaagaactcagtcaggagtacccatatccccagactttgccgccggagaagagattgaggcagagcacgcacgcgaccagcagcacggctgggatccaccagctgccgccgctgtcggagaacatggcgcacagtagcaggcacagtagcagcagcatgtacaaccccagcccggtgcccgcgccgctgccccactcgccgccgccaaaaccaccgccgtacccgtagccgtaccctctgtccggcctgtagtagtatatgccggcgaagtagaccacgaccagcagcaggagagctgcgagcacgatgttctggatgaggaacatgaccagcaccagcgccgccggcaccagcaccacctcgctccggttgccggccacggccagggccagcagcagcaccccggcgccgaggaccaggagcacggcgttgtccgccaccgtctcctgcacctccgtcacctgctcgtaccaccccatcagggtctcctggcagatgacccatcccagcgccgccaccacgagcagcggcaccaccggcgacggcccccggctcgccgcccacgacggcgccccgcctgggcttccccagtagctcatggtcacctctgctacacttctaccgagatatatatatatctgaatatacttcttttgttctgctgttgttctaagtaccgtcagactgctcgttgc

SEQ ID NO: 1162 - DNA, 858 bp, Zea mays
  Clone ID: 700102787_FLI
ttaggttcttgggtagtttgatgaatgatactgagcagcagcagcagcagtaattcatagtgggcggtgtgatagcagcagtgagatcgaggagaggatggaggtgttcatccacgaggactacgtgaacaagcgcaacgagctgaggagggagcagaggcgccgggaactgcagaggctgcaggtggagagcaaccccgacgcgtcccgggaggcgctggcaagccgggagagcccgaggacgccggctcagtgcctgacgccgaccggcgcgtcgccgtccagcttcagatccccgacttcgaggagcacgctgcagtcgccggccgcagcggcggggcaggctgctggttggccgtcggagcatcgccgcctctacgactgcctcaagccgtactagtaggtaggcgacgtggagtggcctcaatcctgctgcaatcacggccagacgtggcatgtcgtccaaccgaataagcgcggagacactcctgtggtcaaagcagtgcttctgttgctctgctcgtatcgcggttcagatctgtgccatggccgcatggtcaagtgaactgaggctgatctgctctgttccactgtcatatggtcacagcaatctttgattcagtttcaaggacgacgtccagaactgcccagtactgtttggcctattgtgcatcagaaattcagtaatgcaatagccatttttagttagccccatagaaaacctacctgcttcgatgctgctgctcgttagatagataggggtcttacttgtatttttctctttataaggggttttgaactcctgtatttgtatatgtatttgggctagttgcctaataaataataagtcctatttat

SEQ ID NO: 1163 - DNA, 868 bp, Zea mays
  Clone ID: 700102802_FLI
gcaaagatgggcagtgctggtgatcctgctttagctgatgagcttggtgaaggaagcactgccacaagaaccttgcttgccagctattctcagactccaaggcttggtatgacaccattgcgaactccgcagcgaactccagctgggaagggtgatgcaatcatgatggaggcagaaaatcttgcacgtctcagagaatcacaaacacctctattaggaggtgataacccagagcttcatccatcagatttctctggtgttacaccacgcaagaaggagatacagactccaaatccaatggcaacacctttagcaagccctggccctggtattactccaaggattagtatgacaccatccagagaggggcacagctttggtttaacaccgaaagcaactcctcttcgtgatgaacttaacataaatgaagtggaaatgcaggacaacactaaacttgagcttcgtaggcaagccgaactgaggaaaagcctgcgatctggttttgcttctattccacaaccaaagaatgagtaccagatagtcatgccacctattacggaagatgagaaagaagaagctgaagagaaaattgaagaggacatgtcagacagactggcacgagaaagggctgaggaacaagctaggcatgaggcattgctcagaaagagatccaaagtgttgcagaggagtctgcctaggccaccggctgtttcagtagagattatccggcaatctcttattagaagtggagaaagcagaagcagaagcacctttatgcctcctacatcacttgaacaagctgatgaactaataaatgaggaactccttaggcttcttgagcatgataatgcaaaatatcctcttgatg

SEQ ID NO: 1164 - DNA, 1024 bp, Zea mays
  Clone ID: 700102822_FLI
atttctgcagtggttagaggcacctggtttgtttttttgctgaagctggtggtacatgtgaatagcagggcctgtcttctgcctctgcttttgcttcgaagcaatggcgaatgcaagcaagcacttgcaaccttcaagtcaagcaggcaatgacaagaagtatcagggcacgctggttgcttcaccagcaaaggccatttcacctaagtgtgtgaaccgcattgtgccatcgaagcaactgatcttgggtgggggttcaataggccatgtggcatcatttctgatcaaggtcgttgcccttgaggcagtcagaagagtttctaaaacaagatgccctttcatatggaattctgttcaagcattgcagatccttgtgtatcctccatttagctggatccaaagatgggcaccgctcagatttctcgtgcagggaattcagaaactatccatgccactgttgtttctgtcagtcacaacaacagtaagtgagctgtcttccaagcatgatgatgaaccagataacaatacagaacattctgagacaccttctgaaacaaatgaattggcgtcaacttctggcacaagcgatgctgctgatggcacaaaggaaatcatgcaagagaactggcttgtgttacttttcagggagcttgagaagcaaggcatcactttgcctgagaggtttactgaagatgagttacgcagattttatgttgctgcaaatggtgactttcaaagtttactctcttcggttaagaagacaattcattggagggaaacatttcacatacttacattgcaagaacttgatagatggtctcacttagtcttttggcatgggtttgacacaatgcttcggccttgtttagtagttcgtcttggacttgcatgctctagcatacctcctcatgatagaccccgtttcgggcaagcagtaggtaatttctcaaactgttgtgtctgtaattttgtctatgttcgtgatgattattattctttatagaagggcagacctggtgcagtg

SEQ ID NO: 1165 - DNA, 848 bp, Zea mays
  Clone ID: 700102915_FLI
ccgtttttcgctgctgccggtccaaccctctcctctcacccaaacacctttttttcccacgagaaaccccggaacatccgagtttatgtccatcgaaaatctcaagtccttcgaccccttcgccgaagccgacgacgacaccggtgataccaaaaaggtcgagaatcacatccatattcgtattcaacagcgcaatggtcgcaagtctctgaccactgtcactggtcttcctgctaagttcgaccccggcaagattctgaccttcttcaggaaggaattcgcttgcaatggcaacaaggtcaatgacgaaaaggccggcgaggtgatccagctccagggtgaccaacgcaagaaggtcatggatttcctcgttgacaagaaggccggtctcggtctcaaccccgataacatcaccgtccacggtgcttaaatcgtcctcttcgcgccgccgtccccgccaccttccagcgacttggcttcacagcgtgctggtgatgagcgtcggaacgaggctgttcgagcagcctgggcatactactagtatatcttgcacaggcgcgcgtactgtcgccaccttcattatctagccgatatcgctatgcgcctgatttgtttattggtccctagcgatttcatacgatataacctcaacccccacgggtataataatccacctgtgtgcgggtagcagcgtctttgggaggtctggccggtcggatgcaatagaggatagggttagagtgagagctaccatcagcttattgggctttatttatgcacccggatctgctgtgcagcaatgcgaagcagttttacgaatgatcaatatcttttttttgtgtgtttcc

SEQ ID NO: 1166 - DNA, 2211 bp, Zea mays
  Clone ID: 700102931_FLI
tcctctgttacttctccctccgccgccactcccctcccattcaccgccaccgccaattccataccgtcctccgccacctctgctgagagcgagaagagatggcaggcaagggtgatgggccggcaatcggcatcgatctcggcacgacgtactcttgcgtcggcgtctggcagcacgaccgtgtcgagatcatcgccaacgaccagggtaaccgcaccacaccctcgtacgtcgccttcaccgactccgagcgcctcatcggagatgcggccaagaaccaggtcgccatgaaccccatcaacaccgtctttgatgccaagcgtctcattggcaggaggtttagtgatgcctctgtccagagtgatattaagctgtggcccttcaaggtcattccagggcccggtgagaagccaatgatagttgttcagcacaagggggaggagaaacagtttgcagccgaagagatctcctctatggttctcatcaagatgcgtgagatcgctgaagcttaccttggcagcacgatcaagaatgctgttgtcacggtccctgcctatttcaacgactcgcagaggcaggccacaaaggatgctggggtgattgctggcctcaatgtgctgcgtatcatcaatgagccaaccgctgctgctattgcctatggtcttgacaagaaggcaaccagtgtcggtgagaagaatgtcctcatctttgaccttggaggtggtaccttcgatgtctccctccttacaattgaggaaggtatctttgaagtcaaggccacagctggcgacacccatcttggtggtgaggactttgacaacaggatggttaaccactttgtccaggagttcaagagaaagaacaagaaggatatcactggcaacccgagggctctccggaggctgaggacctcttgtgagagggccaagagaactctgtcttccactgcccagaccaccattgagattgactcgctgtacgagggcattgacttctactccaccatcacccgtgccaggtttgaggagctcaacatggacctgttcaggaagtgcatggagcctgttgagaagtgcctgagggatgccaagatggacaagagcagcgtccatgatgttgtccttgttggtggctccactaggatccccagggtgcagcagctgctccaggacttcttcaacggcaaggagctgtgcaagaacatcaatcctgatgaggccgttgcctatggtgctgccgtccaggccgctatcctcagtggtgagggcaacgagaaggtgcaggacctgcttctgcttgacgtcactcctctctctctgggtctggagactgccggaggagtgatgaccgtccttatcccgaggaacaccaccatccccaccaagaaggagcaggtgttctccacctactcggacaaccagcctggtgtgttgatccaggtgtacgagggtgagaggacccggacccgcgacaacaacctgcttgggaagttcgagctctccggcatcccaccggctcctcgtggtgtcccccagatcacggtctgcttcgacatcgacgccaacggcatcctgaacgtgtctgccgaggacaagacgacggggcagaagaacaagatcacaatcaccaacgacaagggccgtctgtccaaggaggagatcgagaagatggtgcaggacgcggagaagtacaagtcggaggacgaggagcacaagaagaaggtggagtccaagaactcgctggagaactacgcctacaacatgcgcaacacgatcaaggacgagaagatcgcgtccaagctggctgccgacgacaagaagaagatcgaggacgccatcgacgcggccatcagctggctggacgccaaccagctcgccgaggcggacgagttcgatgacaagatgaaggagctggagagcctttgcaaccccatcatcgccaagatgtaccagggcgcgggtgccgacatgggaggctccggcggcatggacgaggacgctccggctggaagcggtggccctggccccaagatcgaggaggtggactaagcggtttgtgtcaggtctcgtgtgtctgctgcagtggctggctggcccagtcgctgctcgatttatcgtcgtcgtcgcggtgtatccgcgttagaaccttttgttggtgaacaatattatcgtggcacgcgttttaagtaatacggtattctggttcggtttt

SEQ ID NO: 1167 - DNA, 1076 bp, Zea mays
  Clone ID: 700102932_FLI
tatacattgcagagctcagattgcaacttgggcttctaaagagggagactacagacactagagatggcagcgagctttctatattgagtgatgacgagacagcacgtcgatcacttcctgagacgggggaatcccatgcttttaggaatacggaagaaagggacttctcctacgtgttcgatatgcttgttgctctgggcattcacgcagccaacgaggatgacctccttgacaactgctacttactggagtgctctgcaggccttgatttatacgatgacctcgaacagaagtacgacagcctcattttatggcctgtgcatgagaggaagctcttgtttgatatcacgaatgctgttcttggggacatgatcacctccgtgatgaacggctgctcgaagggactgatggcgaggtgctcgcctggatggaatcgggaagagtttgctgagctcgtgtggcaaagggtggtgcagctccggcaagagatagagttcaaccaggaagccctgctgttgagcgtagagtgggctggctctgaagatggcgccagtctggtcgggcgcgatatcgggaatatgttgcaagatgatctcgtacaggaaattatagctgactttctgggggcaactaaatccgccaagctccgtggctagaattgccagtgtttgcatccgaggccattgcaagcatatgcatatggattggtcgctggtgaactctagtggacgatgagccttcgatgaattgcttaaggaggggactgtaattcaaggaattcacctcatggctactgaagacatgagctaagatggcttaggtgatggtggggcatcaaacaagcagtgtcgaagtttgacctagttgtgtcatgctcgtcagctcatcaccattggccccgaactcagcaatagcgtacaactggatgatttcccccctctgaactttgaaaatattttttttcattaggttatcataatgctggaatatagatgcacaattttggtgtaaaataatctctggcggattttagtttgtttatcatgggatgcaataaggacagtgtcagttgagac

SEQ ID NO: 1168 - DNA, 1241 bp, Zea mays
  Clone ID: 700102965_FLI
gtccataatttatctcggtatcaggccaggtggaacaaacctaggcctgaaagtgcgacaattgatgaggaactggcttcgaagttgaattctatggcagctaaggaaaaactgtactgcgaaattgcttcaacggcagaatcgggatgggatttcagctctcgatggatgaggaattctactgacatgacaacattggcaaccacttacataatacctgtggacttgaacacatttctttttaagatggagctggatattggtgccttggctaaagtcgtaggagataatgcgacttcagaattttttttaaatgcttcgaaagcacgtcatattgcaattgactctattttgtggaactctgagatggaacagtggcttgactattggcttcctggtgatgcagactgtcaggaagtacacgaatggaagcctaactcacagaaccgcaacatatttgcttccaacttcgttccgctgtggctaaatgcataccattccgaattcgtacgctttgctgatgaggcaaaatcaaacagagtcatggcgagcctcaaggcatctggattacttcatgccgcagggatagcaacttccctgacaaacacgagccaacaatgggatttcccgaatggatgggccccactgcagcatcttatagctgaggggctgctgcattctggatcagaggccaaaaaactagctgaggacattgctacgaggtgggtgagaacgaactacgccgcttacaaagcaacgggtgcgatgcatgagaagtacgatgttgaggcttgtggagaatctggaggcggtggagaatacaagccccagactggttttggctggtccaatggcgtggtgttgtcattcttggaagaattcgggtggccagagggcaaggaaatagcttgttgagcggcgaagcgctcacgacagggtggatctggtcttgccggagagcaatctggttaggcatcgttcatgtcacacatgtctagctacgagagtggcgcattgccttctgcagttcgtcaagtgcgtttgtgtgttcttgtttgcttttagttgcgactaggctgtagatccttcttgtatcacaacaatatatgtactgctactgtaccggccccggcctcttgtttaatctgaaatgctcattgtatatcctcttacgaaacgcaaacacgtgctttggcacgttcgtcgtcgaaaagagaagagaatataccattttgctctct

SEQ ID NO: 1169 - DNA, 864 bp, Zea mays
  Clone ID: 700102990_FLI
gccagaaacagctctaggcctctttccagatgtaggggcctcttattttctatctcggctaccagggttctatggagaatatgttggtctaactggtgccagattggatggtgcggaaatgcttgcctgtggcctggcaactcattttgtcccgtcaaagaggttgccattgcttgaggaatcgcttaaaaagctggacacgtccagtacttttgctgtgtcgggtattatcgaccagttttcacagaggccattagtgaaagatagcagctctttaaataggatggaaaccatcaacaaatgcttctccaaaaggacagttgaagaaatcatagatgctcttgaacaagaaatctcaaatgtttcagacaaatgggttgctgcaacaatcaagtccctgaaaaaggcttcccccaccagcctaaaaatttctctgagatcgataagagaagggagaacacaaactcttggggagtgcctgcgtcgggaatatagagtggtttgccatgtcctgcgtggcaccttcagccgagacttgtctgagggatttagggctgtgctactagaaaaagacaacaagccagagtggattcctccaaggttggaacaagttcctgacgaggcagttgagcaatatttcttgagaattgatgatccccagtgggaagatctgaacctgcctgcgagacttccccaccgaagaaatattgagtccaagatttgattgaggtcttggacgaagagtgagcctcggtcaggataactcgtcaactcatgtttgaagttgtgtgcggaatgttgacgacgattgataaataataaacgcggactgaatatatgtcttataagttcacgtttatcgct

SEQ ID NO: 1170 - DNA, 1086 bp, Zea mays
  Clone ID: 700103072_FLI
aaccacccgcgctccgccaatccagagagccagccagcccgaggtcacacagcagcgagctcggtcttctcgccaggacacgaacacgaccccagcaggcggcaggcaagccacgctctctcgacggacggacgttaatcgagacatggggcgctctccgtgctgcgagaagatggggctgaagaggggtccgtggacggccgaggaggacaggattctggtggcgcacgtcgagcgccacggccacagcaactggcgcgcgctgcccaagctaagcaggcgggcctgctccgctgcggcaagagctgccgcctccgctggatcaactacctgcgccccgacatcaagcgcggcaacttcagccgggaggaggaggacgccatcatacagctccaccaaatgctcggcaacagatggtcgacaatcgctgccaggctgccggggaggacggacaacgagatcaagaacgtctggcacacccacctcaagaagcgcctggagccaaagccagccagccagcaggcgcccaagcgcaagcccacgaagaagcagcagccgcagccggagcccgagcccgtaacgacgctcgaggggccggccggagccgtgccgccggtgtcgccggagcggtcactctccacgacgacgtcgaccaccaccagcaccgcggactactcggccgcctcgtcgctggagaacgcgggcgacagcttcacgtcggaggaggactactaccagatcgacgacagcttctggtccgagacgctggcgatgacgacgacggtggacagcttcgagtccggggtgcagcaggcggagggcagcttcggcaagtcggcggcggcgccgtcgtcgaccaacgacgacatggacttctggctcaagctgttcatgcaggccagcgacatgcagaatttgccccagattatttaggcgggaaacggacctagacggtttgttatctctcggctgatgatgatattctttggcgcgcgctcacgattctttgaatctttgttctgctccgttttcggtggatgtatatatcccactgaaaccttgtgaagcggaaagcaattgcttcgt

SEQ ID NO: 1171 - DNA, 1077 bp, Zea mays
  Clone ID: 700103077_FLI
agcacggaaccgcgccgcccgcgcacgagctactgcaccagcactacccggcggtggcgccggaccagacggagtgcacctcgggcgagccgtgcaagcgcatccgggaggcggagtgcaagcccagggtgtcgaagctgcacgtgcacgccgacccggccgacctcagcctggtggtcaaggacgggtaccagtggcgcaagtacgggcagaaggttaccaaggacaacccctgcccgcgggcctacttccgctgctccttcgccccggcctgcccagtcaagaagaaggtgcagcgcagcgccgacgaccccaccatcctggtcgccacgtacgagggcgaccacaaccacggccagcccccgccacaggcgcaggcgccgcacgacggctccagccctggcgccagcaagaagccgccgtcgccgccgaggccggtcgccgccgctccggcgccgctccaccaccagcaggtccagcagcaccagcagcagcaggcggttggcgcggtgaaatgcgagccgcccgtggccgcggcggcgtcggagctcatccggcggaacctcgcggagcagatggccatgacgctgacgcgggaccccagcttcaaggcggcgttcgtcaccgcgctgtccggccggctcttcgagatgtcgccgaccaaggactgacggaacggatcggatggattgggagattggcatcgcaggagattctggatcagattgtcttcgagcgcacgccgcaatggtcaactgcgcagcgctggcttggctgtcagagcgaaacagcggtaacagagcaagacacgaggggtctgcactctgcagttgtgcaggaggaggaacagacacaaggggaggacggcgcgcggccggacatggcgtggaacagagatcgtcgtcaccgccggcgggggtgtggtcgacgacgcgacatgcgaaacactacgtgctagctagcataggaaaaaacaacatgaaatcgtacaaccaaccaatccctcgcactgttttagttgttagctgtaggcgaaactgttcatccaattgatcaaatgaaacttattttttccct

SEQ ID NO: 1172 - DNA, 629 bp, Zea mays
  Clone ID: 700103093_FLI
gtcggacttcgggctcgccaagaacgggccctccgccgggaagtcgcacgtcacgacccggatcatcggcacctacggctacgcggcgccggagtacgtcgccaccgggcacctgtacgtgaagagcgacgtgtacggcttcggcgtggtgctgctggagctgctgacggggatgcgcgcgcacgacccgaaccgccccagccaccagcacaacctggtggagtgggcgcggccctacctctccggcgccggcagcaagctcaagaccctcatggaccagcggatcgacggccagtaccacaccaaggccgcgctccgggccgcaaggctcgccggcaagtgcctcacgggcgaccccaagagccgcccctccatggacgacgtcgtcgccgcgctcgaggacatcgaggcccttcagcagcaggccgccggggggcaccgggacctgccgccgcggcctggagcgcgccggtctgccgccgtaccatgattcttcacgcggtgcccctgttgatgcagtgcagcatggtcgttaattgcttggcttgagcaagcctagctgctgattcagacagaacactagctttgattcttcagcttcgttcaactaatcgccggtgttttcattc

SEQ ID NO: 1173 - DNA, 725 bp, Zea mays
  Clone ID: 700103104_FLI
ggttcgatgaccgccgtgtcccctacaacataatgtccggcacctccatgtcgtgcccccacgtcgccggcatcgtcggcctcctcaagacgaagtacccagcttggagccccgccatgatcaagtcggcaatcatgaccaccgcgaccaccacggccaacgacggcaacccgatccaagatgagaccggcgccgtcgccacgccgttcggctacgggtctgggcacgtggaccccgtgaaggcgctggacccggggctggtgtacgacaccacgctgctcgactacaccaacttcctctgctcactgaagcccacgcagaacccgcttccgagcctccccgtcgacctcctcccgctcctggtcctgggcaacctctcccagcctctcgtcggcctcctgctcccactgttcgacgccgccggcgagccgtgcaagtgtagccagggcccgtacggccgccccgaggacctgaactacccatccatcgccgtgccgtgcctgtccggcagcgccacggtgaagcgccgcctcaagaacgtcggcgcgcccggcaagtacagggctaaagtcacggagcccgcggggatcaaggtcaccgtagtgccgagcgaattgtacttcggggtcggagaggagaaggagttcaccgtgaagatggacgtggacgtcaacgccccggcggctaatgatgactacgtgttcggcagtgttgtgtggtcggat

SEQ ID NO: 1174 - DNA, 906 bp, Zea mays
  Clone ID: 700103108_FLI
cgacttcgagtcggagccatggcccagcgtctccgaaggcgccaaggatcttgtgaggagaatgctcatcagggacccgaggaagagactgaccgcccatgaagttctacggcatccttgggtccaggttggtggtttggctcctgacaagccgctggactcggctgttctttctcgtatgaagcagttctcggccatgaacaagctgaaaaagatggctctcagggtgatcgcagagaacctgtccgaggacgagatcgcggggctgaaggagatgttcaagatgatcgacgcggacaacagcgggcagatcacgttcgaggagctcaaggtggggctgaagaaggtgggcgccaacctccaggagtcggagatctacgcgctgatgcaagccgcggacgtggacaacaacggcacgatcgactacggcgagttcatcgcggccacgctgcacctgaacaaggtggagcgggaggaccacctgttcgcggcgttccagtacttcgacaaggacggcagcggatacatcaccgccgacgagctgcaggtggcgtgcgaggagttcggcctgggcgacgtccagctggaggacgtgatcggggaggtcgaccaggacaacgacggccgcatagactacaacgagttcgtcgcgatgatgcagaagccgccggcgggtctgcccaacaagaaggccggcctgcagaacagcttcagcatcgggttcagggaggcactcaggatggcctgaccctgaacagctggttggctgcctgcctgcctgtagatgacgaacggagttccgaactgggtgagttccagtagagacggcccgaggcgggcttgagacgtgtacatgtgccatggaggcagaagttggactgctcggttccaaaacggttttgtttc

SEQ ID NO: 1175 - DNA, 1400 bp, Zea mays
  Clone ID: 700103129_FLI
aacgtcacaggaggaggagataggcacacggcgtgccgcggtgggcgaccttttttgcaccgggagataaatcgacagcaccctgacctcaagtcctcaacccgcaggccgcagctgctcccgcccgccgcgcaagcggccaagcgccgccggttcttctcgagcaattctcataaatcattgtcctcataacttgtaatgggtggaagccagtatgatgatgactgggtgttgcccagtgccgatatcactcttgttctggttgggaaacttggctatggcaagagtgcaactggaaatagcatccttggacgggaagcatttgtatcagaatattcacatgccagtgttactaatacttgtcagttgggaagcactaccctgaaggacggccgcaccatcaatgttattgatacaccagggttatttgatatgagcattacatcggacgaggctggtaaagagattgttaaatgcatgaacatggctaaagatgggatacatgcagttctgatggttttttctgccacatctcggttttctcgagaggacgcaagtacagttgagaccattaaagtcttctttggtgaaaggattgtcgaccacatgattttagtcttcacttatggagatttagttggtgaatctaagttgaagaaaatgttaaataatgcgccagagtatttgcagaatgttgttgagctatgccaaaacagagtggttgtcttcgataacgtgactgaagaccgaaggctccaagcgcagcaacttgacaaattgctcgatgtagtggattcagtttgtgcaaaaaatggaggaaaaccattttcagatcaaatgttcactagcatcaaggaggtgcatgatagagaaaaagaggtgcatacctcgggatattcagatgagcagatatctgaattgaaaaaggagattcatagaactagggatgaacagcttgcgcacataaccaacatggtcgaggaaaagttaaactgcactgtggagaagttgcaacagcagctcatggaagaacagaacgcaaggctggaagctgagaaggtggcgtacgaagctaggctgaaatcagaagcggagatccagaagctcaaggagagcctcaagaaagctcaaatggaaaatgatgagttccggaggatggcgcagagccagggcagtaaatgtgctatcctataggcattagtacttgctagaaattggtggagctatcgtgctgacgcgtctcttgtacgtagtactttctctgttccaaaaatatatagttcaatacaccttagtagagatgactacgagagtatccaaacaagacctcgtcggacatgttagcctgaagcttgcttatggacatattggatatagtttttgggtgagaacttttgaac

SEQ ID NO: 1176 - DNA, 840 bp, Zea mays
  Clone ID: 700103147_FLI
aaacgaaccaaggtcatttacaaaacactgtctccacagtggaaccagacattcgagttcctggaaaccggagaacccctgattttgcatgtgaaggaccacaacgccgtccttccaaccgccagtatcggccattgcaccgtcgagtacagcatgctgtctccaaaccaatccgctgagaaatggataccgctccaaggcgtaaaaagcggagagatccatgtaagggtggcactgaaggtatcagtaccaggttcggagaagaagaacatgctcggggcaggtccgttcggcaaggggcacaagatgtcgacacagatgagagacagcctgaagagattcacgggcttgatcgacgacggcggtgacccggaggcactggcactagccgtggcggagatggaaggcatccagggcgagcaggaagagtacgtcgaaaccctggagcgggagaaggcgatgctgttgcacaagataaatgagcttggttccgaaatcattaggacagcatctggtcctccaaggacgccgtactagttagatctgcaaatgcacacccccccactactgaatgaacacgcatttatttatcggcaggcgaagacctggttgtacgtagaactctatagtgtgcatgtacaagtgagcagtacagctcgtgtaagtaggccaggcgtgtaggaagcacaggtgtatcttgtagtgattgataaaaactgctcaagcatcaaccggctggaagcttacagaagttggtcgactttgtacacagttagggcatgtttgggaacaatgtttttttaaaaccacattttataataccacagtttactgaatgtt

SEQ ID NO: 1177 - DNA, 1380 bp, Zea mays
  Clone ID: 700103157_FLI
agattgtcaatcagctcctccacaatgaggagaaattgccctatgcattctacgttggagacgaggagctctctgtccacctgggtgcttacatgcggcagaagaacgccaatgttgaggttactctgcgcatagtatgccaaccacaagcacttttccggatcaggccggtcaaccgatgctctgccacgattgctggccacacggaagctgtaattgctgtttcttttagccctgatggaaagagtttggcgagcggttcaggtgacaccactgttcgcttttgggacctgagtacacagactccattgttcacatgcaaaggacacaaaaattgggttctctgcattgcatggtcacctgatggaaaacatcttgttagtggaagcaagtcgggagaacttatattatgggaccaaaaactgggaaccaattgggcactccacttatgggacacaggaaatggattactgctgtatcatgggagccagttcatttgcagtctccgtgccgccgctttgtaagtgcaagcaaggacggtgatgctcgcatttgggacatcaccacaaggaaatgtgttatttcccttacaggtcacactagttcagtgacctgtgtcaagtggggtggagatggtttgatttatactggttcccaagattgtttaatcaaagtatgggaaacttctcagggaaagttggtcaaaacattgaagggtcatgggcactgggtgaattcgcttgctttgagcacggaatatgttctccgtactggagcatatgaccacactggcaagacattttcaactgcagaggaaatgaaagaggctgctcttgcgagatacaagaagatgaggggtaatgctccggagagactagtttctggttctgatgattttacaatgtttctttgggaaccaacaattagtaaacaacctaaagctcgcatgactggtcatcagaagcttgtaaaccatgtttacttttcccctgatggacaatggttggcaagtgcatcctttgataaatctgtcaagttgtggaatggtatcacaggtaaatttgttgcagcattcagagggcacgttgcagatgtctaccagatcagctggtctgccgacagtaggcttctactaagtggaagcaaggattccactctaaagatttgggatattcgaacacacaagttgaaaatggacttgccgggccacgcggatgaggtgtacaccgtggattggagccctgacggtgaaaaggtggcgtctggtggcaaggatcgggtcctcaagctatggatgaactgactgacgaatattctatggatgaactgattgattattatatatctatgcttgggcgaattatatattgtagtgatgat

SEQ ID NO: 1178 - DNA, 1037 bp, Zea mays
  Clone ID: 700103173_FLI
gggggctttacaggtgtaatggttatggctgcaaaaaacggatccgtctagaccatggcatggaatgaagcttcctattcagcagcaagcaactgactgggggagatcactagcctagccttcaaactcgtcgaagtcttggaactcctagagatctgctccggcagcttcatctgagcaagggttgcaccgagggcaaccttgtgtctatataaaaagcaaagtgaatattacgcaccgggtatccaagtgacaaaaccaacacaatgcattgaaaaaggtgtgcttgcctcgaaggtaataaacccaacgcttttgtctgttgttcccaaggatggcgtaattgcagaagcaaagagaaaggccaagccagatcttgacaagaatgtgatgactgctgcaagtagacacaaaacaatgccagaagttgtaaaaaatgagttcgctataaaggtgagagataatcagaacgatgagcttaacaaaaaggtaacaaaggtgaaagcaaaggcagtctataaggatctcctgaattcaaagacgagaacaaaggcaaagccagatgttgccagtgatgagttaatagcaaaggtgatcgatcatcataggagaggtgagctgcgtttactgacagtcagtgatctgaagtgcttcctcggtgcgaagaaagcaaaggttggaggaacgaaggaagtgctaatacaaagagtgactgagctcttgcttgacaaatgcattgctattagcaactgagaagtctgaacataacaagcatgtgatgatgtgaacctacgcaaagtaccctttttttgtgtttctacttgttgcaatttgaagagccgcaatcaacaatagccgaaacactggtgctagaacaaaatgacgacagcaacttgaattgtgtgtgtgtgtgtgtgtgtgtgtgtgtgtgtgtgtgtgtgtgtgtgtgtgtgtgtgtgtgttttgcgggaacacaactataatttttcacttggattttgatacgtcaataccagaaaggcttaaagcctaactgt

SEQ ID NO: 1179 - DNA, 1132 bp, Zea mays
  Clone ID: 700103185_FLI
cttcttctccctaatagctaccttcttcctatcaggctggagttcatcaaggatttgaacctggaactggagcccacaagcacacagaggaggaagaacaccaagactggttcccaacctatccaaggtagaagcgagcaacgttagtgtggtagtaacatggtgactgtgagagaggagatgcgtaaggggccatggacagagcaggaggacattcagctggtatgcactgtccgcctgtttggtgaccatcgttgggacttcattgctcaagtctcaggcctcaacaggacaggaaagagctgccgcctgcgctgggtgaactatcttcaccctggcctcaagcatggccgcatgtcaccacaagaagagcgcattatcattgagctccatgctcggtgggggaacaggtggtctaggatagcaaggaggctgccagggcgcacagacaatgagatcaagaactactggagaacacacatgagaaagaaggcacaggagaggaagatgggcatgccatcaccttcatcctcatcctcctcactgacataccaaacctgccttcttgacaccattccagtcattgggatgggcagtggtgacactcacaatggtagctgtgtcaccagcatcctcgagaacacacagagtgtcatggatggatatcccatggatcagatatggaaggagattgaggcaccacatgcacctaacttgctgagtattgctgaagggaaagagaagacgtgcagcagtatcccctgtcatctaccatcacctgtaatgtgggactacaaatgccctgagatattctggaagatgggagatcaagaaatcatgatgtgatggaagatgaaatcaagatgttggctgcacgatttggttatgggcttatggtaaataaggccatcgctattgaaggctgaaggaatacatttatattggtcaggccactcagctatctgcctagcagatttgcagtatttgtacttcctaactatgcttgcattagtatgcagtatttttaaatctagtgtaacactggtggtatgctcataatgtatgtatctatgtagtgtgaaaaatagttgtatcagtttgtgcaatagtgtggacgctctatatgcatgat

SEQ ID NO: 1180 - DNA, 654 bp, Zea mays
  Clone ID: 700103188_FLI
agctcgacgccgtcgtcggccgcgaccgcctcgtctccgagtcggacctcccgcgcctcacgtacctcacggcggtgatcaaggagacgttccgtctgcacccgtccacgccgctgtcgctgccccgcgtcgccgccgaggagtgcgaggtggacgggttccgcatccccgccggcaccacgctgctggtgaacgtgtgggcgatcgcccgagacccggaggcgtggcccgagcctctcgagttccggcccggccgcttcctcccgggcggctcgcacgcgggagtcgatgtcaaagggagcgacttcgagctcatcccgttcggcgccggccggagaatctgcgcgggcctcagctggggtctgcggatggtcacgctcatgacggccacgctggtgcacgccctggactgggacctcgccgacggcatgaccgcggacaagctggacatggaggaggcctacgggctcaccctgcagcgcgccgtgccgttaatggtccgcccagcacccagactgctgccgtctgcttacgcagagtagaaatcgatgctcgccggccggccatatccatgccgtccgtatgcatggatgcatggtcaaataaataagcgttgtacgtgggtatcggtgtcacaaactcacaatgtgtatc

SEQ ID NO: 1181 - DNA, 1531 bp, Zea mays
  Clone ID: 700103191_FLI
gaagcacggcaatctcgatctcgttcgttcccctgagcggcagtcagtgcgagcgagcgcgcacacagacaactcatcctctcccctctctctctcacacacacacatccatcatcccatccctgtgacgggcgatccgagggcctaccgacgatggtgtccgccgtgctccggaccatcctcgtgacgggcggcgccgggtacatcggcagccacacggtgctgcagctgctgcagcagggcttccgcgtcgtcgtcgtcgacaacctcgacaacgcctccgaggccgccctcgcccgcgtcgccgagctcgccgggcacgacggcgccaacctcgtcttccacaaggttgaccttcgcgacaggcacgcgttggtggacatcttctcgtcgcacaggttcgaggctgtcattcactttgctgggctcaaggctgttggggagagcgtgcacaagcccctactttactacgacaacaacctggtcggcaccatcaccctcctggaggtgatggctgcgaacggctgcaagaagctggtgttctcgtcatctgcaactgtctatgggtggcccaaggaagtaccctgcaccgaagaattcccgctctgcgccaccaatccctatgggcggacaaagcttgtgattgaagacatctgccgcgacgtccaccgctccgaccccgactggaagatcatactgctcaggtacttcaaccccgttggcgctcatccaagcgggtacatcggcgaagacccctgcggtgtcccgaacaacctgatgccctacgtgcagcaagtcgctgttgggaggttacctcacctcacggtctacgggacggactacagcaccaaggatgggactggggtgcgtgattacatccacgttgtcgacctggctgacggccacatagcagccctgaggaagctctacgaagactccgacaaaataggctgtgaagtgtacaacttggggactggaaaggggacgtccgtgttggaaatggtggctgtattcgagaaggcttctgggaagaaaatccctctggtgttcgctgggcgaagacccggagacgcagagatcgtctacgccgcaactgccaaggcagagaaggagctcaaatggaaggccaagtacgggatcgaggagatgtgcagagatctgtggaactgggcgagcaagaacccgtacgggtacgctgggtcacgcgacaacagcaaatgaaccacccatccatgcatcccatcctgcagtaggagcaagcagcagccttatagcctatatgctaccataattagtaactcatcaatcatgcatacataatcagtcagtcatctgattaggaggtactgcgatgggcctcgcttcttcagtgtatagagggaggaggagggggtcatcttgatattctttttttatcattcccgaatgattattattagtagccagttcgatattactccatggttggttgctagagaaggaataagctccattcatatacctaactaaagatatatatatacatgcattc

SEQ ID NO: 1182 - DNA, 1602 bp, Zea mays
  Clone ID: 700103212_FLI
ggggccgtctacgcctccaatttggcctctctcccttgcaagtttaagcttcatcttcagccatgggtaaggagaagtcccacatcaacattgtggtcattggccacgtcgactctggcaagtcgaccaccaccggccacctgatctacaagcttggaggcattgacaagcgtgtaatagagaggtttgagaaggaggctgctgagatgaacaagcggtccttcaagtatgcttgggtgctcgacaagctcaaggctgagcgtgagaggggtatcaccattgatattgctctgtggaagtttgagaccaccaagtattactgcaccgtcattgatgcccctggacaccgtgacttcatcaagaacatgatcactggtacctcccaggctgactgtgctgtccttatcattgactccaccactggtggttttgaggctggtatctccaaggatggccagacccgtgagcatgctctccttgcgttcactcttggagtgaaacagatgatttgctgctgcaacaagatggatgcaacgactcccaaatactccaaggcgcgttatgatgagattgtgaaggaagtctcatcctacctcaagaaagttgggtacaaccctgataagattgcctttgtccccatctctggttttgagggcgacaacatgattgagaggtccaccaaccttgactggtacaaaggcccgaccctgcttgaggctcttgaccagatcaccgagcccaagagaccttcggacaagcccctgcgtctccccctgcaggatgtgtacaagattggtggtattggaactgtaccggttggtcgtgtggagactggtgtcatcaagcctggtatggttgtcaccttcggtccaactggcctgactactgaggtgaagtctgttgagatgcaccacgaggctcttcaggaggcccttcctggtgacaatgttggcttcaacgtgaagaacgttgctgtgaaggatctcaagcgtggttttgtggcctcaaactccaaggatgaccctgccaaggaggctgccagcttcacgtcccaggtcatcatcatgaaccaccctgggcagataggcaatggctatgccccagtgctggactgccacacctcccacattgctgtcaagtttgctgaactcattaccaagatcgacaggcggtctggcaaggagcttgagaaggagcccaagttcctgaagaacggtgatgctggtatggtgaagatgattcccaccaagcccatggtggtggagacattctcgcagtatcctccccttggtaggtttgctgtccgcgacatgaggcagacagttgctgttggagtcatcaagagtgtggagaagaaggacccgaccggcgccaaggttaccaaggcagctgccaaaaagaaatgatgcaacctgtcgttaatcctgtatctgcttttgcaatacctgacttgtcactccatcccgaagttttgtatgcggttgttactgttattgtgtactgttaagctctgctgcggcgtgccctgttgtttgggtagcgtcaacgtcgagcgccacttgcgggtgtgcctttgtctgctatcagtagcggcaaaaattg

SEQ ID NO: 1183 - DNA, 818 bp, Zea mays
  Clone ID: 700103281_FLI
cttgctaaaccagcggaaacctaaccagctagcagcattagcttttcaacaagcctcgctcgcgcgccgtgaccgatagatggccatcacccacgacgactacgtctccctgtgcctcatggcgctcgcagccgcgggaggaggagggcacgctgcggcagccagtgccaggacgacgacgacaatgacgacgcaagagtgcgagctccgcttccggtgctccgtctgcggcaaggccttcgcgtcgcaccaggcgctgggcgggcacaaggccagccaccggaagccgccgccgccgctcgcacaggcgccgtcgtcgtcgtcgtcggtgacgacgaatacctcgtcggcgggcggcagcggcgccgggcaggggaggcacaggtgctcggtgtgccaccggggcttcgccacggggcaggcgctcggcgggcacaagaggtgccattactgggacgggctctcggtgtcgctcaccgcgtcggcggcgtcggggtccgcgtcgagcttgaggggcttcgatctgaatttggtgccggccgccggcgcggcaaggtggcgagaggaggaagaggtgcagagccccttgccggtcaagaagcggcggctgtcctccggtccttccaccgaacttagtttaacgatttagagttccttttggcgatctgaggcttgtagagtgttttcgttgcttcattcttttaaccgtattttagtttttgtgtttgcgcggtgaataaacgtgtatttaattttgtcgagccatatatacttgagataaaagccataggccatataggcatctaccaattgaggtt

SEQ ID NO: 1184 - DNA, 937 bp, Zea mays
  Clone ID: 700103340_FLI
ccttcacgaaaacagagcaaatccggcgagccggtgcggcggcggagggagacgcctgctcgagaaggagcattagcaggaggcagcggagatggatccggacgcagtgaagtcgacgctctctaaccttgccttcggcaacgtcatcgccgccgccgcccgcgacctccagaaggaaatggtggctaaagacaaggctcaagcagcacctgcaagccatgatgaagttgatcttgatgagttgatggatgaccctgaacttgagaagttgcacgcggagagaattgctgcccttaagaaagaggttgagaagcgtgaagtgctaaaaaggcaaggtcacggtgaatacagggaggtaattgaaggggacttccttggggaggttactggcagtgaaagagtcatatgtcatttctatcaccgtgaattttaccgttgcaagatcatggataagcatttgaaggcccttgctcctgtctatgtgggaacaaaattcatcaagcttgatgctgaaaatgctccattctttgtagccaaactggcaatcaaaaccttgccatgtgtaatattgttcaagaagggtattgctgttgaccggttagttgggtttcaagatctcggaagtaaagacgatttttcaacaagagcgttggaaaacattctcaagatgaaagggataatcgatgagaagaagaaagatgacgatgatgatgatgaagaaagcgagtctaagaataggaggattagatcttcaactgctcaagattctgactcggactgaacatgagatggggattgaggattcaccctttttgcactttatattttgtctgttctgtactgcaattgatttgtgcgactcatgtatctataccagataaccagaacaaaagcatgtacaagagattcttaacttatctaacttatgaacacgttc

SEQ ID NO: 1185 - DNA, 1068 bp, Zea mays
  Clone ID: 700103353_FLI
ggaccgtggtgccaacgtgaagcaatggaggtcgggggcggcgagaagcacttcgtgctggtgcacggcctctgcctcggcgcgtggagctggtacaaggttgccacggcgctggaatccgccgggcaccgcgtcacggcgctggacctggcggcgtcgggcgcgcacccggcgcgcctgcaggaggtgcgctcgttcgaggagtactcgcgcccgctgctggacgcggtcgccgcggcgcccgacggcgacaggctggtcctcgtcggccacagccatggcggtgccagcctcgcgctcgccatggagaggttcccgcgcaaggtcgccgccgccgtgttcgtggacgccgcgatgccgtgggtcggcaagcacatcggcgtcaccaccgaggggttcatgaagaaagctgcatccaaagggctgctcatggactgccaaatcgtggccatcaccgacggcaccggcagcgaagaaggcgccgggcagcgagggacagcgatcgtgatgggtccagagttcttgaagaagtgctacaaggagagccccgcggaggacctgaccctggcgacgctgctggtgaggcccggcaaccagttcatggacgacccggtgatgaaggacgaggcgctgctcacggccgccaactacgggtccgttaagaaggtgttcgtggtcgccaaggccgcccatggatccagcgccagcgccgaggaggtgcagagctggttagcggccacgaaccccggcacggagatgcaggagatcgccggcgccgaccacgctgtcatgaactccaagccgagggaactttgtgacgtccttgtcgggatagccagcagatacgactaataagaatgtcgaacactattattgccgccgcgcaactaggcgtgcatgatcggttgatgatgtgtaatttgtgctatctttaaaatagttattatgcttaaattttacctatcaacatcttccatttcaaattccatactataaatattgcagactataatgtaaaaaatattttgcataattatatatgcgattggttggctatagccttacaat

SEQ ID NO: 1186 - DNA, 864 bp, Zea mays
  Clone ID: 700103356_FLI
gctccatctccgtctccgtctccacaccgtgccgtagctgctgctgtccgtgtccctcgcctcgaagaagacaactccaacactgttgccgcgtgactgctgaattcgctccgcacacgcgcgaacccagcaaggcaagaacacgaacgagagagagagagagacagggaggggtcatccatccatcagaccatcacccatggacaaccttaaggagcagcggggccacgatgccgcgggcgccaacagcggcgtctggatgacggtgccggcgttcggggactgggacaccaagaacggcgcgctgccggactactccatggacttctccaagatccgcgagatgcgcaagcagaacaagaaggagctctcccgcgccagcctcggcggcgacgacgacctcctcgcccacgctcacgcccagaagccgcaggccaacagcgcccagcccaagctcggccgcccctgccccgccgccgaccgccgaccgctccacgcccgcgaccactccccaacgggagggaagaagttcctgagctacttccagtgctgtatcaaggcctgaagaggagctgccgcaatgctatgtctgtgtgcctgtgctttgtcgcagcagaacactcgtgagcaattaggtcccggctttgttaagtatccaaaaatgtgcaatgtatttgccctgatggtcactcgtttgacctgttagcctgtatgaagaacaagtcaggttatggggccaggccgccaggcagccgtctatctgtacatggcaccatcgatttgtttgcgactggtggtataatgttgccctgtaatcattgtattggatgggaatttgcaccgcctccgtatttttgaacgatc

SEQ ID NO: 1187 - DNA, 1426 bp, Zea mays
  Clone ID: 700103394_FLI
gctccacaggttcgcggacctgatcgacgagcacgtggaggagctggcggcgctggacacggtggacgccggcaagctgttcgccgtgggcaaggcgcgggacatcccgggcgccgcgcacctgctgcgctactacgccggcgccgccgacaaggtgcacggcgcgacgctcaagatggcgcagcggatgcacgggtacacgctcaaggagcccgtgggcgtggtgggccacatcgtgccctggaactaccccaccaccatgttcttcttcaaggtagggcccgcgctcgccgccggctgcgccgtcgtcgtcaagcccgccgagcagacgccgctgtccgcgctcttctacgcgcacctcgccagggaggccggcgtccccgccggcgtgctcaacgtcgtgccgggattcgggcccacggccggggccgccgtcgccgcccacatggacgtcgacaaggtcagcttcacggggtccacggaggtcggccgcctcgtcatgagggccgcggccgagagcaacctcaagcccgtgtcgctcgagctgggcggcaagtctcccgtcatcgtcttcgacgacgccgacctcgacatggccgttaacctcgtcaacttcgccacctacaccaacaagggcgagatctgtgtggccggcacgcgcatctacgtgcaggaagggatctacgacgagttcgtgaagaaggccgccgagctcgccagcaagtccgtggtcggagacccgttcaacccgagtgtcagccaaggcccccaggttgacaaggaccagtacgagaaggtcctcaggtacattgacatcgggaagcgcgaaggcgccacgctggtcaccggagggaagccctgcggcgacaagggctactacatcgagcccaccatcttcacggacgtcaaggacgacatgacgatcgcacaggatgaaatctttgggccggtgatggctctcatgaaattcaagaccgtggaggaggtgatccagaaagcgaacaacacccggtacggcctggccgccggcatcgtgaccaagaacatcgacgtcgccaacaccgtgtcgcggtccatccgcgccggcgccatctggatcaactgctacttcgcgttcgacccggacgcgccgttcggcgggtacaagatgagcgggttcggcaaggacatgggcatggacgcgctcgacaagtacctgcagaccaagaccgtggtcactccgctgtacaacactccatggctctgaccgaccgacctcatccctgtccgatgaacagttcaacatcacaaaacaagaagaaacatgtcttgtaagatactccaaaggatcggttgcctgcagtagctgtactcttacacctgcatggattgatgatgtcgtagtgcaatgtaacattcagaacaataaagacatgtttcggactgc

SEQ ID NO: 1188 - DNA, 743 bp, Zea mays
  Clone ID: 700103415_FLI
cagatcgtgtgattttgcatcccatccgcgagcgcgacacgcgctgacctactcgacggcctccacctccgtcttgaggcgaagcgaccaactctttcgaagggaaattatatctcaggtgcttaggagtctgccatggccagcgagaataaggtatttaggttcgaggaagtcgccaagcacaacgtcaccaaggactgctggatcatcatcgccggcaaggtgtatgatgtcactccttttatggatgagcatcctggtggagatgaggttttgctagctgtaactgggaaagatgctacagctgattttgaagatattggccacagtgattccgcaagggacatgatggagaagtaccacatcgggcagatagatgcttcaacaatcccagcaaagcgaacttatgtgcacccccagcaagcgcccagccactcagacaagaataatgatctcctcatcaagatcctgcagttccttgtgcccattatgatcctgggccttgcatttggtatacgtcagtacaccaaatcagagtagtactgttcttgaagacttgcctttggagtctgttttatggtaatggtttggatgagaacagttcagtaattgcttagtgtatttgtcaggtggatgttatctcattggtcatatactatgtattatggacatccatgtgttgccgaaatgtgctcttttccccatgaaccgaggcatacaagatgaattctgactcttccatg

SEQ ID NO: 1189 - DNA, 1167 bp, Zea mays
  Clone ID: 700103446_FLI
gaaggagtcaaccctccacttggtgctgcgccttaggggaggcatgcagatctttgtcaagaccttgactggcaagacaatcacccttgaggtggagtcctcagacaccattgacaatgtcaaggcaaagatccaggacaaggagggcatcccacctgaccagcaacgtctcatctttgccggcaagcagttggaggatgggaggacccttgctgactacaacatccagaaggagagcaccctccacttggtgctgcgtcttaggggtggtatgcagatctttgtgaaaacccttactggcaagaccatcactcttgaggtggagtcttcagataccattgacaatgtcaaggccaagatccaggacaaggagggcatcccgccggaccagcagcgtcttatctttgccggcaagcagctggaggatggacgcacccttgcggattacaacattcagaaggagagcaccctccacctggtgctgcgcctcaggggaggaatgcagatcttcgtgaagacattgaccggcaagaccatcaccttggaggttgagagctccgacaccattgataatgtgaaggccaagatccaggacaaggagggtatccccccggaccagcagcggctgatcttcgccggcaagcagctggaggatggtcgcaccttggctgactacaacatccagaaggagagcaccctccatctggtgctccgcctgaggggcggtatgcagatctttgtgaagaccttgactggcaagaccataaccctggaggttgagagctctgacaccatcgacaacgtgaaggctaagatccaggacaaggaggggattcccccagaccagcagcgtctgatcttcgccggcaagcagctggaggatggtcgcccccttgcagactacaatatccagaaggagagcaccctccacctggtgctccgtcttcgcggtggttattaagccatcagtcgttgaagctgctgctgtatctgggttatctagtgtctctgccattgcccatggatggtgctgtctttcaaagtatttgtatggtttgtgtcgtgagtcgtgactgagctggtttcatggaccagttgtgttctcgttacccaaaactatcgtgcgaccgcatatggcttaatcatgaataaatgttgtttgaattt

SEQ ID NO: 1190 - DNA, 1747 bp, Zea mays
  Clone ID: 700103482_FLI
gttcgcttcctttcccctaccgcatcgatggaccacgcgccagcgccccctttcgccgtgcacctcgtcaccggcggcggatcctcgtcggggatcgccctcctactgcgctccctcgccgccgcccgtgtcgtcgctcttgacgcagagtggaagccgcgccgccgcggtagccctgccgctgccgaccctgcggccctgggcgacgacacgacgccggcgtccgagacatctccagcgccgccgaagttcccgacggtgacgctgctccaggtggcctgccgcttcagcgatggtggtggaggtgagggcgagcgcagcgaggtgtttgtcgtcgacctgctttccgtgccgctcgccgacctgtgggcaccgctgcgagagctgttcgagcggcctgagacgctcaagctggggttcaggtttaagcaggacctggtgtacctctcctccaccttctccgccgccctcgggtgcgattccggattcgataggcctttcttggatgtcaccaacatttattactatctcaagggccatgataggcagaagaagcttccaaaggagaccaagagtttggcaactatttgtgaggagctgcttggtatccttttgtccaaggaactccagtgtagtgattggtcatgccgccccttaagtgaagggcaaatacaatatgctgcgtcggatgcctactacttgctagacatatttgatttgttccaaaaaaggatcacaatggaaggaaaatgttcatctacaacagaacttacttcagacaggcattgctcatcagtggtgatagaatgctcttcttctggatatggcatttgctcgggtagttgtttgatgtccatagtaaccaagtacagtgagaagataatattgacagaatctgatgcaaaaccgcgtacctccagacgaaaagaaaaactgaagattcctgccaatgccaaacgcaaagataatgtggattgcagtagtgaatggcagggtccccctccatgggatccttccattggtggggatgggtacccaaagttcttgtgtgatgtgatgattgagggcctagctaagcacttgcgatgtgttggaatagatgctgcaattccatcttcaaagaaacctgaaccaagggatctattaaatcaaacatacaaggaaggaagaatattattaacacgggatgccaagctcttgaaatatcaatatttagctggtaaccaggtatacagagtgaaaagcctgctcaaacatgatcaactagctgaggtcattaatatcttccaattaaagatttctgaggaccaacttatgtcgaggtgcacaaaatgcaatggtagctttattcagaaaccacttaccctagaggaagctgttgaagcctcaaaaggtttccagattattcccacgtgcttgttcaaccgaaatctggagttctggaagtgcaccgattgcaaccaactctactgggaggggactcagtaccacaatgcagtccaaaggttcttgtcagtgtgcaacattagtgattaagcagcacgtacggccttggtactcatttgtaaaattgtaaggtactgagataccatcacctccgaaagatcgaaaataatctgatctttggcatccactcgtgcacgatgaggcatgccatccatttttagtggtttgctgttcgtcactgagatgctgttgtaaggaaaatagaccttgacttatttgattaatggactttgctccatgc

SEQ ID NO: 1191 - DNA, 743 bp, Zea mays
  Clone ID: 700103520_FLI
cacaaaagaacaaagataaccgatccaaagttaaatttcatcaaacaacgggatctcgtagctatatggttcatgtagaaaatttgggagataaaaacattggtcaagagcccgatgcattagatttgttcaaggagtgtcattacagcaggaaaaagaaatgttacacatctaccgtgcaacaagctataactcaaatggataacaagcggtctgcaactacagaaggtgaaaaatcaatgtctgcaactgaagttgttgctaatgtgcttgctgaaaatacaaagaagaatttgttccttcaaaatgtggggatacaaaatgttggtcctaggtctagtctgagaaatattgaagcacagttggaagtggagaagagggcaaacagtgaccttaaatctattgttgatgctcaacatgaacaattggatgcattgttaaagcaaatgcaagaaactgaagaaaataggatcagggagcaagaggaagtgaagaagaagcaagctgagatggaaacaaagatgcaacttgtgttgagtcagattcattcaagattgagatagtatttatgtcatgttgacaactttttttgttgttgcaacaactttctttcttttttatggaaccaactataatgttttggatatgatgtggtgttctggttggatagtctttattgtttgggattgtccatgtgaagttctagttggatatttgaatttaaatattgatattttgtcatt

SEQ ID NO: 1192 - DNA, 1410 bp, Zea mays
  Clone ID: 700103547_FLI
gtattcacaaggttgcttatggattatttgaatgattatgcttatgacgcccaagttgctggcctctattatgttgttaagccaaatgacactggttttcaggtaactatggttggcttcaatgacaaaatgagaacccttttggagactgttattggaaaaattgcagaatttgaagttaaggctgaccgtttttctgtgataaaggaagctatgacaaaggagtatgagaatttcaagtttcggcagccataccaacaagtcctatattattgttcgctaatactggaggaccaaacatggccatgggatgaggaattttctgcactttctcaccttgaagctagtgatctgggaatttttttgccccatttgctatcaaaaaccttcatcgagtgttattttgcaggtaatattgaacccaatgaagcaaacaatatcgttcaacatgttgaagatgtcttattcaatgcaccaattagtgcttgcaagccactatccccatcgcagcatcttgccaagaggattgtaaagcttgagaagggtttgagatactattatccagcaatgtgctcaaatcaccaagatgaaaattctgctcttctgcactatattcagactcatcaggataatgttaagcaaaatgttctacttcaactacttgctcttgttggcaagcagccagcttttcatcaattgcgatcagttgagcaacttggctacatagcgcttcttaggcaaagaaatgattcaggtgtccgtgggttgcaatttataatccagtcaacggtgaaggatcctgctaatctggatgccagagttgaaaattttctcaacatgtttgaaagcaatgtctacaatatgtctgatgcagagttcaagagtaatgtaagtgctcttattgatatgaaactggagaaatacaaaaacatacgcgaagaatcagctttcttctatggagagatttctgaaggaaccctcaaatttgatagaaaagaagcagaggttgctgcactgagggagctcaagaaggaagagttggtaggcttcttcaatgatcatgtcaaggtcaatgcaccacaaaagaagattcttagtatacaagtgtacggtggtctccattctgccgagtacgaaaccatagtgcaaaatgctccgccaccgccgtcgtgtgagataactgatatttatggcttcaggaggtcgaggcctttatatggatcattcaggggaggcgttggtcagatgaagctatagttcaacattttctcatcattctgtaaaattctgaaaaagagtcatctttctgttcaactgcatctacgttgattgttttttcattgcgaacactctagtaggccatttatctacggttttttcactatattcattaagatattatgagatttc

SEQ ID NO: 1193 - DNA, 629 bp, Zea mays
  Clone ID: 700103584_FLI
cttccacctcaacccgtctggccgcttcgtcatcggcggacctcacggcgacgctggcctcactggccggaagatcatcgtccaggtctcctacgccatcggcgtgcccgagcccctgtcggtgttcgtggacacgtacggcaccggcgcgatccccgacaaggagatcctgaagatcgtgaaggagaacttcgacttcaggcccggcatgatcatcatcaacctcgacctcaagaaaggcggcaacgggcgctacctcaagacggcggcctacgggcactttgggagggacgaccccgacttcacctgggaggtggtgaagcccctcaaggcggagaagccgtcttctgcatgaggcgcctcctctgttttggaagaagcttttggtctggtctggtctggtctggtgtgcctgcgctctatcatgcttttttatggctcctacttgtgattcttgatctgccccttgcttatcatttgtactgtactgtcactgtcctaataagtggtacgtgtgcggggtcgtattgtgtctgcttattcacctagaggattatttctggttttgctgcttatgtaatgcttttaaaaccatgaaagaagctacaggctcctacagctgctttgag

SEQ ID NO: 1194 - DNA, 1006 bp, Zea mays
  Clone ID: 700103605_FLI
tccaatctagaagcacccctctccctctctctctcttcgccgtccgaagctccgcaccccaatctaatcgacacctcaccgagatgggccgcaagttcttcgtcggtggcaactggaaatgcaatggaaccacagatcaggtcgagaagattgtcaaaaccctgaatgaaggacaggttcccccttcagatgttgtggaggtcgttgtcagccctccttatgtcttccttcctgtggtcaagagccagctgcgccaagagttccatgttgctgctcagaactgctgggtgaagaagggaggtgctttcactggtgaagtcagtgctgagatgctcgtcaaccttggtgttccctgggtcattcttggacactctgaaaggagagctctgctgggagaatcaaatgaatttgttggagacaaggttgcgtatgccctgtctcagggactaaaggtcattgcatgtgttggtgagacccttgagcagagggaggctgggtctaccatggatgttgttgctgcacaaacaaaagcaattgctgagaagatcaaggactggagcaacgtagttgttgcctatgaaccagtttgggctattggaactggtaaagttgccaccccagctcaggctcaggaagtgcacgcctccctgagggattggctaaagaccaatgccagccctgaggttgctgaatctactaggatcatctacggaggctctgtaactgctgcgaactgcaaagagctagcagcacagcctgatgtcgatggttttcttgtcggtggagcttctttgaagcctgagttcatcgacatcatcaacgcggccaccgtgaagtccgcttaagatgctacgctgaagacgaacatactttttttttgctcaactgtgctatgtaagctagtagcttttgcgcaggagcagagactgttttgcctgcccccaacttctagcttgagcttgctaataatgtttacctctggacgtatcaataatggtgcttatgt

SEQ ID NO: 1195 - DNA, 1111 bp, Zea mays
  Clone ID: 700103624_FLI
gaggaaggcctatctgatccaaaatctcatgaccagccgttggatagctgctcagcagaaatcaccacaaccaagcgtcgaaggacataatggatgtacacgacgacctggatgtgttgcttcgtaccgagacccagggaaacaaatatttggctgtgagcattacaaaagaaactgcaagcttgttgctgcatgctgcgataagttattcacttgcagattctgtcacgataaagttagtgaccatacaatggacaggaaatcagtgatggagatgatgtgcatgcaatgtctgaatgttcaacctgttggtccaaattgtcaatccccttcttgcaatggactgtccatggccaagtattattgtagcatatgcaagttcttcgatgatgaaaggagtgtctaccattgtcctttttgcaacttgtgtcgccttgggagcggattgggcactgatttttttcattgcatgaagtgcaattgttgccttggcataaagatgatagaacataaatgccgggaaaagatgctagagatgaactgtccaatctgctgcgactttttgtttacatcgagtgcaccagttaaaggccttccttgtggccacttcatgcattcggcttgttttcaggcatatacttgtacccactacacttgtccaatctgctgcaaatccttgggagatatgacggtgtattttggcatgcttgatggtttgctggctgcagaacagcttcctgaggaataccaggaccggtgccaggatatactgtgtaacgactgcgagagaaaaggcaggtcacggtttcattggctctaccacaagtgtggtttctgtggttcttacaacaccagagttatcaagactgatacggcagagtgttctcgccctctataatttcttttatgcaatccatttgtatatatatatcgacggggtagaaaccttgtgaccgtaggtgtgatagtttttttatagagtgaactgggggaggaaccccacctggatgtattatgaggaaaaagtgactgtgcacatgaggagtctgagaattactcgctcccgtcccaaactaactgtatttctacgatttgaaatatattcgctcat

SEQ ID NO: 1196 - DNA, 1448 bp, Zea mays
  Clone ID: 700103634_FLI
cagagcactgcctgttgtttcttcttcctcctctctcccctctcgatcgatcgatccaacaagctgagcttggtctttgctttctagctgcctggtacggtctagcgaccgatcgatcgatcgaccatgtcgtccttgctatgtattagccgcaggaacaacaagaaggacagcgatggcgatggagagtacggtggcgagcagatcatcatcagcacgggcggcgcggccatgaggaagggcccgtggacggacgaggaggacgagcagctggtacggttcgtgcgcctgttcggcgaacgccgatgggatttcttagcaaaggtgtcaggtttgcgcggtggcgggtgcgtcgaccgatccgcctccatgcaactccgcatgcacgaggagggtcggtcggcctcgatcgagcagctagcagtgttcttaaccgtttgcttcttcttcttcctcctcatctttgtcgcgtatctgcgtgcggctcttgtggatacggacggcgacgtgcgtgcaggtctgaggcgcaccggcaagagctgccgcctccggtgggtgaactacctccacccggggctccggcgcggccgcatcacggccgacgaggagcgccgcatcgtggagctccacgcgcagtggggcagccggtggtcgcgcatcgccaggagcctgcccgggcgcaccgacaacgagatcaagaacttctggaggacgcggaccaggaagaaggcgctcgaggagaggagggctgccgtggcagcaacgacggcggcggagtcagcgtcctcggtgatgacggtgtcgtcgtcgtccgagtgccgccgcccgcccgtatcgtcgtcgtcgtcgtcgtcttcgctacgtcgggacgaagcgcggcgcagcggcgacgagaccgaggaggcgtccacgcccaccgcggcgccggcgaccaagcacgatgaggaaccccagccgcagccgcaggagtgctacgacttccccatggaccagctgtggaacgagatcgcggcagccgatgcggcggcgatgagctaccttgtcgtggacgcctgctggggcggagctgctgttggtggtcactgttattactacggcgccgccgcagcctcagccgcctcgccgccgccgccggcctcgccgccgtgggagtactgcggctccgatttttcgctgtggaggatcgacgaccaagagtactacaagaagatgctcgactcctcctcctgatcccggcccgcgactcatatcgtttggcgaggacacacgtacatacgcgctctgtgaatttgctagctcatatatattatccaggcgaggcgaggaacgagctgagatcatggtggtgagatgagatgagatgagatgagagagtagtgtgtattaatggtggttcagatcgagtagtgtgataaattaacagaatatatataataatttacgcttcc

SEQ ID NO: 1197 - DNA, 2068 bp, Zea mays
  Clone ID: 700103723_FLI
gcagctttgctggccagggtgtggtctatgagacactccatctaagtgccctcccaaactacactactggtggaaccattcatattgttgtcaataaccaagttgcctttacgactgatccaagagctggcaggtcctcccagtactgcacagatgttgctaaagccctgaatgctcctatattccatgtaaatggcgacgatttagaggctgttgtttgtgtttgtgagcttgcagcggagtggcgccagacttttcactccgatgtggtggttgatctgatttgctaccgccgtttcgggcataacgaaattgatgaaccttccttcacacagccaaaaatgtatcaggtcattaagaaccatcccagctcattgaagctttatgagcagaaactgctaggaacgggtgaagtcatgaaagaagatgtccagaggatccatgacaaggtgaaccgaatcttgaacgaagagtttgctaagagcaaagactacgttcccaacaagagggattggctctcagcttactggactggctttaagtcaccagagcaaatatcacgtgttcgcaacactggggtgaagcctgaaatactgaaacgtgtaggtcaggcaattactacactgcctgaaaacttcaaaccacacagagcagtgaagaagatttttgagctgcgtgcagctatgatagagagtggtcaaggaattgattgggctgttgccgaagccctggcctttgcaacacttatagtggaaggcaatcatgttaggctaagtggacaggatgtggaaagaggaactttcagccatcggcatgcagttctgcatgatcaggaaactggagcaaagtactgcccacttgaccatgttgcaatgaatcaaaatgaggagctatttactgttagcaacagttcactttcagagtttgctgttcttgggtttgaattgggttactccatggagaaccctaattcattggtactttgggaagcacaatttggcgattttgccaatggtgcacaagtgatgtttgaccaatttttgagcagcggcgaggcaaaatggttgcggcaaaccggccttgttgttctgttgcctcatggttatgatggccaaggtcctgagcattctagtgcccgcttggagcgcttccttcagatgagtgatgataatccttttgtcatacctgagatggaaccaacacttcgcaagcagatacaagagtgtaactggcaagttgtgaatgtgacaactcctgcaaattattttcatctgttgcgtcgacagatacatagggagttccggaagccgctgattgtaacagctcctaagaacctgcttaggcacaaggattgcaagtcaaatctttcagagtttgatgatgttgaaggccatctaggattcgataagcagggaacacgtttcaagcgactgataaaggaccgtaatgatcacaagcaagtcgaggagggtgtcaaccgtcttatcttatgttctgggaaagtttactatgaacttgacgaagagcgtaagaagtcggagcgtggtgatgttgcaatttgcagagttgagcaactttgcccgttcccctatgaccttatccaaagagagctgaagagatacccaaatgcggagattgtgtggtgccaggaggagcccatgaacatgggtgcatacagctatatctctcctcgtctgtttactgcgatgaaggctcttgggcggggttcgtttgaagacatcaagtatgttggcagagcaccttcagctgctacagcaacaggcttcctgtcggttcatgcgcaggagcagtcagagctagtgaagaaggcactgcaggcagagccgatcaaattcctctgatgtatgcaccgtatctacagcaacaacctgcctgcatggttgcaggaacatgccagggattttcttttccccggccagttttgaggcttttcagcgttggaactaatgacgacttctttccttgaagacatcatatttttttttttctcgaacgcgcaggaggactgcacgtcattatattaagaaaggaaaaggtccaagacatc

SEQ ID NO: 1198 - DNA, 510 bp, Zea mays
  Clone ID: 700103742_FLI
ggtccgactcccagccgtcgtctgctgcgtactccgcctccagtttggtctgtttcttgcaagttgctcttgcggtagttcccccaactgtcaccatgcagaacgaggagggtaagactgtggacctctatgttcccaggaagtgctcggccacaaacaggatcatcactgccaaggaccatgcctctgtccagatcaacattggccacttggatgcgaatggcctgtatgatggtcacttcacaacatttgctctctctgggtttgtccgtgctcagggcgatgcagacagctccttggacaggctgtggcagaagaagaaggctgatatcaagcagtagattttacatctagtttaccaagaattggacactgccttagctatgttttgaattcatgtcactatatgcaatgttgtgatttcagctggtaccttaaatctgaagatttagtatctttgttgggttccttctgagtttgatgtgtggtgttcgtttaattcccttgtac

SEQ ID NO: 1199 - DNA, 935 bp, Zea mays
  Clone ID: 700103773_FLI
aagaccgaagaccgagccgtgcgggggctcgggacgggaacgggacaggacctcaaaatctcagatccttcctgcccgcccgcccgtgcccgtcgacgcgtcgttcttgccggccgcgccccacctccgccctctcctcctccagggggatcggatacgccacaggctgcgcgatggtgctgtgggtcttcggctacggctccctcatctggaaccccggcttcgacttcgacgacaaaatcctcggcttcatcaagggctacaagcgcacctttaatctcgcttgcattgaccacagaggcacaccggagcatccggcgaggacctgcacgcttgaaaccgacgacgaggccatatgctggggaattgcatattgtgtcaagggtggtccagaaaaagagctaaaagcaatgcagtacttggagagaagagagtgtgagtacgaccagaagatatccattgatttctacaaggaaggagatcccttgaaaccagctgtgacaggcgtcttagtgttcgtttccactccagatccaattggcaacaagtactatcttggccctgctcctttgcaggatatggcaatgcaaattgctacagccaatggccctactggctataatagggattacctgttctcaatggagaaggcattagccagcattagccacgaagatgattcgatcatagagcttgcaaacgaggtgaggaaggtgctcaacagaacaaaggagaccaagatcactggtgccaatgcttccctgaaatcacatgcccctcttgtgcacctgtccgcgcttccagaaggcaccgttgtggactcgagatagctcgccttggacgttggacctctactcggaatctacttccagctcttgcatgtttgtggccatcatgtactgattttcccttttcaacagttgtcgtgaggctgt

SEQ ID NO: 1200 - DNA, 729 bp, Zea mays
  Clone ID: 700103820_FLI
gttgcccgtcagtgctgctccccaatagccaatagcaatagcaatagcaatagcaggcgctgtacgacggtgtgccggcaccggctagctcgggcgctataaaatgggggcagccggtgggtgtggtgactactatcatcatttcaacctctctccctcggcctcgccggcggcacagcgcagcgcttccactgttgggtgtggtggatttcctccgcccccgaacgatcgatcttttgcatggcagcagcggctagctccaaggggcgggcgatcgctgggagcttcgtcagccgcgtcctggccggcaaggccgcctccccgaggtactgggacgacggcaacacgaacgcggtttcgccccgtggttcattctctttcggtttgctcgtctgtgctagtagaactactgtgtttttttttaggatgcgcgttcttgttaagttggtccaatccaagttcctgtggtagttgcagcagagcagagcgatttgcttgcttgcttcttagctctgtggatgactctgattctcaatgtgtgtgctgctgctggtggcaagattttgctcggcagaaaatctactggaatttgccaactgtaggaggaggagctactattatcttctctcccatggtctacgactacgactctacgtagagtcgtagacatggcaactgtctgctttgggaccatcaccagcttgtttaatccactttcctagttctttt

SEQ ID NO: 1201 - DNA, 1490 bp, Zea mays
  Clone ID: 700103821_FLI
tgctccgcgccgcggtgctgctgtgcacggccatgtcgctgatcgtgctggccgagaaggtgttcctgggcgcggtcagctccgtggcgaagctgcggcgccggcgtccggggcgggtgtgcaggtgcgaccccgacgaggaggcggctgcggcatcccaggcctatcccatggtgctcgtccagatccccatgtacaacgagagggaggtttaccagctatcaatagaggcagcctgcaggctcacatggccggtagatcgactaatagtgcaggtgctggacgactccaccgactccgtcatcaaggagctggtgaagggcgagtgcgagcggtgggccacggaggaggggatcaacgtcaagtacgagacgcgcaaggacagggccgggtacaaggccggcaacctcaaggagggatgcgccacgcctacgtgcgcgcctgcgagttcgtcgccatgttcgacgcagacttccagccgccgccggacttcctcgtcagaaccgtcccgttcctcgtccacaaccccagcctcgcgctcgtgcagacacgctggaagttcgtgaatgccaacgactgcttgctgacgagaatgcaggagatgtccatggactaccatttcaaggtggagcaggaagctggctcttccttatgcaacttctttggatacaacggaaccgctggagtatggagaacgcaagcgatcgtcgagtccgggggctgggaggaccgaaccactgctgaggacatggacttggcgctgagagcagggctcctgggctgggagttcgtctacgttggaagcataaaggttaagagtgagctgccgagcactctcaaggcgtaccggtcccagcagcaccgctggtcatgcggacctgccctcctgttcaagaaaatgttctggcaaattctcgctgccgagagagtgtcggtctggaagaagtggtacatggtctatgacttcttcattgcccggagaatcgtaggcaccttctacacgttcttctttttcagcgttctgattcctctgaacattctgctacccgaagcgcagattcctgtgtgggagctcatctatatccccatagctatcactcttctcaactctgttgggactccaaggtctatccatctggtcatactgtgggtcttgttcgagaacgtaatggcgttgcatcggtttaaagccatcttgatagggtttctcgaagctgacagggccaacgaatggatcgtgacgcaaaagctggggaatctgcagaagctgaaatcgatcgccagacttacaggaagttaccgtttcaaagacaggttccatttcctggaggtgttcattgggctgttccttttggcctctgcgtgctttgactacttatacagagatgactatgtttacctctttgttcttccccagtcgatcatgtatttcgcgattgggtttcagttcattggtctcaatgtctctgaagactgacctattgcaagac

SEQ ID NO: 1202 - DNA, 629 bp, Zea mays
  Clone ID: 700103839_FLI
ggtcatatctagctatagtagctcccttgagaagcatttgagggaggagccatgtctgaggagaagcaccaccaccacctgtttcaccaccgcaagccagaggaggagggcgcctccggcgaggtcgactacgagaagaaggagaagcaccacaagcacatggagaagctcggcgagctcggcgccatcgccgccggcgcgtacgccctgcacgagaagcacaaggccaagaaggacccagagaacgagcacgggcaccgggtcaaggaggaggtggccgccgtcgccgccgtgggctccgccggcttcgctttccacgagcaccacgagaagaaggacgccaagaagcacgcccacaactgatccgtcgcggttgctgttccatctgttcttccagcctcgtcttcgtctactgtgtgccggccaggccttgatttgggctaccgatatttgcatggacgtaggaactgtgttggtcggtcctcggcgttcttgtatcaagatcaaatcaggccttgaataagtgtgtgtgcatatatcttttttttaatttttatctcttttttttttgtatcgagagatgtcctgaataatgtgaatttacgtgtgtttatataaacgaatttaag

SEQ ID NO: 1203 - DNA, 1393 bp, Zea mays
  Clone ID: 700103877_FLI
cagacaagcaaggaatcccccgatggctcatcgcgttctcctcctcctctctctcgcgtcggccgccgcggttgccgccgccgtcgacgcggaggacccgctgatccggcaggtggttcccggtggagatgacaacgatctggagctgaacgcggagtcccacttcctgagcttcgtgcagcggttcggcaagtcctacaaggacgccgacgagcacgcgtaccggctgtccgttttcaaggccaacctgcgccgcgcgcgccggcaccagctgctggacccgtcggcggagcacggcgtcactaagttctccgacctcacgccggcagagttccgccggacctacctcggcctccgcaagtcccggcgcgctctcctcagagaactcggggagtcggcgcacgaggcgcccgtgctccccaccgatggtctccccgacgatttcgactggagggaccacggcgccgtcggccccgtcaagaaccagggttcgtgcgggtcgtgctggtcgttcagcgcgtctggagcgctggagggtgcgcactacctcgcaactggcaagctggaggtgctttcggagcagcagttcgtcgactgtgaccacgagtgtgattcatcggagcctgattcatgtgattcgggttgcaatggtgggctaatgacgacggcattcagttatctccagaaggccggtggccttgagagtgagaaggattacccttacactgggagtgatggcaaatgcaagtttgacaagtccaagattgttgcttcagttcagaacttcagtgttgtgtctgtggacgaggctcaaatttctgctaacctcatcaaacatgggccattggcaatcggcatcaatgctgcctacatgcagacatacatcggaggcgtgtcatgcccatacatctgtggcaggcaccttgaccatggtgttctccttgttggatatggtgcttctggtttcgcccccattcgcctgaaggacaagccttactggatcatcaagaactcgtggggcgagaactggggggagaacggatactacaagatatgcaggggttccaacgttcgcaacaagtgcggcgtcgattccatggtctttaccgtgtccgcagtccacgcctcgaaggagtagactctggtcagcggtgataatcgtgattccatatattgtagaactataatccctgctagtaatccatttgtgctgtttatgtatcgaaggcagcaaagatgtgtgaagcggcaatgggatgcttgctgtaaggtaatatgtttggcttgctaggcatgctacacgctatttggatgtagcaacgttatcaccagctgtatacgctttttaatcgacaacatttgaataatatgtacataacattatgttgtgctc

SEQ ID NO: 1204 - DNA, 974 bp, Zea mays
  Clone ID: 700104706_FLI
tggagattgaaatcattgataaattaatctccattccgtacgtcgaaatgacattgagattgatggagcgttttggtgtgaaagcagagcattctgatagctgggacagattctacattaagggaggtcaaaaatacaagtcccctaaaaatgcctatgttgaaggtgatgcctcaagcgcaagctatttcttggctggtgctgcaattactggagggactgtgactgtggaaggttgtggcaccaccagtttgcagggtgatgtgaagtttgctgaggtactggagatgatgggagcgaaggttacatggaccgagactagcgtaactgttactggcccaccgcgggagccatttgggaggaaacacctcaaggcgattgatgtcaacatgaacaagatgcctgatgtcgccatgactcttgctgtggttgccctctttgccgatggcccgacagccatcagagacgtggcttcctggagagtaaaggagaccgagaggatggttgcgatccggacggagctaaccaagctgggagcatctgttgaggaagggccggactactgcatcatcacgccgccggagaagctgaacgtgacggcgatcgacacgtacgacgaccacaggatggccatggccttctcccttgccgcctgtgccgaggtccccgtcaccatccgggaccctgggtgcacccggaagaccttccccgactacttcgatgtgctgagcactttcgtcaagaattaataaagcgtgcgatactaccacgcagcttgattgaagtgataggcttgtgctgaggaaatacatttcttttgttctgtttttctctttcacgggattaagttttgagtctgtaacgttagttgtttgtagcaagtttctatttcggatcttaagtttgtgcactgtaagccaaatttcatttcaagagtggttcgttggaataataagaataataaattacgtttc

SEQ ID NO: 1205 - DNA, 414 bp, Zea mays
  Clone ID: 700104707_FLI
ctgcgttgccccctcatgcagacgtgtaccatctcggcatccagtcgcagcgctcggccatcgccagccagaggtctggacagctgcaaaggcccatccagaaatggaagggccctgacaagatcagcaggatctatggagactggatagatgagaacgaatagaagaaggatcttctacggtgggccgaagggaagctgttacttggtatccgtccgactccacatcagctggtggaagctttacctggcttagaagatctcgttagcgctgcaaaaccagagtcaagatcatctttgcaagacctgtattggggagataaactgctggaacatagtgccgctttcttccgttgaactcagtagcattgctatgcttgtgtaatttgtgtgttggatggaggagcataatagc

SEQ ID NO: 1206 - DNA, 2096 bp, Zea mays
  Clone ID: 700104722_FLI
gtgcttataggggacggcaagacaaagaaggttgtactcctttacactgggctgctattcgggggaaccttgaggcatgcactgtgctagttcaggttggcaaaaaggatgatttgatggtgaaagacaaaactggcttaactccagcacagcttgctgccgataagaatcatcggcaaattgcgtttttcctcgacaacgctagaagggtacatgacagaggatgtggtgcgaacaccagatttgggaaattgtcaaaattaggccttgcaccttttctttggtgcaccattattggcatgcttattacatacgtacactctgttatattaggacaatatgtcatgactatgacagcaccatttgggatgttcgcatggtcaggagtttttcttgcaactgctgggttggtcatgttctataaatgtagcaggaaagatccgggttacatcagcataaatacaaggggctcgcaaaatcaaagggacgatgaaccactgctgaagatggagttagaaaatcctgcgcttctttttggcaactggtcacaactttgtataacctgcaaaatagtcagacctgttcgttcgaaacattgttctacatgtgatcgttgcgtggagcagtttgatcaccattgcccttgggtatctaattgcataggaaagaagaacaaatgggaattcttcatgttcctcaccttagaagtttttgcaatgatcattactggctctgctgccattataagacttgtaagggatccagattctccatcatcttttggtgcttggattcattattctgcgtttcagcatcctggggttgtttcatttctcgcattggattgtttccttttctttggagttgcagttcttacagtttctcaagcatcacagatagcaaggaacattacaacaaatgagatggcaaattccatgagatatgcatatctcagaggcccaggtggcagattcaggaacccgtatgatcatgggattcgcaagaactgctctgacttcttgttaaatggatacaatgaggacactgaacggctagaccagacattgcacactgatgaggagatgggaatgatacagatgacaagagcggtttcgcagaatggtgacaatcatttacatcatggtaatggcacggaacatagttgcgctgattcacaggcaagcccaaaacctcatagccaagtgggttcgcctcagtgttgtgatcacagtaagaggactgataggacactgttgggcctaggtttgggccttgggcgaaacagtgcatcccggcagtatgttcggtctcttatcccattgtgatctatcatttggatatcatgtgttcgtttcagtgtagattggatttgttcactgctccggccccatcttttatacgtgcccttgacatggttcaccatgtaccattggctggtcagggacattgttgggccattagcacaggaatactgagatatatctagtgtttgtagttttggggtgaactcagagaagttgaaggtaacgacttggcttgcgaatatcagctgatctgcactcgggaaatatcagagagcttgtgcagaaaaggtaacagttatgggcttatggcagatgcagtagcatgagatgtcttcataattgttgtgtacatcaggttcagtggtcttgggggcctccttcttctgaaggtcttaaaaacacggttaaccatttattttcagtatgttattaagtattacaggagcttcgttactagaaaaacttcgacatagatcaatgaaagcacgacgaagcaagctttgttacgttgtcacagtaagtcgatgtagggagaatgtgttgttcaagctgctgagtgcaaatgataatattgtccctgtgacatttgtaaatcttgtatgtaatctttgagggtatgaatgtaatatcgtacgaattgtacgattgcttataaatagatgaacaatactgttcacactgaattgagattgcattcacgctttcgctttcaagcaagccgaatatacaaatgtaatgtacatcatgtatctctttgttaatatatgagatgtatcttgatgttgtttggcc

SEQ ID NO: 1207 - DNA, 1050 bp, Zea mays
  Clone ID: 700104736_FLI
tgacggaggtcgaggaggtgaagatggtggcgaagctgctgcccatctggttcacgtgcatcctcttctggacggtctactcccagatgaccaccttctcggtggagcaggccacgcgcatggaccgccacctccgcccgggctccggcgccggcgccggcggcttcgccgtcccggccggctccttctccgtcttcctattcctctccatcctgctcttcacctcgctcaacgagcgcctcctcgtgccgctggccgcccgcctcacgggccgcccgcaggggctcacctcgctgcagcgcgtcggggccgggctcgcgctctccgtcgccgccatggccgtctccgcgctcgtagagaggaagcggcgcgacgcggccaacgggccggaccacgtcgccgtcagcgccttctggctcgtcccgcagtacttcctcgtcggcgccggcgaggccttcgcctacgtgggccagctggagttcttcatccgcgaggcgcccgagcggatgaagtccatgagcaccggcctcttcctcgtcacgctctccatgggcttcttcctcagcagcttcctcgtcttcgccgtcgacgccgccaccgcgggcgcgtggatccggaacaacctcgaccgcggcaggctcgacctcttctactggatgctggccctgctcggcgtcgccaacttcgccgtcttcgtcgtcttcgccaggcggcaccagtacaaggccaccagcttgccggcgtcggtggcgcccgacggcaccgggcacaaggagatggacgacttcgtcgcagtcacggaggccgtggaaggagtggacgtgtagggcgcgcatgtcaggctcacacttcatcggtgggtggcctctgctgtttaattttgcctttgggtagtgtgtatgtgtatggcgaagttttctttctcttgccagtttccagtttgctgctacttcggcctgctctcctgtaaataacataggagacatgctaattgaggccaagtctttatccagttagatcaacaagatattgaattgggcatgaaggctg

SEQ ID NO: 1208 - DNA, 418 bp, Zea mays
  Clone ID: 700104751_FLI
gcggcggaggagatggatccgctcgcccaaatgttcctggagccgccatactaccccagcctggacgccgccaagacgtttctagcggattactgggttcagcttcagcagatggcggaggcctctgctccgtcaagacaaagctgaaacggcgaaatggcacggctgagccaccgaatcgcgcagttttgcagggactgaagatactatgcatgcatttcgttggggccttttgcccttgtggcgatagagtgattcatttctatagcgatcatgtgctattgcactacatgtcgcactagattctcttactatcgttgtgcacagcgttgtacgtgttgtgttctacctagatagattgattcagttagatgtcacttgtattgccaagtaggtcaattggatatggaacttttgt

SEQ ID NO: 1209 - DNA, 1111 bp, Zea mays
  Clone ID: 700104758_FLI
ctcctacacaaacacgagctccgacctgctgcagctcggtgacaagatcaccgctgacgacgcttacaaattcctgctcaactggttcaagaggttcccgcagtacaagtcacacgatttctacatcgccggcgagagctacgccgggcactacgtcccgcagctgtcggagaagatcttcgacggcaacagggcgggggccaaggagagccacgtcaacttgaagggcctgatggtcgggaacgcgctcatggacgacgagacggaccagacgggcatgatcgactacgcctgggaccacgccgtcatctccgaccgggtgtacggcgacgtcaaggccaggtgcgacttcggcatggcgaacgtcaccgacgcctgcgacgccgcgctccaggagtacttcgccgtgtaccgcctcatcgacatgtacagcctctacaccccggtctgcaccgaccccgccagctcgtcggcgccctacgcgcggaaggttgccgttcacggcgccgcccccgggatcttctccagataccgaggatggatcatgaagccagcgggctacgacccctgcacggcggagtactcggaggtctacttcaatcggcccgacgtccaggcggcgctgcacgcgaacgtgacaaagatcggctacaactggacacgctgcagcgatgcgatctacacttggaacgacgccgccttctccaccctccccgtcatccgcaagctggtcgccggcggcctcaggttgtgggtgttcagcggcgacaccgacggaaggatccccgtcacgtcgacgaggctcaccctccacaagctcgggctcaagaccgtccaggagtggacgccgtggtacgaccatctgcaggttggtggatggacgatcgtgtacgagggcctgacattcgtcacgatccgcggcgctgggcatgaggtgcctttgcacgcgccgcggcaggcgctgacgctcttcagcaacttcctggcaggcaccaagatgcccccaacggcgttcccctagctgctgcctctcgcttctaccaaagatgcatgtgtaattcgattggaaaaaaggaaaaggttcaggaataaaagtcagtcaggtttttat

SEQ ID NO: 1210 - DNA, 2062 bp, Zea mays
  Clone ID: 700104787_FLI
aagactaaatctcaacaaagtgaaagctcttcaactgcaagagttatctcagaaagcagtgattcggaagtacatccaataagcaataaatctccacaacactcccctagtccctcaaaagttaaaattgggccgaaaggtggaatcagaaagattaccaatagacgaatcgctgagagaattcttatgagtgtgaagaaaggacaaagggaaatggcatcatctgattctaattttgttagtggatatcttttggcaagggacatgaagcttaggtctgatacacgaaatggaaataaggaattaattgtatcctcacaacagagttctccaagcacaagaagttccaaaaagaagagtacacctcaaattgggaacagctcagcttttgctgaggctcataatgattcaacagaggaagcaaataaccgtcattcagcaacagatggttacgatagttcaaggaaagaagaattcgtcaatgagaatttatgcaagcaggaggtgtacttgagatcatggaaggcaattgagcagggacttcttgtgaaaggattagagatttttggaaggaacagttgtttaattgctcggaaccttcttggtggaatgaagacgtgcaaagatgtttttcaatatatgaattatattgaaaacaacagtgcctctggagctcttagtggtgttgattctcttgttaaaggatatattaagggtactgagttgcgcacaagatcaagatattttagaaggcgaggtaaagtccgtcgtttgaagtacacctggaaatctgcaggttacaatttcaaaaggattaccgaaaggaaggatcagccttgtcgacaatataatccttgtggttgtcaatctacatgcggaaagcagtgtccatgtctttcaaatgggacatgttgtgagaaatactgtgggtgtccaaaaatttgcaagaatcgttttcgaggatgtcactgtgcaaagagccagtgtcgcagccgccaatgtccatgttttgcagctgacagggaatgcgatccggatgtttgcagaaactgttgggttgggtgtggtgatggtacattgggagttccaaaccagagaggagataattatgaatgccggaacatgaaactgcttcttaaacaacaacaaagggtcttacttggaagatcagatgtctctggctggggagcattcctcaagaatagtgttagcaaacatgaataccttggtgagtacactggggaactaatctcacacaaagaagcagataagcgtggaaagatatatgatcgtgagaactcatcgttccttttcaacctgaacaatgagtatgttcttgacgcatacagaatgggtgacaagctgaaatttgccaaccatgcccctgacccgaattgctatgccaaggttatcatggtaactggtgatcatagagtgggcatattcgccaaagaaagaatcctcgctggtgaagagttattctacgattaccgctatgagcctgacagagctcctgcttgggcccgtaagcctgaggcgtcgggagcaaaggatgatgggcaaccgttcaatgggcgtgcaaagaagctcgcccaaaacaaccgaggctgaatctgatttgattctttcattgttaggacaaatttggcagccattcaactaatacaaggaacctgtcattcataggccccaatttatttgaactcgtcattgtaactcgtatgtgcttgaattctccatggcatctggtcctgccatccgtagagttaggtcccgtttgttttgtttgttttgaggaactaaaaattaatccctctattttagtcacattgagtctctagattgtcaaacggcgggactaaaacaaagactaaactatttgtctctagttcctcaagccatgacttaaagggaataaatcacaaattttatttttatccttcctttatttcagttacactaatgatgtaataattgtatgaggtattttggtcctcttagagcatctccaagtgactcttcattttttgctctctatttgactatctatttacgatttcat

SEQ ID NO: 1211 - DNA, 1204 bp, Zea mays
  Clone ID: 700104832_FLI
gttaaaaggaagaggaagaaccagttcaggggtatccgccggcgcccgtggggcaaatgggctgctgagatcagagatcctcgcaagggcgtgcgcgtctggctcggtactttcaactcccccgaagaagctgccagagcttacgacgccgaggcacgcaggatccgcggcaagaaggctaaagtcaacttcccggatgaggttcctacggcggtttctcagaagcgccgtgctgctgggcctgcctctctgaaagcgcctaagatggacgttgaggaggagaagccgatcatcaagctcgcagtgaacaatatgaccaactcaaacgcatatcactaccctgccgtcgtcggccacaacatcatacccgagccattcatgcagactcagaacatgccattcgctcctctggtgaattatgctgccctagtgaacctgtcttcagaccaaggcagcaactcgttcggttgctcggacttcagcctcgagaacgactccaggacccctgacataacttcggtgcctgcgcccgttgccaccttggccgccgttggcgagtctgtgttcgtccagaacaccgccggccatgctgtggcgtctcctgcgacggggaacactggtgttgatctcgccgagttggagccgtatatgaatttcctgatggacggtggttcagacgactcgatcagcactctcttgagctgtgatggatcccaggacgtggtcagcaacatggacctttggagcttcgaggacatgcccatgtctgctggtttctactgaggctgaggcccagcgactggtgcttgtgtacatagggggggacaaagggtaagagcctgcagtaacagagattggctctttctggtacttgcaatttctatcccttcaactctttcttccgcccccgtgtttcaggaataatgttctggagatgaagaaacgcttgcgtgggcgtgcctgcaggcacgcgtgtagtagctgcggtattagtatatatgcttagatgttcagtcacttcctttaagtacaatttggcgctggacatgtaccttattttactatgtatccgtgacaacagctatgtgtctgctccttttattttcttgtctttgcttcaaaaaaatggctctgaacattgcgagtttgtactttgtagacaatatatatatatatatatgtgtgtatgtgcttggttgcttcc

SEQ ID NO: 1212 - DNA, 1373 bp, Zea mays
  Clone ID: 700104836_FLI
cgacgacgaggaaatggcgcaaggggccgccggcgtagtagagacgaggaggcatggtggcaagccgcacgcggtggtggtggcgtacccgctgcagggccacgtcatccccgtggtgcacctggcgctgcggctcgcggcgcggggcttcgccgtcaccttcgttagcacggaggccgtgcacgacaccttcttcgtgtggcccgccactctggccaggcgcctcggcatcgcgtatgtgtcgttctggaccgagccggcgctcatcttcaacctctactaccacatcgacttgctcacccagaacggacactttagatgcaacgagcctcgcaaggacacgatcacctacatcccgggcgtggcggccatcgagcccagcgagctcatgtcgtacctgcaggagatggacaccagctccatcgtccaccgcatcatcttcaaggcgttcgacgaggcccgcggcgccgactacgtgctctgcaacaccgtggaggagctggagccgtcgaccatcgcggcgctgcgcgcctacaggcccttctacgccgtggggcccatcctcccggcgggcttcgcgcgcagcgccgtggccacgtccatgtgggcggagtccgactgctcccggtggctggacgcgcagccggtcgggtccgtgctctacatctccttcggcagctacgcgcacgtgaccaagcaggagctgcgcgagatcgcgggcggcgtgctggccagcggcgcccggttcctgtgggtgatgcgcccggacatcgtgagctccgacgacccggacccgctgcccgaggggttcgccgaggccgcggcggggcgcggcctggtggtccagtggtgctgccaggtggaggtgctctcccacgccgccgtcggcgccttcctcacgcactgcggctggaactccgtcctcgagagcgtgtgggcgggcgtgcccatgctgtgcttcccgctgctcacggaccagctcaccaaccgccgcctcgtcgcgcgggagtggcgtgccggcgtgtccgtcggagaccgcggcgcggtgcgcgccgacgaggtgagggcgcggattgaagcggtcatgggcggggaagacggcctcaagctcagggagcaggtgaagaagctcaggggcacactcgaggctgccgtggcgtccggtggttcgtcgcggcgcaacttcgacgagttcgtcgaggagctgaagcgccggtgcggaggccgctgatccgaaagctcgaggacggcagctgaggtagccccagaatacgtgtgcgatgtacgccttgtatcgtgtgcgtcacataaaaaactgtcttcaatcttgatcgaagcgtgtatgccgtgtacggtgggcattattgttgtgc

SEQ ID NO: 1213 - DNA, 1591 bp, Zea mays
  Clone ID: 700104953_FLI
accgctgaggctattgagaagatcttgacccacaacagcaagggcatcaactaccagatcctttccaacccagagttccttgcggagggcactgccattgaggacctgttcaagcctgacagagtgcttatcggtggccgggagacccctgagggcaggaaggccgtccaggctctcaaggatgtgtacgctcactgggttcccgaggacaggatcctcaccaccaacctgtggtctgctgagctctccaagctcgctgccaacgcgttcctggcacagaggatctcctctgtgaacgccatctccgccctctgcgaggccaccggcgcgaatgtgactgaggtggcttacgccgtgggcaaggacacgaggattggccccaagttcctgaacgccagtgttgggttcggtgggtcttgcttccagaaggacatcctgaacctggtgtacatctgcgagtgcaatggcctgcccgaggtggccaactactggaagcaggtgatcaagatcaacgactaccagaagagccggttcgtgaaccgcgtcgtgtcgtccatgttcaacaccgttgccggcaagaagatcgccgttctcggcttcgccttcaagaaggacaccggcgacaccagggagaccccggccatcgatgtctgcaagggcctgctgggtgacaaggcccagatcagcatctacgacccccaggtgacggaggaccagatccagcgggacctagccatgaacaagttcgactgggaccacccgatgcacctgcagccgacgagcccgacggccgtgaagcaggtgagctgcgtgtgggacgcgtacgaggccaccaagggcgcccacgggctgtgcatcctgaccgagtgggacgagttcaagaccctggactaccagaagatcttcgacaacatgcagaagcccgccttcgtcttcgacggccgcaacatcgtcgactccgagaagctgagggagatcggcttcatcgtctactccatcggcaagccgctcgacgcctggctcaaggacatgcccgcggtcgcctaatcccacccccctcacccatggattggattccgggaaggaagaggagagaagctggttgaccgttctttattacagtttgtttttgcaggctacgctaccgattttctcttgtgtcaggcataaaaaaaggttggacgggctgctagtattccctgctgtttggtgttttcgtatcggaggacgtctgtagatgtacaattcctcaggccccttgtgttcggcttgaggaagtttccgttgtaccctggacctgctatagccggttgattcttcaattgtattcctaaaagttactacacagtcgatatgttccttttcttttttgcatagtagcaatacctgtcccacatcagtcacagtaaacatgcgctgctgttaaggaaatgcgtgcagggcattttctttgataacggtgtaatctctctatttcccccttccactgtttcacatgaatcgtgaacggctcacgtgtatatggtttcgtacctgcctgaggtcggttgcctgtaccgaaatttggcttaagagtttttctgtttccact

SEQ ID NO: 1214 - DNA, 2077 bp, Zea mays
  Clone ID: 700104977_FLI
agctgcggtgctctgctcagagagcttcagcaaatctgggcagaagtaggggaaagtgagggcgagaagaacaaggcgttgctggacatcgaaagagagtgcctggaagtctaccgcaggaaggtggacgatgccaatcggactagggtccagctgcaccagtcagtggctgccaaagaagctgaggttgcatctctgatggcaacccttggggagcacaagctgtacttgaagaaagacaagggcgttgtgccactcaaggaacaacttgccaccgtcgccccagtactggagagcttgaaatgcaagaaagaggaaaggatcaaacagttctctgatattaggtcacagattgagaagatccgctttgagttaagtgaatataatgatcagggtgatgacccgagcagtcttgctgctgaggaacacgatttgtcgatgaggaagcttaatagttaccaaacacagcttcgtgcccttcagaaagataagtctgagcgcctccgcaaggttctggagtatataaatgaagtacattccttatgtggagtccttggaattgattttggaagtactgtacatgaagttcatcccagtttgcatcagaatggtgttgagcagtccagaaatatcagtaacagcacactggagggccttgctagtacaatttataagctaaaagcggaacgaaagtctagaatccaaggcgagagagatcatggaatcgttgtgtcaactttggaaactcatggactctcctgaagaagaaaagagacagtttagtaaggtaatgagcagcctcatattacctgaggagggaatcacgtcacctggagttctctccgaggaaacaatcgagaagatggaatttgaggtcgagaggttaacaagactaaagaccagcagactgaaggaaatcgtcatgaaaaggagggcagagttagaagcgatctgccagaatgcacacatagaacctgatgtcagcacggcccctgaacagactgatgctttgatcgattctggcctcatcgacccttctgagctcctggcgaatattgagtcacaaatattaaaagcgaaagaagagtctcttagtcggaaagatataatggacaggataaatagatggattgctgcttgcgatgaagaggcttggcttgaagaatataaccaggacccaaagaggtacagtgctggaaggggtgctcatataaaccttaaacgggcagaaaaggcacggattttggttagaaaaatcccaagtatggtggacgacttgataaaccgaacctttgcttgggaaaacgcaagaaataaaccctttctctatgatgggggacgcctaatatctgtactagaagagtacaggcttagccggcatcagaaagaagaggaaaatcgacggtaccgggaccagaagaagatggagagcatcctacttgcagagaaagaagcgatcttcggatctagaccaagcccaaggaagacgagcagcttaagtaggaaggcaaatgggtaccggccaaatgggaacaccaacggactcaagactccaactcctcgccgattgtctctcggcagtgctactcctgagcttttgacgcccagatcgtactctggccataatagatactttggcgatgtgaggcgtctatcgacttcccatctgaacttcggtgatgattcgctgtcaacgtttacatccatcagtggctctgaaccagaatccccctctattggatgaacaccgtactgctggatgactggatggtcagtattgcgtattgtaaatgggcaccatgttaccaagttcttgcactagcatgtacattcctgatgtcatatatttagctcatattggagtactaagtattggacgggttgacttggtttgggttgggtgtggagttgaattgtttcaagttgatggctttgtagattgacaattaggcggaaagatgtaggggagcgatctggatttgggcagtcagctgtaacatatcataacttatgtgtttggtttgtgtgtgcaaccttgtgtacaggtgcaatgaaaaatctgtgtgcagaatctact

SEQ ID NO: 1215 - DNA, 1083 bp, Zea mays
  Clone ID: 700104985_FLI
gggcgacgcaattgacatcccctcgcctaccccagctctacccgcgacgaagcatcaccaggaaggatgacgtgctcaatggatctcccggccaagggcgggttcagcttcgacctgtgccgccgcaacagtatgctggagaagaacgggctcaaactcccgggattcaggaagaccggaacaaccatcgtcggcctcgtctttcaggatggggttgttcttggggcagacacaagagcaactgaggggcctatagttgctgataagaattgtgagaagatccactttatggcgccaaacatttattgttgtggagcaggaactgctgctgacactgaggctgttacagacatggtcagctcgcagctacagctgcaccgttacgcaacgggtcgcgaatctagagtcgtaactgctcttacactgctgaagtcacatctctttaggtatcaaggccatgtcagtgctgcccttgttcttggtggagtggattgtactggaccgcatcttcacactgtttatccacacggctccactgatactcttccttttgccacgatgggttctggatcccttgctgcaatgtcagtgtttgaatcgaagtataaagagggcctcactagggaagagggaatacaactggtgtcagaagcaatatgtgcaggtatcttcaatgacttgggtagtggaagcaatgtggatgtctgcgtgataaccaaggggaagacagaatacttgagaaaccaccagttgccgaatcccagaacttatgttagttcaaagggatatagcttcaccaaggggcagactgaggtgttgtccgcaaagatcacacatctcaagcagaaggttgaggtcactgagggcggtgatgctatggaggagtgatcctgtatgcttgcatccaggtaaaacagtcatactcttttttatattattttacttagtggaggagctaggaaaagacagaatggagatctttgttgtactttctcgactgaatccggactttcatgtcaaaggtgtttccaattaaatgcttgtttctgaatgtttaaactgcaatggtatgttacaactttc

SEQ ID NO: 1216 - DNA, 651 bp, Zea mays
  Clone ID: 700105004_FLI
atccacgatgttagagatcattctaaactaaatactacgttccgatctcctttcattggagaggtggtggggattgagaagaagattgtagcgaacgtgtcacccgacaactctgatgttcagtatcagtttatgcttgaacaacgtgttcttcggcggctttgtgttcagaagatagtggtgcctacaccgatgaaggacaggctagacaaggatacaaacttcacgatagcggaggatggatctcttcatgtccttccaaaaagcgtctaacggattcacatcaggggaaggaaatgacaatgtagggaaggaactcatttcatgcccgcgaaatgcaggagcaagcccatacacacgtctgagttcctctgtgctcatattctcatttaagggacctcgctcgtttgtagtgtctgtttggaaatattaaatctttccttcactcattagttctagtgttgattttcaccataatatcgcttcaatgtatgcgtgtggaagtttggatttctgaattgtttgttgttacttaagttgtgtttggttccggaatatggtgggacggagctgtttcactctcaatttattgttgtttggattggttctgtgtagaatagagtggctataaaaaaattatgctcaaatgtt

SEQ ID NO: 1217 - DNA, 1026 bp, Zea mays
  Clone ID: 700105015_FLI
gattttcttgctagcctcgaatcgcgatcgagtagctcatcagctgattcacaagtgcaagcatttgatgaagaggtttgcagttcaggagagcgagatggcgcgcatgctggtgctcatgtcgcgctcgcacggccaggaccaggcgctgccactgtcggcctgcctcgccggcggccagcaaggcgaggaccggcaggcgccggagcgcgtgttcgtgtgcaagacgtgcaaccgcgtgttcccgtcgttccaggcgctgggcggccaccgcgccagccacaagaagccgcggctggacggggacggcggcggcgacccctcgctcgccaagcccaagctgcacggctgctccgtctgcggcctcgagttcgccatcggccaggccctcggcggccacatgaggcgccaccgcgccatgacgggcggcgtgccggcggtgccgcccgcgacgacgaggatcgtcgtcgacgagaagccggacggcgacgtcgtcggcatcatccgccacgaccacgtccacgaccacggcggcgttaagcagccccgcggcgggctgtggctcgacctcaactacccgccgtgcgacgacggccgcgacgcggtggaggcggagtgtggccgcaatgccgccgccgccacggggatcacgttccatcagttcctcgacactgccaccatggccgtcgactgccttggctactagatagatagataccaccaagctccatgattcttctcccctgccgcgtactactggtgcaccggtctcttcttcttctttcttttcttttctggaatcttcttcctcatttgcttctgcgcggagggggagaaatccacattttgtagcagtagtagaatgaaggtgcctactgcctaatgcatgcatgggcatggctgatgtgcatgaaggttttgggatgtctttgagctgctcggtggataatctggaggattgattccaccaaagctagcttattttgccttgggtttcatgttattatggataaaaaccctttggtc

SEQ ID NO: 1218 - DNA, 716 bp, Zea mays
  Clone ID: 700105031_FLI
ctggctgcaacagcaaagatgccagatggcctcgcagttgcaatgcaaagtggagttgccccacaagttgcacagccacccataacaaatcccatcacataccatacggctgattatggacagaacccggggttaaaatattttgatagggctcgtgaaacgagctccagtgcaatccctgatgacggcaacagaattgctggtgaggtcaagaagaagaaaagaaaacctgaatatgaccctgtagatacacaagctaacctaccaagggctcccatgccgcacgggagcgagaagcaaaagccttctaagcctgctgacgaggccagtgctggtagcctgccctccatggcgacaactcaaactgtgcttggcctaccgtcggtgcttggtcataaccaacaacctagctgattctttcggcgtagtgttggacatttggttctccttataggcctttttcagctgctgtaacaaattatggcctttccatgtgttcagcatcgattgttgagactaacatgttcccgagtagagaggatatttgatcactctttacttttccagcattgcatggttggtacccttgcccagattatctgtgcagcgctgatagatatgatctgcaaccccttcaaataccagttgtaattatgaatattttctcgagacatgtactgctcatattgtgcgaagcgatgtgcagattttctttt

SEQ ID NO: 1219 - DNA, 1160 bp, Zea mays
  Clone ID: 700105068_FLI
cgtggcgacaaatcacccgcggccttttatcccgcaaccagcagcagcgaggccgcgagaggcaggtagtagccgcacgccacatcaacccaccacggatggccggcggcggcgaccgtgacgcatccgacgcggagctccgcgcggggttcgagaccctggccgtgacgcggccggacccttccgcgggggtctacgaggtccgcctcaaccgcccggcgcagcgcaacgcgctgagcccggccgcgttcgcggagatcccgcgcgccatgtctctgctggaccgcgccccctcggcgcgcgccgtggtgctgtccgctgcgggcccgcacttctgcgcgggcatcgagctcgggggccccggggacccgctgtccgccgcctccgcctccgccgaccccgtggccgccgcggaggggctccgccgcgcggtcctcgacatgcaggcggcctcacggccatcgagcggtgccggaagcccgtcgtcgcggcggtgcacggcgcctgcgtcggcggcggcgtcgacctcgtggccgcctgcgacatcaggtgctgctccagggacgcctccttcgtgctcaaggaggtggacatggccatcgtcgccgacctcggcgcgctgcagcgcctcccacggatcatcggctacggcaacgctgctgacctcgcgctcaccggacgcaagatcaccgccatggaggccaaggagatggggttggttaccagggtattcgattccaagcaagacttggatgcgggcgtcgcaaagatcgccaaagaaatagctgacaagtcggcatgggcggtgatgggaaccaaggccgttctgctgagaagcagggatgcgaccatagaacaaggcctggagcatgtagccacatggaacgcgggtatgatgaggtcgaacgatctgaaggaggccatcagagccttcctggagaagcggaagcctgtgttctccaagctgtaatgatcagataccatcataccatacctctgtgttacttcacaagtggtgctacgtatctggaaatgcaaaggaataaagtgtgctaagagtagacaagaatgccgtctgcggtagcatttggcgaaacatccattcttgtaaggggaaaaaaaaatgcctgttctcgatggagctgtcaaggcatttttcc

SEQ ID NO: 1220 - DNA, 1032 bp, Zea mays
  Clone ID: 700105070_FLI
gccggttcgttctcggacctttcgtctcgctctcgcccgcccgcccgaccccgcggagccctagcctagccttgccccgaccgcggattccccctcggccgccgcgcgcccgcacccgcaccgcgatgatgaactgcgccggaggcggagaccccgtggaggacttcctgatctccggcgccgtcgacgacgaagatctagccatcttctgcgacggaggacttgggattgagggtgtcaatggagatgcttgtggatttgagcagtctaatttgggcaaaaggagtagagatgaaccatgttcatctggtctaaaatccaaagcttgtcgtgaaaaaatgaggagggacaagctgaatgacaggttcctggaattaagttcggttatgaatcctggaaaacaagcaaagttggataaagccaatatcttgagcgacgcagcccgtatggtggcacaacttagaggtgaggcagaaaagcttaaagaatcaaatgagaagctgcgggagaatatcaaggacctgaaggaggagaagaatgagctccgcgaagagaaagtgaggctgaaggtagagaaagataggctggagcagcaagtcaaagccatgagtgtagctcctacaggatatgttccccatctccctcatccagcttcataccacccggctgcatttgctccatttgtgccgccacagcaagccgcaggcaacaaaagtgctccaatccctgcacctttccctgggatggcaatgtggcagtggctgcctccgaccatcgtggacacaactcaagacccaaagctctggccgccaaatgcttaggggcagagctagctgccttggggtgttgactcgccgtgccgtttcatgcattgggcggcagatcagagtgtcagttagtaggtccctggagaggaggaatcaagtctcgcaactcgcgtcatgtttatgctgtaacagttgcttccagcagtcgtcatcaacttgctttgttctattgaagggtgatgcatgtaattaatatgtggatctt

SEQ ID NO: 1221 - DNA, 1168 bp, Zea mays
  Clone ID: 700105086_FLI
cgtcatgttcgagtcgaccggcgcgcgcctccccgcctgcagcctggctgctgcactgctgcctatatattgtctccgcacctggcggtgctgcgacacgcatccgaccgacaccgtcgacgacgcttgcgatcgagcgttccggtcgagagccagaggggggatatattacttagagagagagaggctagtgtctgcgtgtggtggcgcgcggtcggcggcggccatggcggcgtggaaggacggctacttggacatggtgctcatcccgctcgccgtcctcttccccgccgtgtaccacctctggctgtaccgcgccgtccgccgcagcccgctcagctccaccgtcggcatcagcgccgccgcgcgccgcatctgggtcttctccatgatgaagaacaacgagaagcaggcgatcatcgtagtgcagtcgatcaggaacgtgctaatggcctccacgctggtgggcacgacgtcgatcctcttctgcacgggcgtggcggccgtgctgagcagcacctacgccgtgaagaagccgctcagcgacgccgtcttcggcgcgcacggcgcgcacatgatggcgctcaagtacctgctcatcctcgccgtcttcctcctcgccttcctctgccacagcctggccatctgcacgctcaacacggcctccttcctggtcaacgcgctctcgccgtcgccgcacctgcacctccccggcgtcacggccgaatacgtcgccgacgtcatggagaggggcttcctgctcagcctcgccggcaaccggctcttcttcgccggcgcgcccctcctgctctggatctccgggcccgtgttcccctgcgtatgctccatggccatgatctctgtactctacaacatggacgtggtcgatgacgccgacgatggccggagcagcagcggcggtggagccaatgccgccgtcgtcatggatggcgacagtgacgatcagagcatggaagtcgtctgatgatgaactgatgacgggacaaatgcagaaacgaattggaaaaaaaaaacaagaggcatcggcatggaatatgctgcgctttacatacaataactagtttgtgctcctgcaactgactagtgggttgggtcggtgaatttttttttatcaacccgtgtaaggaaatatatatcgcattttttt

SEQ ID NO: 1222 - DNA, 1547 bp, Zea mays
  Clone ID: 700105135_FLI
ccgagctcgagcgcgcgctcgctgtcgactccgccaccgcggcctccaacccggaccccgccggccccatggtctccgtcgacagcctccgcgcctacctccagatcgtcgacgtcgcctccatactcaggctcgacagggacatagcggatcacgctttcgagctcttcaaggattgctcgtccgcgacttgcctcaggaatcggagcgtcgaggcgctcgcgaccgccgcgctcgtgcaggctatccgcgaggcgcagcaaccacggacgctgcaggaaatctctactgctagcaatcttcctcaaaaggagataggaaaatacatcaaaatactcggcgaatctctgaaactgagtcaaccacttaacagcaactcaatagctgttcatatgcccagattttgcagcttgctccagctgaataaatctgctcaggaacttgcagctcatattggtgaggtggttgttaataagtgcttctgcacacggcggaatcccataagtatatctgctgctgctatctaccttgcatgtcagcttgaagacaaacgcaaaactcaggcagagatctgtaaggttacgggcctcacggaggtcacactacgcaaagtgtacaaagaactgttggagaattgggatgatttgctcccccctgactatacacctgccacaccaccagagaaagcttttcccatgaccaacatttactcagggcgctcagcgagtggcaaggatatgtatcaggataagatattcgagagtattaagcaaaaatgccctgagcctgcagagcctgaccacatggtcgtggtgaaagaagagggagacaagaaaacagctgctcttggccgtccgcctacaaaacttgaccatcctgagttaggcaaggtgttccggccaccaaatgcccctttctcaacatctcctaaatctgatcgtgacaaaacggaaactagcttacgtggattcaaccttaatgaggtatcatgtgcaatggactctgatagaacagacatcacagtgaaaccaacttttggtgatcgattgtcaaatgatcccaatgcgaatccatctcccaacaggcagcctttaccctggcagcttaagcaaggggcgcctgcaactgctccatcatattcaaggcttcgcgagcagcagtcgggcctggatcttgtagctgctctgaagggggttgggaaaaggagtcctggggatagtgatgtccgggataaagaagggaagtgaataattggtgctttgtagatggggaacgactattaagtgttaaatttgcaactatggtcggatcacgatccaaagttccagaggactcgcacacctaagtcttgcttgcacaacgttgttgctttgtagatgtatgtctgtagtagagttagtttagccacctctatggctcaatcactctgtatttcttttgcctcatgccggggctgtgaaatgtcatttcaggcgcattagcttctgttgtaaaattttactagtgtttatgaattatttatctgactaaagaggtgtttacttttt

SEQ ID NO: 1223 - DNA, 1379 bp, Zea mays
  Clone ID: 700105137_FLI
cagagacagagaagcagagaacccctcctcgacctcggcctctcctcttcctcctccgctcccaaaatcctagggttttgctcgccgcggcgcgatggagcccacctcgtcggcgtcgatcgcgcggcagacgtgggagctggagaacaacattcccgcggcggcctccgacccggacgcgatggacgcgatctaccgctacgacgacgcgtctcaggcgcgggcgcagcaggagaagccttgggccaacgacccgcaccacttccgccgcaccaagatctccgcgctcgcgctgctcaagatggtcgtccacgcccgcgccgggggcaccatcgaggtcatggggctcatgcagggcaagtgtgagggcgacgccatcatcgttatggacgcattcgcgctccccgttgagggcaccgagaccagggtcaatgcccaggccgatgcctacgagtacatggttgactactcaaccatcaacaagcaggctggaaggttggagaatgtggttggctggtatcactcacaccctggctatggatgctggctgtcaggaatcgacgtgtcaactcagatgctcaatcaacaattcacagaaccattcttggctgttgtgatagaccccacaaggaccgtttctgctggtaaagtggagattggagcctttagaacatacccaaaagattacaagccaccagatgagcctgtatctgagtatcagactattccactcaacaagatagaagattttggtgtccattgcaaatcgtactatgctttggatataacttatttcaagtcatccctggattctcacctccttgatctgctctggaacaaatactgggtcaacacgctatcttcatcatcacttctgggcaacagagattatgttgctgggcagatctttgatttagctgataaactagagcaagctgaaggccagctggcacacagtcgatttggtggtatgattatgccttcacaacgaaagaaagagcaagaagagtctccactggctaaggtaacacgagatagctccaaaatcacagctgagcaggttcacggcctcatgtcacaggtcataaaagacatccttttcaactctgttcacccgtcaagcaaggcaagcacaagtgctccaccagattcatcaggtcctgagcctatggttgaagcctgagttccagcgaaaggggacattggatatttgtgttatgctatctgattcagaaggtgcaaaacaagttatattttgagtactgaatcatcatgtaattatgagttgccttcatcttgggctgccactgagagggtgtgccggttagcaatctcatgtattggatttcagatcagtattcgaagctttcataacgagg

SEQ ID NO: 1224 - DNA, 932 bp, Zea mays
  Clone ID: 700105142_FLI
tctgctttgcttaatcaaatgttaggctacggatctgtttctctttctcatagagtcatgtagtcttctcttgttgttgcgtgacgcttgcttgcagaggcgactcccaagggcattctgaagctgatgaacactgatggcctcacaatctaccacatcaagagccaccttcagaaataccgcatagccaagtacatgcccgtgtcatcgacgtccgaagggaaagaggagaaacgagctgctgccgccaatgacgtgcagaatctcgacctcggcaccgggatgaagatcacggaagcgctacgcgtccagctcgacgtgcagaggcgcctccacgagcagctcgagatccagaggaatctgcagctgaggatcgaggcgcaaggcaagaagctgcagaagatgttcgaggagcagatgaagacgagcaggaccgtgatggggccgccgcagggcgccgacgtcgccttcatcggcgccggcgagcaggaggaggaggtggaggtggaggacgcgttcgacgacgtgcagctactggcggccgtgtccagcgccagcgtcggctaccgcgacggcggattccagtcgaagataagctagcctgtcgcctccagcctccaggcttcagctggcttgtcggcattgtaattgtagggtttgactacaaatgccatcgtagctatccatggaagatgatgcctacaatgtttgggacgacgacgacgagtgttttggagggaaaaaaaggaaactaaattgttggggatgtaggcaagggacgatcctcgtcgtccacttatgtcgttgattggaaggtgtgatcgtgcacctagcctaaccacttagttttaaaagttctctctgaactttagaatgtgagtgtctatttttgcttatttatttttaataaaaaaccatcaggtctcttatag

SEQ ID NO: 1225 - DNA, 570 bp, Zea mays
  Clone ID: 700105163_FLI
cttctccaggtaaggaaagggttcgtactcatggcgccgccgcagccaaagtcgggcctcttcgttggcatcaacaagggtcatgtcgtcaccaagcgcgagctgcctccccgcccgtgccaccgcaaggggaaatcaacgaagagggtgtctatggtcaggggcctgatcagagaggttgctgggtttgctccttatgagaagcgtatcactgagcttctgaaggttggcaaggacaagcgtgccctgaagcttgctaagagaaagcttggaactcacaagagggcaaagaagaagagagaggagatggcgggcgtcctcaggaagatgaggtcggctggtacgcacactgacaaaaagaaatagagagcatttcaagttcatggagctggctgccagagattatgttccagtgtctgattttccatacatgtagaacctaatagacatgtcaaagtattatgtatcgaaccagctcatgggattttgctccttccaatgcatccagggtttatgtatcgaaccaatttatgggatcttgctcttattctaatgcatccatggtttgtg

SEQ ID NO: 1226 - DNA, 704 bp, Zea mays
  Clone ID: 700105172_FLI
acatttaccaaggtgtacaaacgtggagctgtaggtcggtccattgacattagtcagttcagtggatacgatgagttgaagcatgctctggctcgcatgtttagtatggaggggcaacttgaggaacggcagagaataggctggaaacttgtctacaaggatcatgaggatgacatcctacttcttggtgatgacccttgggaggaatttgtcaactgtgtgaagtgcattaggatcctgtcgcctcaggaagtgcagcagattagcttggatggggatctggggaacaacattctccccaaccaggcctgcagcagctccgacggcggcaatgcctggagagctcgctgcgatcagaactccggtaacccatctactggttcatatgaccagtttgaatgacctaacttgccggtccatacatgccggatcacaagtaggcgtctcgtgaggggatggcaggtgcagaatgtttgtagatgtgtcgccagatttacgtccgggagagcgaatcgctcgatggattggtagtgtttttgttcatatgtgtaggttttctcacatggaaggaatgtagtatagaggatgggagatgaagattaccgtaggtgaaagatgatgttgtaccatgaggggggaaaacatgcttgtagtagtaaagactgctgcttcagtccacgtatctaaaaagttcttctctgacc

SEQ ID NO: 1227 - DNA, 1294 bp, Zea mays
  Clone ID: 700105191_FLI
tcccctttgcaagtatagtctctctgctaagcgaagcgaagcttcaagctagtctcggcggctctagaagacgatgggcaaggacgacgtgatcgagagcggcgctggcggcggcgagttcgctgccaaggactacacggaccctcccccggcgccgctgatcgacgcggcggagctggggtcctggtcgctgtaccgcgccgtgatcgccgagttcatcgccacgctgctgttcctgtacatcacggtggccaccgtgatcgggtacaagcaccagacggacgcgtcggcgtcgggcgccgacgcggcgtgcggcggcgtgggcgtgctgggcatcgcctgggccttcggcggcatgatcttcgtcctcgtctactgcaccgccggcatctcggggggccacatcaaccccgccgtcaccttcggcctcttcctggcgcgcaaggtctccctggtgcgcgcgctgctctacatcgtggcgcagtgcctcggcgccatctgcggcgtcggcctcgtcaaggcgttccagagcgcctacttcgacaggtacggcggcggcgccaactcgctcgcctccggctactcccgcggcaccggcctcggcgccgagatcatcggcaccttcgtgctcgtctacaccgtcttctccgccaccgaccccaagcgcaacgcccgcgactcccacgtcccggttctggctcccctccccatcggcttcgccgtgttcatggtgcacctggccaccatccccgtcaccggcaccggcatcaacccggccaggagcctgggcgccgccgtcatctacaacaaggacaagccctgggacgaccactggatcttctgggtgggccctctcgtgggcgctgccatcgcggccttctaccaccagtacatcctccgggctggcgccatcaaggccctcggctccttcaggagcaacgcgtgatgagcggggcttggctgtggagcaatggcgggcgacctacgggcggggggccgtgagcgaggagaatgccatcattcatcgatcgacttgggtgccggtggttggttcgggtcgccttttttttgtttcagcagctgctgcgttgcgcgcgtgcgtgagatttggtttggtttcgttcccctgcaatgtaatcatgtcgtgactctcaagggattattccgctctgctcttatggtctctgttttctatttaatgattgttattaccatgtagcagtaaccatcgtcatcagtgagaaccttgttgcttctgtctaaatcaaccgagacgtgtggagtggatggatcg

SEQ ID NO: 1228 - DNA, 1555 bp, Zea mays
  Clone ID: 700105257_FLI
gacaaactcgagtgtagtcactcttggcaaaatgaggataaaatgccttgaggaactgagcactctgttaagttgcttgaagcttcctctaacatcctcaaagcctaccattcgtgatttctgcattaaaagcgcttccatagttttctgtactgtatctagctccacaaaaataaccgctaacaaaaaggtagagtttcttgtggttgatgaggctgcccagctgaaagaatgtgaaacactgatccctttgcgtctgtggaccttaaagcatgctgttctaattggtgatgagtgccaattaccagcaacagtcaaaagcaaggtttgcactgatgcattatttggaagaagcctctttgaaaggttgagttcacttggacacgaaaagcatctacttaatatgcaatacagaatgcatccttccattagtattttcccgaacactagcttttatgaagggaggatctcagatgccactaatgtcatggaaaaagaacaccgaaggatgtatcttccaggttctatgtttggtccttactcatttataaatattgaagatggaagggaggaacgtgatgaacttggccatagcaaaagaaactttgtagaagctgctgtcattgaagaaatattataccgtctccgaagagcttgctttaaaaccaaaaggaaagtcacggttggtgtcatatgcccatacaatgctcaagttgtagcaatccaagggaaaatagagaaaatgaggttcgacccattgcaagtaaaaactaattctgtcgatggctttcaaggtggtgaagaagacatcatcattttatcaactgtgaggtcaaactcggttgggaaggtaggttttctttcaaacgcacagcgggcaaatgtgtgtttgacacgggcaagacattgcctttggatcctaggaaatgcaacaactctagcaagcagtggatctatttggtctgatctagttcgtgatgcaaaggataggcggtgtttcttcaatgccagtagcgactatgttatctctcacgtgattgctaagcaaaggagagatctcgacagagttaatgttgaaaagagcatccatatctcaagttccaaaaactgcagggtttgggttgaaacgcgatccccaaatgacctgaatgaacagggcacttcttcgacgagtgtttcacattacgctggaatcccgtcaagtgacattgttgttgtttctgaattccagcgtccaagcaataaaaatgaggatgtcgaggatataactgtcattccaaataaagagaatgataaggatatcaatgctatgcccgttattccagataaagggaatgtcgttgatggcaaccatatcctcgccattccttgcgccatgttgagtaatctagctagatggtgtatccgttcgttccgatcttaattgttcctttatgtctcctatccctttttactcctaagtttacagcattatatataagtgtctctccataacatggtcggatgtttgatttttgtaatgtgggtttgaataatgaaaatgtatgtttgggcc

SEQ ID NO: 1229 - DNA, 445 bp, Zea mays
  Clone ID: 700105275_FLI
ttcgttgagcatcacaagacacaagcgtttacctttatctcatcacatgacgaaagtgtttggaacttggatggagagatgtttcaggcatgtgaggtatctgtccaagcgtgccgggggcttgtcaacttctttgcttcggggccagagctgtagtaatgatactcgtaagttcctctttgcatgaacgaaggatgccaggagttcatattttttatttagagagtcccttatttcgacatgttgacatgttgacatgttgtgatgttgtacactcttatttgtattttagtggagacctagaacactttgttgatagatatactgttaatatttgttgatagctatgtggcatggaaactacaacccatttgtgctatagaatagaggaacaaaaggttttgattgaattaatgaagtaaaagtttactttctgttttgcgag

SEQ ID NO: 1230 - DNA, 935 bp, Zea mays
  Clone ID: 700105277_FLI
caggcgctctgaagaaatatggcgcagaagtaacttgtgctgatagcgggaagaaagcaatcacgcaactgaaacctcctcacagttttgatgcttgtttcatggacatacagatgcctgaaatggatggatttgaagccacaaaaaggattagagtgatggaaagagatctaaatgagcaaatagaacgtggagaagccccaccggaatgcgcagggctccggcagtggcgaactccaatattagccatgacagcagatgttatccaggcgacgcacgaacagtgcttaaaatctgaaatggacggttatgtatccaagccattcgagggcgagcaattgtacagagaagtagctcgctttttccaaaatcaagaccaagttcagtaggtaggcttatatggaggagtgtaaagtagtggaggatatcgccaacggttcacccgtcgaggccgaaagaattttgtcaaagatctcatcttcttgaaagtgggcatcaattcgcaaagttagagggcccctattaaaacactagaaatgctgggatgtggccgccagttaggtggaaacgatttaggctggagatggaaccacccatgttcggatgcttggtacatctgaccaatctgcaaagctaaatgcgcaatgtcttgaaatcaacatgcacgtgcagctattcattcgacgatttgctgaggtcaaggcgtgtgaaaaaaaatcagctgcattcactaactgcaggtgccctctgccactatataatatataagactagggggagaagttttccttcccccggaaggcacggctgtacatattatattagggattggttggttgtttgtgcaggcatttttgtatgcatcatattcggcctgtatgggtcgaagctgtaaagtgtaaatgacacattcaaagatggaagttttgtttgac

SEQ ID NO: 1231 - DNA, 1352 bp, Zea mays
  Clone ID: 700105281_FLI
ggagacacaaacctagcgcaacaagcaatcgaaaaagagatttggctacaaccaattaaccattggccagcagtgtacgtgggaacgatggccctcatgcaggagagtagtagccaggatttgctccaagctcacgacgagctcttgcaccattccctgtgcttcgccaaatcgctcgcgctcgccgtggcgctggacctccgcatccccgacgcgatccaccaccacggggccggcggcgccacccttctccagatcctcgccgagactgcgctccacccaagcaagcttcgcgcccttcgccgcctcatgcgcgtgctcaccgtcacgggcatcttcagcgtcgtcgagcaaccaccagcaggtggtggtgatgattcaaccgtccacacgtcggacgacgaagctgtcgtcgtctacaggttgacggcagccccccgcttcctcgtcagcgacgacgtgagcacggcgaccttggctccctttgtgagtctggcgctccagcctatcgctgcctgtccgcacgccctgggtatctccgcgtggttccggcaggagcagcacgagccgtccccgtatggcctggcgttccgccagaccccaacgatctgggaacatgctgacgacgtaaacgccttgctgaacaaaggcatggccgcggacagccgcttcctcatgccaattgtgctgagggagtgcggcgagacgtttcgtgggatcgactcgttggttgacgtcggtggtggccatggtggcgccgccgccaccatcgccgccgccttcccccacctcaagtgcagcgtgcttgacctcccgcacgttgtcgccggtgctccgtctgatggcaacgtgcagttcgtcgcaggcaatatgtttgagagtattccacctgcaaccgctgttttcctcaagaaaactctacatgactggggtgacgatgagtgtgtcaagatattgaagaattgcaagcaagccatatctccacgggatgcaggtgggaaggtaataatcttggatgtggtagttggatataaacagtcaaacataaagcatcaagagacacaagttatgtttgatttgtatatgatggcggttaacggagttgagcgtgacgagcaagagtggaagaagatcttcactgaagctggattcaaagactacaaaattctacccgtcattggtgatgtatcggtcatcatcgaggtctatccttgaatgctttgtgaacaaaggcctccataataaactgaagaccaagaaggtgttgatagtatattatgaattgttatttgtcctgtacacttgattctttgcgtatttgtaatgacaagttgagtaattgtgtttttgtt

SEQ ID NO: 1232 - DNA, 1057 bp, Zea mays
  Clone ID: 700105307_FLI
ttcggaaacaaattcggtaatttttttaactttttgtgttgtagagagcaaataatacataaaacaacttatataatattttattcgtatttgtactaatgtgtttgataacataagaaaagatcagcatcaaattttatacatatcttttttaaaatattaaatttattctaacagttcggattaccactttcatccctaatcccgggggacccggcggcgcaggtgctcccggccatgaagaacctggagtcggcgctccggtccgcgggggtcgcgggcgtccccgtcacgacggccgtggccaccagcgtgctcggcgcgtcgtacccgccgtcccagggcgccttctccgaggcggccacgacggtgatggcgccgctcgtctcgtacctgtcgtccaggggcgcgccgctgctggtgaacgtgtacccgtacttcgcctactcgggcagcggcgggcaggtggcgctcgggtacgcgctgctgtcgggcgccggcgccggcgccgcgtcgacggtgacggacggcggggcggtgtacactaacatgttcgacgcgatcgtggacgcgacgcacgcggcggtggagaaggccggggtgcaggggctggagctggtggtgtcggagaccggctggccgtcggccggcggcgagggcgccagcgtggagaacgcggcggcgtacaacaacaacgtggtgcggcacgtcgacggcggcacccctcggcggcccgggaaggccctggagacctacctgttcgccatgttcaacgagaacggcaaggccgagggcgtggagcagcacttcggcctcttccagccggacatgagcgaggtctaccacgtcgacttcacggcgggatccccctagggaggctcacccgcttctgtgtttactttatttatgtagtaggaatgatcattcttcattcagagactgatcgacttcatcggagctgctcgatactcgagcggcgcggataggcttactgcgtactggtagtattgttggagacttggagtagcattactatcgacgtgattcattacagtgc

SEQ ID NO: 1233 - DNA, 1026 bp, Zea mays
  Clone ID: 700105312_FLI
gcgcggagcagcacaaccaggacgtgaactccctgggcctcgtctcggccaggaagaccgccgaggcgatcgacatcctgaagctcatgtcgtccacctacatcgtggcgctgtgccaggccgtggacctgcgccacctcgaggagaacatcaaggcgtcggtgaagaacaccgtgacccaggtggccaagaaggtgctgaccatgaacccctcgggcgagctctccagcgcccgcttcagcgagaaggagctgatcagcgccatcgaccgcgaggccgtgttcacgtacgcggaggacgcggccagcgccagcctgccgctgatgcagaagctgcgcgccgtgctggtggaccacgccctcagcagcggcgacgcggagcgggagccctccgtgttctccaagatcaccaggttcgaggaggagctccgcgcggtgctgccccaggaggtggaggccgcccgcgtggcggtcgccgagggcaccgcccccgtggcgaaccggatcgcggacagccggtcgttcccgctgtaccgcttcgtgcgcgaggagctcggctgcgtgttcctgaccggcgagaggctcaagtcccccggcgaggagtgcaacaaggtgttcgtcggcatcagccagggcaagctcgtggaccccatgctcgagtgcctcaaggagtgggacggcaagccgctgcccatcaacatcaagtaaaagaacgccaaggagaagaggagggaggggaggaaatacgtgaaaaaaaataaaacctgtacacgtgtctgtccagatcgtgccgtcgatcgctcttcgttgttgatttttggttgtattgatcgatccgtatgtgtgcgtgcgtgtgtggcgttgctctttcttcttttgtgtagctgtgccctgccaccggccgacgtgcgtgcatgccatggtggcgggcagcgttttctaaggtcatatactgttgttgtgtttaagtacatcttgcgtactcaattccttctaagtaagtatcctaatactagaatgttcctct

SEQ ID NO: 1234 - DNA, 760 bp, Zea mays
  Clone ID: 700105321_FLI
gggccgccagtcctcactcctcaccatttcccaaaccctacccatacccccgccgccgccgccatgccgcccaagctcgacccgtcgcaggtggtggaggtcttcgtccgggtgacgggcggcgaggtcggcgcggcgtcgtccctggcgcccaagatcggcccgctcggtctctccccgaagaagatcggcgaggacattgccaaggagacggccaaggactggaagggcctgcgcgtcaccgtcaagctcactgtccagaaccgccaggccaaggtctccgtcgtcccctccgccgccgcgctcgtcatcaaggcgctcaaggagcccgagagggacaggaagaaggtcaagaacatcaagcacagcggcaacatcggcctcgacgacgtcgtcgagatcgccaggaccatgaggaacaggtccatggccaaggagttggccggcaccgtcaaggagatcctcggcacctgcgtcagcgtcgggtgcaccgtcgacggcaaggaccccaaggacctgcagcaggagattgatgacggcgaggtcgagatcccgtccgcttgaagactagacatccaaggggacttccattggtgctgctgaagtgttgttgttctgcatgccgtcgatgtacctttttcaagcaacgtgttccatctatttttttgtctagctatgttagtgatatcttgtgagagacctcaatgttaccaccgtatctttgtctttgttggatggagagttttaagcggttcaccac

SEQ ID NO: 1235 - DNA, 577 bp, Zea mays
  Clone ID: 700105350_FLI
agcgcagccggagccggcgggaaggcgaagaagggcgcggccgggcgcaaggccggcgggccgaggaagaagtcggtgacgaggtccgtcaaggccgggctgcagtttcccgtcggccgcatcgggcggtacctgaagaagggccggtacgcgcagcgcgtcggcacgggcgcccccgtctacctggccgccgtcctcgagtacctggccgccgaggtgctggagctggccggcaacgctgccaaggacaacaagaagacccgcatcatcccgcgccacgtgctccttgccatccgcaacgacgaggagctcggcaagctgctgtccggcgtcaccatcgcccacggcggcgtcctccccaacatcaacccggtgctcctgcccaagaagaccgctgagaaggcggcggccaaggaggccaagtcgcccaagaaggccgccaagtcccccaagaaggcatagaggggcgggcgcctttaccgctgtgatgttgaatgctcgtgttcagtagatctttacgtctgtagtgtcgtcgttgttattggaactggttagtagatctgtgcattgtggttga

SEQ ID NO: 1236 - DNA, 1443 bp, Zea mays
  Clone ID: 700105374_FLI
caactcgagactgaactatgatttctgacgagagatctgcgacgaggcgacgacccaaatggggaaaaccatagctaatccaagatctgaactccctcaaatcccgcaaccgggcccctaatcccttccaaacccaatctcccatctccgatccaatgccccctaccggcgacgacccgtcggccgccgccggcatctcattccccgatgcgggtggcggtggcgattctgaagacggcgacttcgccggctcccacctcctcgaccccaccgatccgggcctccccaaccccaccacctcctccgctaccggcctgccccacgcgatccctgcggccggtagcggcggcggcccggtcacctccggcaacggcggggagcggcggcccctgttccagcgcctctggaccgaggaggacgagatcgtgatcctccgcggcttcgcggagttcaccgccgcgcgcggcacggcgttcgcgtcgcaccagtacgacaccgacccttctacgaggacatgcgccgccgcctccagctcgacttctccaagagccagctcgtggagaagctccgccgcctcaagcgcaagtaccgcaactgcgtctcccgccttcgcgagtccggcgccaccttcaccttccgctccccgcacgaacaggccatctttgagattgcgcgcaacatctggcgccccgcaaacaaacacggccgcgatccctcggctgactccgacgatgaagacgccgccgccgccgccgcgacacagatacctgccaacaccagccccaacggagaagtcaggtccccgtcctctgcacggcagcgtcgccgcaggcgggcgacggaattcacccctgccacaaacatgttgcagccccctcagccagtgccactgtctgtgtcagtgcctgtcaagacggatgactccctcccagcacagccccagaccccaatgccgaccatggatggctcagagcctgtcaggttgccagtcgtgtcgcctcaatcaggagtttctgatgccgagaagacttgcctgactcctctatttagggagataatacatgcagcgatgaatgtcggagcaaacccatttggtgcaaagctgcctgagccgccgcttgggttgcccttgcccatggaaggggagaagtggcggaggcagcggattttggagctggaggtctacttgaagaggatcgagctgctgcaggatcaggcgaaggcaacgcttgaggagctcaagtcctccactcctgggacttaacccgtgataagatgagactctctttcgttttaggattcttgctctgatccttagtgtagatgcttaggcatttttgcatattttacatccataaaagaatattgttaacttggttggggcttggagctttttacttgttgttctaaatgttcatgtgatattagcttccgattaaaaag

SEQ ID NO: 1237 - DNA, 1058 bp, Zea mays
  Clone ID: 700105382_FLI
aaaggtagtggtaggaggatagatggagaggaaacggaaggagatggagaagggcaagtctgagctgagactggccatggaggagctccgtttgtgcggttcaagagatggggcggaggaggaggaggaggtgcaggttcagcaggtgaaagtgcaggagcagcacaagtcatccacaatggacctcctctatgtctccaagcagctcatccatgtccttgatgagattggaccaactctgctagtcctgaggcaggacattcagcaaaatgtccagaggttacaagacctgcatgaaaaggactgttccaaatacgcgtgcttgacggcgatagtcaccgaggaaatggagcaagggacagcgaagaagaccaagagctgcaccagagctatcatctggctgtctaggtcgataaaattctcaaagtacttactggagaggctgctggagactcctgagtcgagcctggaagagatcgtggaagaagcctacgcaaatactctgaagccatggcatggctggatctcgtcagctgcttacaaggtagcactgaagctcatcccggaaagagagttcttcgtagcgctgctgatgggtaactgtcaagacttggaggatctagcagaagatgccaggatgctggcctatgccgtccagcccttgttacaggagatcgatgcgatttcggctaagcacaacctggacaagatgaaatcctcttaggacacgaggattttgccgatcacctggtgactgtacatagctgcatacgtgacctgaccttgtcttgtggctgtaaaagtgaaaggtgtaattttggggtttgtctgtagatttctagtgacatatcgaatgtgtaaaaaaaaaaagttgtcttcagtgtatccctgcagtggttttagtgcatgtatacccctcacgacctaggcacagaatcctcttctagtgtcaaattgtgtagtgcttgttttctttcttcgatttttttccaacgtaatggcacaacctctgctttttaataagaagaaaacaagaagatcctggacagtttcagctc

SEQ ID NO: 1238 - DNA, 869 bp, Zea mays
  Clone ID: 700105386_FLI
cccctcctcctcctcctctcgacaccaccaacacaacaccactccaccgccgttcgaatattccaagcttgagattggaggaggaggggaggggaggggagccgagcgcagaaccctaattacctccatcgattgctaacagctcagatctcagaggcaggggaggtaaaatgccaagagcaaatgagatgttcagggcagattctagaatgatggtggtttttggtgccttgacatcgaaaccagagcagctgacattcgaagaaaccctcagatttgtcaagaaagtgaaggcccgcgattacatgctatacctgtcattgttcgacattcttggcagaatggaactatcccagctcgatgcctaccgagagttacagctgctgtttggaaaccacccggatctgtgcgaagagctcgagaagttcaggccaccggtgcctacaaagcaggcagcaaacaacatctggccctgggtcattgtttgcgccgtcccgttggttgcggtcagcctgatcccggcgctcggaaacccagtgctgtggttcgttcagcaaactgtcggcgagaaaatggccgcctgattgaagaaaccactgcagtacatatgcgtgcagcggatgagcgtgcgggcctcctgtcatttgcgccatggcaactggcaatcgaatcagcattgtctttatatatgtgtgtatatatgttagagtagcattctggaaggatactcgtcttcttggtcatcaagtgccgctgagcaagaaatttatgccggtacatgctgtccgggcgcaaccgtgcaagtgcaagcccaccaaacacatatagcccgtttggacatttgagctgggttctaagtgctaaagatc

SEQ ID NO: 1239 - DNA, 1470 bp, Zea mays
  Clone ID: 700105389_FLI
gcacatttcctagcactagctcatccgttcacagctttaaccgtagctaagctttatctgtcagacatatataagttgcatggactgccatcgtcgattgtgtctgatcgggatcccatattcactagcaagttatggcaagaactgttcagattggctgggacaaagctgtgcatgagtagtgcctatcatccacagtctgatggtcagacagaaagggttaatcagtgtttggaagcttatctgagatgcttcgttcattcttgccccaaacagtggtattcttggctctcgctggctgaattttggtataacacttgctatcataccgctctgggtaaatctcctttcgaagtgttatacggtcatgctccttctcagcttggattagacaccgttgatcagtgttcggttcctgatttacaaacttggttgcttggtcaccaacagatgctacagcaagtaaagttccatcttcagcgtgctcaggacagaatgaagaaacaggctgataagggtcgagtggaacgtacttatactgtgggcgatcaagtttttctgaaacttcagcccttctgtcaacgatcagtggctgacagaccagtttctaaactggcatttcggttttttggtccctttgaggtgattgagcagatcaatcctgtggcctatgaactagcgttaccatctgggagtgctatccacccggtctttcatgtatcgcagttaaaatcggccaacggcgtgcgggttcctagcactgactctcttccagatatctttactgggttgcaggtgccggaggaagttctggagtccaggcttcttcgtaaagggggtaaggtgatttcgcagttgctcattaagtggtccaattggccggtgtcactgtcaacctgggaggatgaagaggccattaagcagaaatttccacaagcaccagcttggggtcaagctgtcgttaaagaagggggaaatgtcagcagagcagatcacatggaccatgcagaggagcggactcaagcagtgcaacagaaggcacagacagagggagtcaaggaagacaatcagagcccgcgcagccgtcgtgtaccaaagccaaataccaagtacatcggtgcagagtggcgcgtataggtatacggagttatacgtattgatgagggcaggtgtgccggtataaataatattgtaatcgtttctaaactcagtctggaacatgttattgccgagtcggcaagaaaggaatagataccagagaaattcctggcgtgaaccacgggtgttgttcacactcgctgtccctgcctgactcttaaaaagggcggcgtgtcaccgcctggttactcacagtcatagattcacgccgcggaacgcggattccaagaacccaagtgaatcgcggctcctcgagtccggcggtgccgtccggagaggtagagctagactgctagagcacagccccgccat

SEQ ID NO: 1240 - DNA, 1308 bp, Zea mays
  Clone ID: 700105412_FLI
ggaacaatcaggatttggtgatgatgcttaagcgaagaggtgggagggataaagaatctatatctcatagtgagtggcttaatactgttcaagcagagcctgatgttacctcaatgtcctttataccaatcacttcgctgttgaatggagttcctggaagtggatttttgatccatgcaattaatctgtatctccgacataaacctccaatcgaggaattacatcagtttttggagttccagcttccaaggcagtgggcacctgtttacagtgatctcgctctgggtcctcagaggaaaagacaaggcagtacatcgttgccagtaaatttaatcggtccaaagctttatgtttgcactaacatggttgatgtgggtaaaagaccagttacaggactccggttgttccttgaaggaaggaagagcaacaaattagctgtacatcttcaacatctctgctctcttcctcagattattcagcttgaagacgacccttacaatcaccaaaccccggaatatgaccgcaaatactacgaaccaattggaccgtggaaacatttctctcatgtttgcacagcaccagtcgagtcagatgacctgtgcatcgtcacaggggcacaattagacgtggtccaccaaggcctcaagaaaattttgttccttcgcctacatttctccaaagcctgcaatgccgttgtgaggaactcggaatgggagaattctcccaacatagctcagaaatcaggccttatctcaacactcattagcacacatttctcctcggtagctcagacgcctccgccgcggccagccgatgtgaacataaactcggcggtgtaccctgggggaccacctgttccagtgcagaccccaaagctgctgaagtttgttgatccaacagagatgatgcgtgggccgcaggactcaccgggctattgggtggtttcaggcgcaaagttgaaccttgagaggagtaagatctcattgcgggtgaaatactcactgctgacagctatgatgccagatgatgagtttccacttgatgatgatgaattttagaacctggaacgaaagaaacctgtgtagcaaaggttgaggatccaagatttccgtcatttgggcatttgtttgatgttgtatactttgtggtttctttaaacattatagcataaacgagttctctgccctgaatgcagcgagaagaattgttgtaacatttctttgtagcgtgggcgtggcacatagcgatcagcattagatgatagatcaaattatctgtatatatgggatgaataaaaaatattgtttc

SEQ ID NO: 1241 - DNA, 904 bp, Zea mays
  Clone ID: 700105416_FLI
ggggaacctccgccccatgtgcgacccctcggaggtgtcctacaccctgatgcccaacatgtgctacttcgagttcctgccgatggactccgcggcggcgtccggcggcgacgcgagccagctggtggacctcgcccgcgtggaggtcgggcgcgagtacgagctggtgatcaccacgtacgcggggctgaaccggtaccgcgtcggcgacgtgctccaggtgaccggcttccacaactccgcgccgcagttccggttcgtgcggcgcaagaacgtgctgctgtccatcgagtccgacaagacggacgaggccgagctgcagcgcgccgtggagcgcgcgtccgcgctgctccgcccgcacggcgccgccgtggtggagtacaccagccaggcctacaccaagagcatcccgggccactacgtcatctactgggagctcctggccaagggccccgcggccggcggcgcggtgggcgaggggacgctggagaggtgctgcctggagatggaggaggcgctgaacacggtgtacaggcagagccgcgtggcggacgggtccatcgggccgctggagatccgggtggtccggccgggcaccttcgaggagctcatggactacgccatctcccgcggcgcgtccatcaaccagtacaaggtgccccggtgcgtgacgttcccgcccatcatcgagctcctggactcacgagtcgtgtccagccacttcagccccgcgctgccgcactggacccccggccagcgctccgactccgactagacacgcgggccggcgagcggcgaggcgtgtccggccgggtccggcgcgcttaattagactgggaattcgttccttgcgtatcgcagacgtagaatatgcccgtgaaattaaaatatttgttaattttgg

SEQ ID NO: 1242 - DNA, 1172 bp, Zea mays
  Clone ID: 700105418_FLI
aacaatctatcccatggggtcttgttgtctctgtactaaaggatgtggaggcggttgttgaggttgctgcccagcactttgttggcgatgatcgcaagtggagctttcttgctgttacagaagcagtgaagtgtcaggttagctgcttttcgggagagtggatacaagatgctcttacaaggaggggaggtggtaaatgaagaagaggtgaccgttcttgaaaatagttatggagtaaatggtaatggagtaccagccatctatccgatggatggacatgcagaaaatggtcacaaaactatggccaagggtctggatggtaaaaatggatttgtatctaagagtcttgagaaaagagcagtagctgctttgaacaaatttggtgagaacgcaaagatgatgtctgatcctatgtggattcggaggctccaacctactcctgagccaactgtgatggttgccgagaagccaactttggcaagtatttggtctgctaaaggcggtactgggcgcttgtttgttttaggggaggttgttcacatattcaggccacttgtatatgtacttctgatcagaaagtttggaataaaatcgtggaccccgtggctagtgtcgctagctgtggaactcacaagtctaggcgtccattcccatgcaaccgatatgaatcacagattaggaaaagtgcatcagctcagttctgctgagagggatgagttgaaaaggcgaaagatgatgtgggctctttatgtgatgagagatcctttctttgccagttacagcaagcgtcacctcctgaaggctgaacaggttctgaatccggtgccattgattggcttccttacagggaaacttgtagagctactggaggggattcagacgagatacacgtacacatcaggttcatagagatggccaatctgagcctgctgctcgcctctcgatttgccctggcggacatgtgctttgtgcgagttggttgatggttaatggttaatggctaggaactggtgcttaatcctgaaacccgtactgctgtttttcttgccaactgtggcatcgtcgtcttgtggctgcgaagctgcagccacctcgttcgtgtatggcggcagatgagacaattcataatctaagtatatagatataaatagtagtattaccggtttgtttgt

SEQ ID NO: 1243 - DNA, 1605 bp, Zea mays
  Clone ID: 700105434_FLI
ctcagtggcggtggccccggacggcaccaaggttgacgccgtcgaggcgttcaggatcgccggcattgagcacgggttcttcgcgttgcagcccaaggaagggctcgccatcgtcaacggcacggccgtgggctccggtctcgcggcgatcgtgctcttcgaggcaaacattctcgccgtccttgttgaggtcctctcggcactgtactgcgaggtgatggctggcaatccggagtacaccgaccacctcatccacgcgctcaagcaccaccctggacagatcgaagctgcagccatcatggagcacatacttgaaggcagctcctacatgaagcttgccaaggagcagggagagcttgacccgctgaccaagatgaagcaggacaggtacgcgatccgcacgacgccgcagtggctcggcccgcaggtcgaggtcatccgcttcgctaccaagtcgatcgagcgggagatcaactccgtcaacgacaacccaatcatcgacgtcgcccgccgcaaggcgctccacggtggcaacttccagggcactcccgtcggggtgtccatggacaatactcgtctggccgtcgctgccatcggcaagctcatgttcgcgcagttctccgagcttgtcagtagcttctacagcaatggccttccctccaacctgtccggcgggcgcaacccgagcttggactacggtttcaatggcgctgaggtcgccatggcgtcctactgctctgagctccagttcctcgccaaccctgtgacaaaccatgtgcagacagcggagcagcacaaccagagcgtcaactctctcggcctcatctcctccaggatgaccgccgaggccgtcaccatcctgaagctcatgtcctccactttcctgatcgcactgtgccaggccgtcgacctgcgccaactcgaggagagcatcaaggccgctgttaagaagtgcgtgtcgcatgtcgccaaaaaatccctggccatcgacgaccacgacctgctcgtcgctattgaccgcgtggcggtgttcacgtacgcagaagacccgtgcagacccagctatccactgatgcagaagctccgcgcggtgctcatggagcatgcgctcatcaatggtgacagcaacaccgagcgacctatggagacctccatcctggccaaggtggctgagttcgagaagcagctcagcgcagtgctaccggacgaggtggaggccgcacgagcggctgtggagagtggcacgaccccgaacaggattaccgagtgccgttcgtacccgctgtacaggttcgtgcgcgaggagctcggcgccgagtacctgaccggcgagaagacgcggtcgcccggggaggaggtggacaaggtggtgatcgccatgaaccagcgcaagcacatcgacccactgctgcagtgcctcagcgagtggaaaggcgcgcccctgccaattatctgaactacagataagagagaagacaaggtatgacggatgagaaaagaagtactatcctgctactgtacacgaataattcacgcggtgtggcgtgcataaactatactattaccatggccatgtgtcttgacggcacacagttatatttgatt

SEQ ID NO: 1244 - DNA, 1362 bp, Zea mays
  Clone ID: 700106139_FLI
ccagttccctccgtccacacccgcccttctccttcgttcccggctaagaggccaacggacgtgcgatccggcgcgcttcctcgccgtcgtcgatcggaggcagaggaatgtcaggggcggcatccgtggagcgcgtgaaggaccgggccaccggcctcgacaagttcgtgctccgcgaggcccgcggcagctccgtcgaggtatatttatacgggggccaagtgacattttggaaaaacaacttcggtcagcaactgctttttgtcagtaacaaggctacttttaaaccgcgaaaagcagttcgtggtggcatccaaatttgcttccctcaactaggtaaccatggagttcttgaacagcatggatttgcaaggaaccggttttggagtgtcgatgaaagcccacctccttttccagttgctacttccaattgtcatattgacttgatactcaagtcatctcccgaggatttgaagatctggccacatagttacgaatttcgtctgagagttgctctgactccaaggggagatcttattcttacatctcgaataaaaaacatcagctcagacagcaagccattccagtttacatttgcataccacacctacttttcggtgtctgacatcagtgaagtgagggttgaaggtctggagaccttggactatcttgacaacctgcaatccaggaaacgttttactgaacaaggagatgcggttgtattcgagtccgaagtggacaaggtgtatttgagtgctccgccaaaggttgtggtcatcgaccacgagaagaaaagaacgtttgtgttgaggaaagagggccttcctgacgttggtgagctacaaaattaggacgccctttcattcttcgattacaacgtttggtttgtgaaatttttgcagtcgtttggaacccctgggacaagaaggacgaggagtacaagaggatgctgtgcgtgggggctgcggctattgagaagccagtcactttaaagccaggcgaagagtggatagggaagcaggaaatttctgctgtgccgtccagttacagcagcgggcagttggaccctgaactgattcgtcgaatgcacacaatataaagtttacccgcgattgcatcgatcctacgttccaaactagcctgtgttttttttttaattctgaagcagcgctgggattggaatcatcaccctgttaattactagacaaattgggccggaggtgccattcagatccgtatacaatattctttttctctgttttttttttgtattgtaccactagtccactacaaaaggaagccccaagtttgtactgcatgtggcaaacaaaactaccaagatatatatactaattgagttgt

SEQ ID NO: 1245 - DNA, 1092 bp, Zea mays
  Clone ID: 700106144_FLI
gctcactctccggtctgttctatgcacttttcgttactctgtccctatcaatatatatatatcgatatctttttttcttcttcgcgtcgcaagaaactactgcaagcaaaattgattggttggtcgcggaccctatcgatctttacaggtgaaagctgcggaagacgctaagccactgttcgccgctttgaagaaggaagggaagtccgtcgcggtgggaggctactgctggggaggtatgtgacatccacgccaactgaaacgaacactccattcagttcaggcaacccgcatagagcgttctgtttctcacatccggccgaccttgttgctgctgcttcctcttcgctggcatggcacttggcagggaagctgagcgtggaggtggggaagaccagcgacgtcaaagctgtgtgcctttcgcacccgtacagcgtcactgccgacgacatgaaaggtgcagtgcagtgcagtgtgctcctcctcttcttctatgctgcgtcactagcctcaccgcatgtgttcgttcgaaatcgaaacagaggtgaaatggccgatcgagatcctgggggcccagaacgacacgaccacgccgccgaaagaagtgtaccggttcgtgcatgtgctgcgtgaaagacacgaggtgagctccaagctacgactgattgcacagtgacactgtctggataccggccagctcattctagtggtggtggcacacacaggttccctactacgccaagatcttccagggagtcgagcacgggttcgcctgcaggtacaacaccaccgaccctttcgccgtcaagaccgcagagacggccctcgcctacatggtcagctggttcaacaagcacctcaactgaatgaagcctgcactgcacgcaccagactgaattgaataaaccacagcagtgctgtgatattttgtttcgattcatggctccccagattgatttgtcatggctaagacctctactactgtaatttcccccatttttttgtctcttcaaactctctgtatttctttttttttgctttttttatgatcgcaataaagttcagtaggggtatacccctcctatttgcttc

SEQ ID NO: 1246 - DNA, 2027 bp, Zea mays
  Clone ID: 700106178_FLI
cggagctggaggatactgggtcaaaggctagttctaacagcaatatccagcagaaagctagtgctttgcaagaggtggaggatgaaaatgaggcaaacaaaatgcaggagaacagtgtggtgtctaattcagacgtagctgagcaagcattgaatggtgaggataatagcaacaatgattcttctgctggtgttgaagaggcagggacaaaacatttgccagtatcctcaggtgaaaaggtctcagatgggaggcttgaacatagcggtgttctgaatgacaaggttgaagatgacagtactttgcatgagaagtctgaagatgacacaatgtcggaagaggtctctgttatggagagcaatttgcctaatgacgctagaaatttgctaaactattgtagttttgcaagagttccaacaagaccacgaacagtgcttgcaaacaggaatgttggaccaggtcaaagagaaattactgtgtctgaacagctcaatttggttacttctgaagaaatatccaatatggcaatggatggagaagctaacactaattccataactagcatcgaggaaggcagtaaagttgagctggttggccaagaccaagaacatgctgaacaaagcgctatctgcaatcaagtggcagaatcagtggcattccatgaaaaggaaactcgaggtgaaactgaagaaaaggaagaacagaagaacatccctcaacattatgaagttgaggataataaggagacaaacgaactgtgtcctacatttgcttcttctcagaataaccaaagcgctatctgcaatcaagtggcagaatcagtggcatcctatgaaaaggaaacacaaggtgaaactgaagaaatggaagaacagaagaacatccctcaacattatgaagttgaggataataatgagacaaatgaactgtctcctacatttgcttctcagaataacttcaatttgcaagttgagaaaggaatacaaatctacaatttagatacaccgccacaagatgaattgttgatcgatccacccgataaagggaaaacagttgattcggagttattacctaacatcaaagcagaagatgctgttacagtggaagaggaaaagattggccagtctagctcatttaaaatacgtgatctcaacctggttggtagtccagaggttgttgacatgcgaggtgaccctcgtttaggccaaagctctactgctggatgtccagtagacctacaagataatcaacaagttgagtttgaaacagctcttggtaacaacccgaataatactgacacatgtgccccctttctgttgggaaataagtcagttcaagttattgatatcgaagatgacataccaattgaagccggtgcttgtgacacgtcaaaatcaaaaggtgagatggtatattctagcatggagagcatgatgaacccgcctccggtgaacaccgatgctctacatggtatccaagatgggtatagtcttgcaatttcagattaccttggtgctgatatgtcatgctaccaatcaatacaagcagaacttcaagatgggatggacctaaacggttcagagggcattactgtgatggatgatccaatatacagttctcttagtgacataggttttatggaggtttgggaccagcaacctcaagactatgaaaagttcttctgaggcaccaactcgtgttgctgaaactgttctggagttcgactgataaataccagttatacttgcataggcagaaataaagcagtagatcgtgcctaacaaatagaatcccgtgtactcgtgcgacagcagcacctcatgcacttgtatgttccaggccatacatatgtgttcagacatatgtattcagactccctgccttgcccgacagtggtgtaaaaagtagtcgtatagctgtcatgtaattcaagggaattgacctaagcacgatagagcattcatccgaaacaattcttcatttgtaataaacagctctatattccaaattaaaagtgtttatttgtt

SEQ ID NO: 1247 - DNA, 1007 bp, Zea mays
  Clone ID: 700106210_FLI
agaaaatcgaccagcaccagactggccccaagttggcagggtggaccttaaagatttgaagattagatacagacaagatgctcctcttgtattacatggaatcacctgcagtttccacggtggagataagatcggtatagttgggcgaacaggaagtggaaagacaactttaattggtgcactgtttcgtcttgttgagccaactggagggaaaataattatagactctatagacatcaccacaataggcttacatgacctgcgttcacgtttgggtatcattccgcaagatccgacactctttcaaggaaccataagatataatctagaccctcttgggcaattctctgatcaacaaatatgggaggttctaggcaaatgtcagcttcttgaagctgtccaggagaaggagcagggattggactcacttgttgtggaagatggttcgaactggagcatgggtcaaaggcagctcttttgtttgggacgtgcacttctaagaagatgccgtatcttagttcttgatgaggccacggcatctatagacaacgctactgatgctatccttcagaagacgatcaggacagagtttagagattgcactgtcatcactgtcgcacaccgtatacccaccgttatggactgcgatatggtacttgcaatgagtgacgggaaagtagtggagtacgacaagcctacaaagctcgtggaaaccgaaggatctctcttccgtgatcttgtcaaggagtactggtcatacacatcgaattgaaatatctaggagaaactgtgacaatcacatgttcactcgttgcagtctcttaaaaaagagataacaggagcctgttctcacacacatccgatgaactattctatctcaagtccgaagtagaggtgtcaggcattgtcgggaagtgcttttgttaactagttgaacagggggaaacctgtcgtcccttaaaaaaaaggaaacctccagcgtttttttgctccgatattgagcgaat

SEQ ID NO: 1248 - DNA, 1133 bp, Zea mays
  Clone ID: 700106240_FLI
ggctgatctattctttgttggctctggtacgaatcagagacaattaccacggcaggcgtccccacgccacggctgagtacggagaaagaatccctctagacttctctgcaacctgcgcgaggccgaaagagcagcaacggtgcggaggcagggaagcaaagcaatcccccacctatatacgcgccccgcccagtaggagagtaggagctgcaaggagtccggtctccgaaaaccgacaagacgatagcaaatcgaaggaggacacggctgctggtggccgcattcggtcgggggaggagcacgaggagccatggcctgcctgcacgaccacagctgcgaggatcacaactgcgccgccgactggtcgctctacaaccacatcgacgtccccaaggtggtggctctcaatgaatcggtgcccgggagcgtcaagtccgtcttcaagccctgggagcagcgccttgacacctcgggggggttttctggagagtaatgagggtgaccctgagctacttatttttatcccgttcacatcagatgttaagatcaagagcatttctgttgttggtggtgctgatggaacaagcccgtcaagaatgagagcgtttatcaatagagaaggtattgacttttccgatgctcaaaacatgcagccagtgcaggaatgggaattagcagagaacctgcaaggagctcttgagtaccaaacaagatattcaaggttccaaggtgtggctaacctaactctgcatttctctgacaactttggtggtgatacaactaaaatttattacattggactacgtggtgaagccactcagaacaaaagggatgtagttgcaacaattgtatatgaagtcatgcccaatccttccgatcacaaaacaaaatctgagactggaggaggtttttcgcatgtcgagtaggcatcatacaagcagagctagaagcggaagctgggtactgcgttgcctgaaagcaaatttgaacctcgcttcgtcgaccaataagataaatagataaatcccagctgctagacttttagcttgacttttgagcacataactctgtacccgtggacgctgtgactggtttgctaatgctctatcatgagagttggtctcttttgtgtt

SEQ ID NO: 1249 - DNA, 742 bp, Zea mays
  Clone ID: 700106253_FLI
gcggcttttggcagctacaaaccacccaaaagccacccccagaaaccggcggtccttgggtgttccggatctgagccagcagctgagaagaggatgagcgccgtggccgccatggcgacgtcgtcgctgaaccccaacgcgccgctcttcatcccggcggcgtaccggcaggtggaggaattctcgcccgagtggtatgagctcgtcaacaccaccgcctggttccgggaccactggttccgccagcaccagcaccacgaggccgccttcgccgccgccgccgacgccgagctcgacgtcgccgcgctcctccccgacgactccgtcgacctcctcgacaccgacgacctcttctacgcgcctgacgtccaccacccccacaacgccaagccggcgctgctgcccgggtacgacctcgacatgctcagggcgctgagcctcagctcccctcgggccgccgccgcgccgtcgccgtcgccgttgctgcgcgcccagcagcagaggcacgcggacaggccggcgcaccacgccaggggcgccgcgcgccgcgtcatcatccaccagcctcgctagaagcagcctgctcatggcgggccgccgccatggctgttgtgcctagtgtaacctcaagcaagtctagtctgtttctgtctgtgtatacgactaaaaaaacaacagatggaagattcggacgaggcggccagtgctctctcctcgtagccagcttctcctgttccagctc

SEQ ID NO: 1250 - DNA, 1084 bp, Zea mays
  Clone ID: 700106266_FLI
ggcgctgcagctgctcccaaggaagaagagaaggctgcggagcctgaagaggagtcggacgaggaaatgggcttcagcctcttcgacgactagagctgctgttttcgtcaaactgctgcaagttttggcttttttttatcatctacaagtactgtttcctatattttttagcagacaaattatcgtgtgtaatcgacaatgatatctccttaaattttaaaaaaaaaaaaaaaaacggacgcgtgggcggcttcgaaggattcggacaccactacagcagagcgtccagcggcaagctggactgggcagagagcatgattctcatcacgcagccagtcaaggacaggaacatggagatgtggcctacaaatccacccacgttcagggacgcgctcgacgtctactcggtagagatgatcggcctcgcaatgcggctcctggggttcatggcggccgacctcggggtggagccggaggcgctgcaggacgccttcacggggaagcggcagagcatggcggtccaccactacccgccctgccgccagcgggagaaggtgatgggcatcacgccgcacacggacgggctgggcctcacgctgctgctgcacgtggacgacacgcccggcctgcagatccgcaggggcggcaggtggttccccgtgcgcccgctgccgggcgccttcgtcgtcaacgtcgccgacatcctggacgtgctcaccaacggcgcctacaccagcgtcgagcaccgggtgctcccggacgccgagagggcccggaccaccgtcgtcgtgttccaggaggcgtccgtcgggggcctggtggcgccgctgccggggctcctcgaccagcagggcgcgcgcgcgcgctacaggtccattgagatcgaggagtacatcaagggcaacttcaacgcgctggagcaagggacacggttcatccagagcctcaggatatagccatctagttgctccttccatccaaaaataattgcccaccatatcgataaatcaatcaatctcaatcttcaccaatcatatccatatcttccgtatctaatattaaagagagtgttaatttcttcctc

SEQ ID NO: 1251 - DNA, 1458 bp, Zea mays
  Clone ID: 700106267_FLI
atttatcactccttcctcgtcgaaaatcttctgtcgtaataaaggggtcatccgtccaccgtccacgtgggcggcggttgcggctacggcggcggcggcggcggcgtcagcgggcgccggagatgtgagagcctccgtgccgttggagatggctgcggcgggggcagggaccgggagcgaggggaagaagcggggcgcgtcgcggagctggatcctgctcgacgcggccggggaggagcagctgctggacgccgataagtacgccatcatgcgccgcgtcgacatcaacgcgcgcgacctccgcatcctcgacccgctgctatcctacccctccacaatcctcgggcgcgagcgtgccatcgtcctcaatctcgagcatataaaggcgatcatcacttccaacgaggttctgcttagggatccttctgatgagaatgtaatccctgtagtagaggagctccataggcggttagcaccatcgagtgctactcagcatgatggaaaagagaacttaagtggccagcatgatgtagaaggggcagaagaagatgaatctccttttgagttccgtgcattggaggttactctggaagcaatctgcagtttccttgatgcacgcactactgagcttgagaccgatgcttacccagctttggatgagttgacatccaagatcagcagccgcaacttggatagggtacgtaagttaaaaagcgggatgacaagattgaccgcaagggttcagaaggtgagagatgagcttgaacaattattggatgacgacgatgacatggctgatctttatttgtctagaaagttggctggggcatcttcccctgtcagtggttctggtggaccaaattggttccctgcctccccaactattggttcaaaaatatcaagagcaagcagagccagtgcagctactgtgcatggaaatgagaatgatgttgaagagctagagatgttgctggaggcatatttcatgcaagttgatggcacattaaacaaattgacaacgttgagagagtacatcgatgacacggaagattacatcaatatccagcttgataaccaccgtaatcagttgattcagctagagttattcttgagttctggtaccgtctgtctgtcgctgtactcattagttgctggagtctttggtatgaatattccgtatacctggaatgacggccacggatacatcttcaaatgggtggttcttgtatcagggcttttttgtgcctttatatttgtctccattgttgcttacgcacgacacaaggggctcgtcggatcctgaatagctgaaataaccgcgtacttgcttccctcaactgtaaatttgagccagtgagcatcgactttgcggggtgattcatctgttgtaccaaattcggtagtatcaaattggggatgttgaataggaactgtaataggaaaaagttaatgcaaaag

SEQ ID NO: 1252 - DNA, 1559 bp, Zea mays
  Clone ID: 700106281_FLI
cccttctcgtctagtcttgtttttctttcctcctctgttactccacctacagacctactactgccatcgggagggtaagctcttcggagccggagccgggtccacgttaacgccatcgagcgctgcgatgggcagcttaggagggagcgccggtgctggggacggcggcaaggtcgggctgccggcgcttgacgtgacgctcgcgttcccgcaggccacgcccgcatcgctcttcccgccagccgtttcggactactaccaatttgatgatttgctgactgatgaagagaaggcactcaggaagaaggtccgaggtatcatggaaaaggaaattgcgcccattatgactgagtactgggagaaggctgaattcccattccatgccattcccagccttgccagtcttggtttagctggtggtacaataaaggggtatgggtgccctggactctcgcttacagctagtgctatttcgatagcagaagttgcacgggtcgatgcgagctgctccacatttattctagtgcactcctcgttggctatgtccacaattgccctttgtggatctgaggctcaaaagcagaaatacttaccatctcttacccagttcaaaactattggttgctgggcattgacagagccagattatggaagtgatgcaagctccctaaggactgcagcaaccaaggtacctggtggttggcatttagatggacaaaaacgctggataggtaacagcacttttgcagatgtcctcatcattttggctaggaatgcagatacaaaccaactaaatggatttattgtaaagaaaggagctcccggtctaaaagccacaaaaattgaaaataaaattggactcagaatggttcaaaatggagacataattctaaataaagtatttgtccctgaggaagacagattaacaggcatcaattcatttcaggatataaacaaggtcctcgctatgtctcgaattatggtggcatggcaaccaataggcatatcaatgggagtttatgacatctgccatcggtatttgaaagaaagaaagcaatttggagctccactggcagcttttcagctcaatcaagaaaagcttgtccgcatgcttggcaacattcaggctatgcttctcgttggatggcgactgtgcaagctgtatgagtcaggcaaaatgacaccaggccggtctagtttaggcaaggcatggacgtccaagaaggccagggaggtggtttctcttgggcgagagctactgggtggcaatggcattttggttgattttcttgtcgccaaggcattttgtgacgtggagcccattttctcgtacgagggcacctatgacattaatagcctggtggctggcagagagatcaccgggatcgcgagcttcaagcctgctgtgtcagcaaaatcacgcctgtgaaagttgtttttttctttgttccccaatgaagacagtagaaatcaaccttatacattcagatgattgggaataagaacggtaggaaagctgtaaaactcgacgtgcttcctcgtatgtactgttctgtttc

SEQ ID NO: 1253 - DNA, 807 bp, Zea mays
  Clone ID: 700106306_FLI
caaatgttaggaagcagtgcagggctgaatcatgtcgatggagctccaagggttagatcagttgtgagcatacccgctagggaaaggcttgatggtagcacacatactacaccccttagccccagtgaggattcttcccctgttgaaagcggcggcaaagttggactccctctgaatgacactaacaaggctgaaggaaccaatggagagaacagaaaaacaagtgaagcttcggcctctgacggttccgtattgtcacctaccgaagacaagagccaggctagtattgagggtaaagatagttttcagaagaagactttctctagaatgcatgatggagagacggtggaggtgagctacaaagtctacatacccaagaggaccccagcccttgcaaggaggaaactgcagcgctgaaaacgccacaattcatcatcggtcttactatctgcaaaaactataggttttggctggatatacctattctgtgaaccacgagtgcccagcatacatgccttatggaatctggatatctgttgctcaactaaataaacagttttcctacagcaaatgtattaattgcctgggattgggtgattgagtcgttgtaatcagcaaacgtgacgtccaatactgatgaatctgtcacctgcatctattgctgttggcatagtagtattttagacatgcagtagctaccttgctgcaagcggacgttggacttggacagacactgcagaatgcagatgtgcctgactgtactctctagtctgagattgttaagcctgaagttcatatttctgcttt

SEQ ID NO: 1254 - DNA, 800 bp, Zea mays
  Clone ID: 700106320_FLI
ctcagctcagctagcatatttgagtttctctcgtgctctagctactagcaacctcgacatcaatggcttctggtgccgccgccccggttaagatgtccactgcagtgactgcctgcatcctgctggcggtcctgctgcccatggcgcccaagctagtaatgggtgattgttccggcagttgtgttaccctttgcgacacctttgctgatgggttctgcacgggcaacgccgaccccgccatttgtccaccggaagtgcaggagctatgccatcccacggttttcacagggtgtatcactgaatgcaatacactctgcgctacaagcggattcgctccttgcgctgcttgatgagaaagtatcgtttgcggcagaataaaggtgagtgcaagagcaaccagcaggcctcttccccatgcatacgcacactgcagcgcgacctgagggaggaagcatgcaataagcttccacgatgatctacctactatatcccacatttccttactatattttcctttgtttaattcagtcaagattgtgtcgttcagagtccagagcatgcatggggtgcgtacgtattactagtattattgtacttctccatatgcatatggaaaagtgcactgtgctagcttgtgtacgtgtgccttttctgtgcatgcatgtgtggtctttcagtgtctactctagctattagtaggcatatgtcattgtcatgtaatcgatctctcgcggccgggcttactaccatcagcacagctgagggaatttctattgaaataaaatcatattaaaaacaat

SEQ ID NO: 1255 - DNA, 215 bp, Zea mays
  Clone ID: 700106340_FLI
ggtgatcatcagggccatcccgttcaagagcaggtcttaagctgccgcgggtgtgctgagacatgtggggaatgtattgtctgcccacgcctagtttctctgctgaatcttccatctctcttcccttgcaacaaacacgatggaagaaaaaaaaacatacacacagctcggtacaggagtacacgaagttctgggttcagataacagagcagtgc

SEQ ID NO: 1256 - DNA, 1389 bp, Zea mays
  Clone ID: 700106442_FLI
aacaactccatttgaacaaaaacaggttaaagcatgtgaaatatccatctaatctttcaccagatggacctattgatgatgcagctgctgtgccatttgaaaatttgcaagttcttttgttaggatctaatgacatagatgacttttcttcagtggattcacttaacctgttcccaagtttaagggatgtcaggctttctgacaatcctgtagctgatcctgccaagggtggtgctcctcgttttgtgcttgttgctcgacttggaaaagttggaatactaaatggcagtgagataagtccacgtgaacggagggaatctgaaatacgatatgtccgccttgttatgggaaaaatagaatcaaatgaccaagaagagatcagacggcttcaccctagattcgctgaactgaagtcctttcatggtattgaagatgagaagccaacttcaagcatatcagggccacagaagatggcttctggccttataagtattacgttgaaatgtgtgggtccatcaatgggtgagaagcaaccactgacaaagaaactgcctgcgacaacaactgtcgggaagttaaaatctttgtgcgaaagcttcttcaaactgaaggacataaaagtgaaactgttcgtcgaagaagagggatgccctctaccacaaccagtggaggaggacacggcctctctgatggagcttggaattggctcgggcgcaaccattgttgtggacgaagagagctagccagtcgtctttagagaagggccaactgtatggcgcaaactgacgcttcagctgttattaagttttcgaagagaagatagctgatgacgctcttcgttgcccttatatacttctttctgtgggaatatgcacgtgatgaatattggtgcgggtttgggcttcaaaatggactagcatagtaaaaacattgtgaggacggttgtttggttgggaaaaaaaaaaaaaaaacctctctctactgaatctaatagatgactactatctaaattatgcttcagtgcattagtgggtttactcttttgacatccactagttcgccttcgtcgcatggtggacttcaagccgtgggtgttgtgttgccagttggttctgtctgaggtccttgttccaccttaagttctctcggtgcgctcattccgcacatgagtcgagctcgtcgattatctgttcgatcttttcaacctctcgcagaatcctcacctcacgctgtgttgttacccttaatctctgtgtttctccgtcctgtcgtgtttatgaccccgtctccccatctaatcactcttgatactgtttctaaattgtttcctaccgatcctttattctcaatatgcctcccacccgtcgccacttacagactcgctcgagt

SEQ ID NO: 1257 - DNA, 504 bp, Zea mays
  Clone ID: 700106448_FLI
gaggatggcagggtcctcaagttcattgggatgcaagtggaagtaagtaagtacacggaaggtaacaaagatactgctcttcgtccaaatggattgccagagtcactcatcaaatatgatgcaaggcagaaggatcatgctcgtagctcagtctcggagctcctacttgccctgaaggatccacggtcactgtcagaatcaagaaacaataccttaaaaaggaaatcacaggaatcagcaggttcagctctagttcccggcaagagaagctccgaaactggatcccgtcgtaactcacatagtggaatcagaaactctctacaaaaaatcagtgaagtacctgaaggagggaataagaccaggaaatctggtttgcgttcttttatgggccttattggtatgggacatgggaatgtagagaagaacattctaaaaccaagggaagatcccctacttgatagcgatgatgagagaccagatagcttcgatgacgatttcaggaag

SEQ ID NO: 1258 - DNA, 333 bp, Zea mays
  Clone ID: 700106577_FLI
agaaggagatgagagagaaggaattgagcatgggtcttcgggatttggtcgtggacactgacgacggtggcaatgccaatcgctccaaggagaacggtagcagcggagggcccagggtagtgcgcaggaatgtcgtcaatggcccaaccacgcctgctaggtaatggctttctagagcttgcagtgtgcttggtggaagaagcagtgccgcagtgcatcaatctgtgtgacaaaagcaaataaagatctgttgtcctcttctcgcttatagctgtttaagctgtctattgtattctgttgagaaatcaatcacatctatactttgtttctgtt

SEQ ID NO: 1259 - DNA, 698 bp, Zea mays
  Clone ID: 700106601_FLI
ctagttagtcatacatgaaccgtctgctgcagatcgcatttccaaacgaagtcgatggcttccacgaccagctcctcaaagtgcaggacaacatacccatctgcgcctccatcatcgggcagcgcctggcgctctactcgctggaggccggccccgagtggatcaaagaaagggtgagagacctggtgaaaaaccgcgcgctgctcgtggacgcgctgtccccgctcggtgacggcaacgtcaggggcgggcagggcgccatctacctctgggcgaagctgccggacacctgctccgacgatttcgaggtcgtcaggtggctcgcgaacaggcacggcgtcgccgtgatccctggcagcgccagcggaggccccgggcacatccgcgtctccttcggagggctcaaggaggaagacaccaggctggccgctgagaggctacggcgcggcttgcaggaactggtggctgatggaacggtacagtaacggctccattggtgtaggtaaaaaacacagcattgtagttttacacaacgactccgattttccaatggcataactccgccgggattgattctagagaagaactggaccttgttatgaagaataaaaggcatccggtctgcagtcacctttgttataaaatatgagtactacatattataatcagcagtaagtatttgtttttgtttggttttc

SEQ ID NO: 1260 - DNA, 798 bp, Zea mays
  Clone ID: 700106609_FLI
cccttggcaatccatacgaggaacttactcgctgacccaagatgcacgcttgttgtccaggtgcctggatggagtggactgtcgaacgcgcgagtcaccatatttggtgatgtttaccctttgccagctgaacaacaggaatgggcacataagcaatatgtagcaaaacatcagcagtgggcatcacagcagtggggaaacttttactattacaggatgcacaacataagtgacatatatttcatcgggggcttcggaactgtcgcatggatagatgttaaggagtatgaaacgattcaacctgacaagatagcagttgatggtggtgacttgcaaagtttaaaggagttgaacgctattttctctaaaccacttcgggaggtcctatcatcagaaggggaggttgatgatgctgcgcttatatcagtagatagcaaagggatagatatacgggttcgacagggtgcacagttcaatattcagaggctagcatttgatgtccctcataaggttgagactctggaggaagccaagaaagcactccacaagataatcaaagacaagcagcaaataaagtgaagttgcaggagctggctctacccatttttctggtggtgtaaggtttcattgcaaccggaccaaggattacgtaatggtagcaggtagcatgatacaagtgaaaacgatggctgtttttttttaaaataatgagagtctcgctctccagctgtggtgaagattgtatatatgctcgtgttgccatattaataattattattgtgcggttgcttcttgagg

SEQ ID NO: 1261 - DNA, 1078 bp, Zea mays
  Clone ID: 700106613_FLI
cgcacgcacgcacgaccagttgccacggcagaccaccccgcccagcggccagcttgctcgccacgaccacgatgggcttccccgtggggtactcggagtcggagatgctgctcccgcgcgtgctgctgcaggtgctcctcctcctcggccacttccaccgcttcctcctctgggccttccacgccgtggggctcggcgacctgatcgacctcggctgcaactacccgccgccgccgccctccgcgtccacggcgcacgagatgatggagcaccagcaccagcaccaggggcgcgacgacgtggcctccccgctgcagcaccagcgcccggagttccggcccgtcgcggcggcgctcatcgaggaggcgctccccgtggtgcggttcgacgagctgggcggcgcgccgtgcggcggcggcgactgcgcggtgtgcctgagcggcatcggcggcggcgacgaggtgcggcggctcggcaactgccgccacgccttccaccgggcctgcctggaccgctggatggcgcacgaccagcgcacctgcccgctctgccgcgcgccgctcatcccctgggccgccgacgccgactacgacatgtcctatccgtctcccctgccgcccacgccactgcggcggcctcacgagctgctgctgctgcttaccggcctgggcggcttccagtgatgcgcctgcgcgtgggcagcgtggctggcacttgggcaggccggccacgcgaatccgatccgtggcgaggcaaaccgcgtgctcatgtgcggcccagcacgcccggtcggtcaggcgggtgaccgccgccaaacctgctcagttgccagccgtacacgcttgccggcctcgtcttcggtcgtgtctccgactccgttggtttttttacagaggctcccagtcccaggtcaaacaaaaaaggaggcgaaacagacaaagcagtcggaaattaggcaggtactgtactaggttgatctgtaggccgattgggcgactccaaatctgtggagctgtgaatcctttggcagattaaactaaaaattgtctctatagatcagaccatccaaaaaaaaccc

SEQ ID NO: 1262 - DNA, 675 bp, Zea mays
  Clone ID: 700106619_FLI
ggctcgtacgaagcagaccgcccgcaagtccaccggaggcaaggccccgcgcaagcagctcgccaccaaggcggcgaggaagtctgcgccgacgaccggcggcgtgaagaagccccacaggtacaggcccgggacggtggctctgcgcgagatccgcaagtaccagaagagcacggagctgctgatccggaagttgcccttccagcgcctggtccgtgagatcgctcaggacttcaagacggatctgcggttccagagccacgccgtcctggccctccaggaagccgccgaggcctacctcgtcggcctgttcgaggacaccaacctctgcgccatccacgccaagcgcgtcaccatcatgcccaaagacatccagctcgcccgccgcatccgcggcgagcgcgcgtaggcgtatctcgcgcccggccccagtggcggcggagggatggaggagggcaatttgtaaccttatgctgtttgttcgcttttagacggcgtggtgaagaactagtgtaaaaacggctttaaagtctattttgtgcggtagttcgtgtaggccgcttcgtcccgaagcgatcttggtaaaagacttattcgtgttgccaaacgacacaattcgtattttttttgtgtgccgtgtagaacacggtttgttgttattggaatggttcatcg

SEQ ID NO: 1263 - DNA, 854 bp, Zea mays
  Clone ID: 700106650_FLI
agtacctcttcttcaccgtcggcctcggcctcttcaactgcaagccgggccagctctgcgccgggcccaacaacaacacccgcttcgcggccagcatgaacaacgtctccttcgtcttcccgcagaccgactccctcctccacgcgcactactacaagatccccggcgtcttcaccaccgacttcccggcatacccgccggtgcagttcgactacacggggcagaacgtcagccaggccctgtggcagccggtccccgccaccaagctgtacccgctcaggttcggctccgtggtgcagctcgtcctgcaggacaccagcatcgtcacgcccgagaaccaccccatccacatccacggctacgatttcttcatcctcgccgagggcttcggcaacttcgaccccaagaaggacgtcgagaagttcaactacgtcgacccgccccagaggaacaccgtggcggtgcctgtcaacggttgggcggtcatccagttcgtcgccgacaacccaggtgtgtggctcatgcattgccatctggacgtgcacatcacctggggcctggcaatggctttcctagtggaggacggctatggcgaactgcagtcgctggagccgcccccagttgatcttcccatgtgctagtggaggacggatatttgtgttgaggaagaaagcctggtcacgttgtatgttaattgttactcttttttggtggaggggggcgtgttcgtgatcttaaattcttaggggacttaattttccagcttgttggtttgaagtttcttctgtaaatctatgtaattttcaatgacattcagcatattatttgagaataaattatttctttgtacaaac

SEQ ID NO: 1264 - DNA, 1257 bp, Zea mays
  Clone ID: 700106663_FLI
tcctctcctctcctccccggccccttcactccaccaacgaaccccacgcaggcagcagcacgcgcaagccgcaaggcaaggcacaaacactaggggccgggcatggcgacgcgggcggacgtggagaagggcgggccggcgaggaaggagcccggcaaggtgccgtcgccgctgtacccgcagcacgagggggagcgggagtgggtgccctggctcgtccccgtcatcttcgtcgccagcatcaccgtcttcgtcgtcaccatgtacgccaacaactgcccagcgcggcgcgacgccaagtgcgtcgcccgcttcctcggccgcttctccttccagccgctgcgacagaacccgctcctcgggccctcctccgccacgctcaccaagatggggggccctggtgtgggagaaggtggtgcaccgccaccagggctggcgcctcctctccagcatgtggctccacgccggcgtcatccacctggtcgccaacatgctctgcctcctcttcatcggcatgcgcctcgaacagcagttcggatacgtgaggatcggcgcgatctacgtgctctccggcgtgggcggcgccgtgctgtcgtcgctggtcgtccggaaccgcgtcaccgtgggggcctccggggcgctcttgggcctgctgggcgccatgctctcggagctgctcaccaactggaccatctacaccaacaaggcggcggccgtggccacgctcctgtccgtggccgccgtcaacctggtgctcggcgtcctgccccacgtcgacaacctggcgcacctcggcggcttcctcgcgggcttcctactcggcttcgtcgtgctcatgcgcccccacttgggctggatggagcgctacggactccccgccggcgcgccctgcaccgccaggaagtacctcgcgtaccagtggaccctcctcgccgtcgccatcatcatcctcctagtcggattcgcggccggcatggcgatgctcttccgcggcgccaacgccaacgacagctgccactggtgtcactacctcagctgcgtgcccaccgccagatggaactgcaccaactgatgatccatgcatagcagcagcagcacgagttggagttgccacccattttcatcttccgatccgtatagtctcgttactgtagatagcttctttgtcattcattcagatctcaacacacacgtcggtctcctgttcatttgattcattcttttacataatgatgcaatgcaattattgagatttcg

SEQ ID NO: 1265 - DNA, 567 bp, Zea mays
  Clone ID: 700106666_FLI
tcacgagtcttgcactctttactgatttgaggatgtccagtccctccagtagcttggactctgactctagagagggggtccttgtggaactgatgtccgtcccgtctctgctggcatgctacatgttggttccatctatagttcagcaagaggaagaggctatttgattgttccggacatctggttcggacttggagagtcttctctgtatagcaaggtagtcgcaccattgttctgctgactaattgggggttgaatgcaaagtctgaagccgcatgtcatggttcgagatccaattttgttttgatagacatactgtgaaattcattgtgccggtaaagctatatgaagacaaaatggggggatggaatgcaacctgtacataccattctttgctggttggggcaggcgatgtacgaacattcatatgcagcagtgttactgctcgaatctggagttaaacatgggcagtaatgctaggcatttatcaaacttctatcatgtcagtcgaaactttgaacaagtgtacataatcaaatatattatcagatatcataattttatggc

SEQ ID NO: 1266 - DNA, 1342 bp, Zea mays
  Clone ID: 700106668_FLI
taaacaccgcccacctgttatatctgcaatggaagaaagagcaaagggtctaggtgtttggacggataccaatggtcttgcatcaaaactgtataacttcaaacgtgaccctgaaccgctggtttctttaagtgattcaacagaccagttgagtgatgtgggagatggggataccaatcaagaaagtgatctgggaaacatggatgacgagtatggtggtgtaatagtgaattctgagattgattctttgcctgatccaaaggaccaggttgcctggctgaagttggagctgtgccgactcatagaggagagaagatcagctgttctcagagctgatgaactagaaacagcacttatggaaatggttaagcaagataacaggcgccaattaagtgcaaaggttgagcagtttgaacaagaaatatctgaactaagacaggccctgtcagacaagcaggagcaggagcaagcaatgtttcaggtcctgatgcgtgttgaacaagaactaaaaattgcagaggaagctcgcatctcagctgagcaggatgctgctgctcagagatacgcagcaaatgttctacaggaaaagtacgaggaagctatggcttcacttgcccaaatggagaacagagctgtaatggcagaaacaatgttggaggctacactgcagtaccaatctagccagcagaaagcaatgtccccttgcccttctccaagaccatcgatgctcgacgcatcccctagtcagtcaagccagaattcatcgcaggagttccagccaagaaggaaaaacttgcttggcccattttccctgagttggcgtgataagaacaaggaaaaaccgaacaacgctgatgactccaccaacacaaagtctacaaataatgatgaaatggtagaaacctccaacacaaatgatgagaagcatagagaaacactagatctaaatagtgagcagagagcagaatcacccaaagcagatgtcaagatgagagcagagacacctgagaaagacaacgacctgccaggggtccaactagtcactgacgatttgaatgggcaccacgaacagatgcaagaaataaaattggattgataagcattaagcacaatgctcccagcccaaatatcttcgccaccacgtaagtaatatcagagtatttatgatctgatcacacggtgccagttggtgacagcactgagggtggctaagttttgaaatgatactggtccccccctcctctcccctttccctttgtggttccccgaattctttttgccaccacatctaggttacatgtcatttctctccattttttataattttgaggagaaaatgagc

SEQ ID NO: 1267 - DNA, 1160 bp, Zea mays
  Clone ID: 700106681_FLI
gatcttcgtttccgctccgccgccgtcgatggagttctggggtctcgaggtcaaacctggatccactgtcaagtgtgagcctggacatggctttatcctgcacgtttcccaggctgcccttggggaatcaaagaaaagtgacagtgccttaatgtatgtcaaagttgatgacaagaagcttgccattggaacgctctctatcgacaaatacccacagatacaattcgatttggttttcaataaagagtttgagctgtcacacacatcgaaaactaccagtgtatttttctctggttacaaggttgagcagccaattgagggagatgaaatggatcttgattctgaggatgaagaggaggagctaaacattccagtaatcaaggaaaatggcaaaggtgatgggaaggaggagcagaaaaatcaagagaaggcagtagctgctacagcttcaaaatcaagtcttggccttgaaaagaaaagcaaggatgactctgatgattctgatgaggatgagtctgatgattctgatgaggatgattctgatgattctgatgagggcgagggattatctcctgacgaaggcgatgatgattcaagtgatgaggatgataccagtgatgatgacgaggaagaaaccccaactcctaaaaagccagaggcaggcaagaagagaggtgctgaaaatgctctgaaaacgcctctttctgataagaaagcaaaggttgccacaccgccagcccagaaaacaggtggcaagaagggtgccacccatgtggcaactccacacccagcaaaaggcaagacccctgcaaacaatgacaaatcaacggagaagtctccaaaatctggtgggtcagtcccttgcaaatcatgcagcaagacattcaatagtgagatggctctgcaggctcactccaaggcgaagcatggggccaaatgagttgcaggtccaactgagtccatgaaggagaagcatggtggccaagtgagtcgcaggtccattcgagtccatgaaggtgaagcatgggagatccaagcgagtctggaaagattgtcgatgttagtaggctgtccttattttgtttagagacttgtggctatgtgatttgtagcgaaacaaggctgtgatgtgttaactttgccttataatattttggttg

SEQ ID NO: 1268 - DNA, 1277 bp, Zea mays
  Clone ID: 700106694_FLI
gggcggcccacgctggagtgttctccgccgcaacttcgcggcggaggtcgtgagcccagcgcggttccggcagatggcggcctcgcgggagctggcgcttgccgacctcatccggaagctgaagctgcaggagggcgtcgtcgtctgcagggacgcgttccagcacgccatgtccagcctcttcatcgccatgtgcttcggcaaggtcctcgacgactcgtccgtggacagcatcggcgtcgcgctgcgcgacttcgtcctccacggcggcgcgtcggggatggggatggcgctattcttgttcctccctgctctcaccacgcgactcttccgtggcctcctgcggtctaaggaggccaagcgccagaagctcgaaaacgtgtactgcctgccattgatccatgagcggagagagcgcaggaagacgaagcagctgacgcaggagcacccgcactgctacgttgacacgttgctcgacctcaggctcgacgaggaacaggatggtggccgccttctcacagaccacgagatagcaagcctgtgcatcgagatcctcatcgttggctcggagctaccggcgacggcgctggagtggatcatggcggagctagtaaagaacccaggcgtgcaggacaagctctacgaggagatgatggtgaaagccaaagccaccactgacgcttctgctggcgtgctcccgttctcggaggatgacttgcccaagataccctacctgagagcggtggtgctggagggtctccggcgccatccgccggggcaccagatgccgccacgcagggtgagggaggacgtggaggtgggtgactacgtggtgcccaagggctcagcgatcaacttcatgctgtacgacctgggcatggacgacgccacgtgggaccgcccagcagtgttcatgccggagaggttcctgcccggcggggaagccgaggcgctggacatcaccggcaccaaggagatgaagatgataccgtttggggcgggcagaaggatctgcccgggcctcaggatcgctctcctgctcctcgagtacttcgtcgccaacctcgtagcgaccttccactggaaagaggtggaagagggcgacgtcgatgtcaccaccgaggacgctcagctcaccgtcctcatggggaagccgctccgggcgcgcctgcttccaagactgcattcgtctgcttaattttcttcatcatcatggtgtatgtcagtgtgtcaccgaataattaattaatgcgaataaagatcaagcttcaaagact

SEQ ID NO: 1269 - DNA, 1511 bp, Zea mays
  Clone ID: 700106826_FLI
gcgcgaccacgacgccgacgcgagagggcagggaacacagccactcgccgacgagaccccggcgcgcgcgagagaaagagaagagaggaggatcttttgttcgtgaaaaatattggaggcggagggaaggtgaaggagggggatcggagatgaacgtgttccggctggcgggggacatgacccacctcctcagcgtggtagtgctgctcctcaagatccataccatcaagtcctgcgcaggcatatctctgaagacacaggagctgtatgcacttgtttttgcagcacggtacctggacctgtttgttcattttgtgtctctgtataacactgtcatgaagctggtcttcttggcaagttctttctcgatagtttggtacatgaagcggcataagattgtgcggaggacatatgacaaggatcatgacacctttcgccattacgttttagtgttgccttgtcttcttctggctctcctcattaatgagaagtttacttttagagaggtgatgtgggcattctccatttatttggaagctgtcgcgatatttccacaacttgtgttgctacagcggacaaggaatattgacaacctgactggccaatatgtcttcttcttggggtaagagatctatatatggcagtatctaaaaatgcataaaaaacgaaaacaaatgtaattttcttagaaacaatgcattgaacaaaagttttgtatgaacaatatttgatcggcattgcctatatagtgaaatagacaacatggatgaattttcttattccgccttctgatattcgatgtatcatgctaggatcagtcttatccttttggacagagccttaatttgtctctagtttatatacgctattactaaagctgattcacttggttacgatgcagtgcctaccgtgtgctttatatccttaactggatttaccgatacttcactgagccccattttgtccactggataagtatgaattccttgtgccatccatttttattccttgaatgtgattcggagccgcacattatttcattaaagatgtttgcactccccattatggtaggtgtaaccgttattcatgcagccattttctttgtgtttttcttaacccaggttggatggcaggaatagtgcaaactctgttgtatgctgacttcttcttttattacataatgagctggaagaacaatgtgaagctagagctgccagcttaaggttgctgctcctgtccccaagatatagtagggtaatatatcagataggcaggccccatacacagcatgatcattgctatcgccaactgggttatgaaaaaagcattttagttgcgtggcttgtatcgccttgtatctctctgctattgttggaagaacaggaaagtcaggctcaccatgtaactttttacaataagctgcgtaagatcagcactagaaggttgtgaattgtgatcgtccttagggaattttgtgctgatgtaaccctttcggcaagtgattctcatac

SEQ ID NO: 1270 - DNA, 980 bp, Zea mays
  Clone ID: 700106859_FLI
aacaaactcagcgatcgacaagctaagctagcagactacacatccaggatcggagccgctgctcaccgaccaatatggcgacggagtacttgtccgggtggccgctgtcgtcctggatcagccccggcgcggcgttcttcctcttcgtcaacgtgctcatcggcgccatcgtggtcacgtcccgcgggcaccaagctggcggtggccgcgcggcggcgtccacgcggaggctctgccgcagcgcgtcgtccatggtcctcgatcggctccgctccttctccttgttctccgtccatcccgaccccacggaaacggaagagcgctgtagcacgtcgtcccccctcgagctggaagcagaggaggaggagcagccccaaccccaaccagccgtcgcggagcccgcaaggtcacttgttgcggcagtagcagctcctgcagacggtgcatcgtctgagatcgccaaggaagaggcggcggaagcgggaaaagacctgcccaccagctcgaacgaggcccacggtctggtgttgcagttgcagcagggtcacggcggccggcagcagccaccgtcgtcagtaaatgtcgtcacagccgccgatgcaactgcggcggtggagataaaggaggaggagaagaagaagaaggcagagcaggaagcaaccatgcagcgcgcacctgcgtgcaggcggggaacgacggaggaagcagcggaggagaaggcggcgctgaacgcgcgggcagagtccttcatccggaagttccgggaggatctcaagctggagcgtctcaactccattatcaactacacccgcacgctccgccgcggcgttggcgcaccacagcccactgcgcagtagctctccgctcatcggtggtccatcgttttttattgtttgcttaatgtatagagtacttgaatttgtttgctcatcacaatggtgccaaacccagatagtttaatttaaatgtgattgtgtacc

SEQ ID NO: 1271 - DNA, 761 bp, Zea mays
  Clone ID: 700106944_FLI
tgggaaaaatggatgcggaggcggcgagaaggaagcaggtggcgcctccgcaggagaagaggaagcgcggccggctggagctgcggcggatccaggaccggacgagccggcaggtgcgcttctccaagcgccggagcgggctgttcaagaaggcccacgagctctccgtgctgtgcgacgccgaggtcgcgatggtcgtcttctcccccgccggccgcctctatcactacgcctccctaggcaccagcattgagaaaacattttgtcgttactgggaccttgccaacacagacattgatctcaatatcgaggcgcgagactcgagggacaactataatacacaggttaagcatataaatagttgatactatatcaatttactctcgtatacataaagcccatagttgtataagttctcttttttttcactcacgtgagcaattctctggaacggttaatttaattgactatatatagttccttctacggcaccgtcgtatgcatggaaggataagaaatcgcaaccaagtggtatataatggattagaatatttatgatgataaggtactagataaaattacagtggtattcagaaaattattctacatatataacataaaatctcttggtgtcatggcggagataggacccatgaggcataatttgttccaaaaagatattagtatattattttctagacctaggggttatcttccaagctaatatacagttgcaagttaaaagtatcttcttttttcgc

SEQ ID NO: 1272 - DNA, 1001 bp, Zea mays
  Clone ID: 700106946_FLI
acgagaacctgtcgggcttcgcccgcgagctcggcgtgttcctccagttcgcggcgtacaacgtggacgccctggaccccgcggagctggtggccatcaccagcggcgacgccgtggccgtccacctccccgtggggtcggcccacgtggccgcaatgccggccgtgctccgcctcgtgaagcggctcggcgccaaggtggtggtgtccgtggaccgcggctgcgaccgcacggagctgtcgttcagcacgcacctgttacaggcgttccagtcctgcgtgtccctgctggactccatcgacgccgtggggggcgcggacgccgaggcggtcggcaggatcgagcgcttcatggtccagcccgacgtggagcggcgcgtagtgtcgcgccaccgcgcggcagtggccgtggacaagccgccgccgctgccgtggcggaccgtgctcgcgtcggcggggttcgtgccggtgcaggccagcacgttcgccgagtcgcaggccgaggccctactcaagcggatggcgctgatggggttccgcgtcgagaagcgcggcggcgcgctctgcctctactggcagcgcggcgagctggtctccgtgtcggcgtggcggtgctgaccgccgggagtacgccgccgccgccgcaaccaagagccagccgtgaatctaccacaagcccgggttagctaggactaatgatcctactactgcaagcaaaaaaatattttccaccgtcgtcgtttgtaacgatctcatctggtctggtctcgtctgtctgcttattagtgtgtcctacccgattaatcgtggagtacgtcgtccgttgcctggctttgcagcctcggtgggctctgctcatgttgatttgcggagcgcgccgtggtttgcaggttgtaaaacgtaggcgtggtgcagtgcagtgaccagcgcatcctaccgcccgtcgtgttgctactcttttttttccattgctgtgaaatcaattaatggttatggcgtttg

SEQ ID NO: 1273 - DNA, 924 bp, Zea mays
  Clone ID: 700106968_FLI
gcggcagtgggcagaggcgagagggcactcgactcctccagcgtccaacgccatccatcccgacctcgcaacgcaagcaaagaaagcccaggcaggcgtgtgcacggcgcggcggggcaaccaagggtgggtgaacccgcagagaggggcagctagcttccttccttcccaggcgcgcgggagagattagccgcagtataagtagccagccagccagccatgtcgtcggtgtcgtcgtcgctgaccaacttcctgctctgctgcttctacccgtcatccgccggccaccaccgcggcggcgcctactactacagcagccacccgacgagcgccagcaccctgcactaccacgagggcaccttcgccgggcgcagggccatgggccggagcagcaggccgctgtcgctgcagacggtggagctgaaggtgcgcatgtgctgctcgggctgcgagcgcgtggtgaagcacgcggtgacgaggctgcgcggggtggactccgtggaggtggacgtggagatggagaaggtgacggtgacggggtacgtggaccgccaccgggtgctcaaggaggtccggcgcgcggggaagaaggcggagttctggcccaacccggacctgccgatgcacttcacctgcgccaaggactacttccacgacgaggagtcgtaccgccgcacctacaactactaccgccacggctacaacggcgacaagcacggacagctccacgagccccaccgcggcgccgaccccgtcagcaacatgttcaacgacgacgacgtcaacgcctgctccgtcatgtgatctcagtcgcgctctcgtcgtcgacaggcggtgtgtgtgtgtgtgtatgtgctcgtcagctcgtgcgcgtgtaacagaaccgtaccaaatggatggatgagtagtagcaatgcaatcgac

SEQ ID NO: 1274 - DNA, 1593 bp, Zea mays
  Clone ID: 700106990_FLI
gttggctgtctcggtgtcatcgtctcctctcgtctcgttctcttctcctcacctccttcgtttcgcggagcagagcgagcagccggcaccggacctccaaggagcgcaccgcggaggccagcgaagatgcccgggctcacggcaccgtccgactacgcggaggagccgccgcgtcacccggccctcaagatcaactccaaggagccattcaatgctgagcctcaccgatcagagctagtcgcatcttacatcaccccagtggatttcttctacaagaggaatcatggacccatccctaaagtcgaggacctctcaagatacgctgtttccatttctggtctcgtcaacaagtccattcagctatcgatggctgacatttggtctcttccaaagtacaatgtcacagcaactttacagtgtgcaggaaacaggaggactgcgatgagtaacgtacggaaagtgagaggtgttgggtgggacatatctgctcttggaactgcaacttggggaggtgccaaactatctgatgtccttgagctagttggaataccaaaactcagttcagtcacgtctctaggagggaaacacgttgagtttgttagcgttgacaaatgtaaagaggaaaaaggtggtccttatacagcatctattccattaaatcaggcaacaaatcctgatgctgatgtattacttgcatatgaaatgaatggagaggtactcaaccgggaccacggatacccgctccgggttgttgtacctggcgttattggtgcacgctctgtaaaatggctggacagtatcaacgtaaaagaggaggaatgccaggggttttttatgcaaaaagattacaaaatgtttccgccaaccgtggactgggacaacattaactggtcaactagaaggccacagatggatttccctgtgcagtctgctatctgtacactggaagatgtagatgttatcaaggaaggacaggctaggattgctggatatgcactttcaggtggtggccgtggcattgagagagtggatgtatcagctgatgggggtaagacctgggtcgaggctcgtagataccagaaagacaatgtggcgtatgtgtcagatggacctcaaagtgacaagtgggcttgggttctctttgaggccacattagacgtaccagcgaatcctgagatcgtagttaaggcggtggactcagctgcaaatgttcagcccgagaaggtagaagacatatggaatctgagaggaatcctcaacacgtcttggcatcggatcaaaattcagagatctttgtgcgttgaaagatctaagctgtgaaattaagtacgcagctgatcacttggagcaagcagactcactttaccattgtcccagaataataattagtcacttcaactttctgcgtctgtggagtaaggttgtacgagtgttggggctgtgtcattatgggatttgagctcacttggtttctgtgtaaatgtcagctgctgcggtttttttggtcactggatgactgctgctgttggctggtcaggtttgatatcgagaaatatccattgcattctgcgtttgaaaatactattgcagcat

SEQ ID NO: 1275 - DNA, 390 bp, Zea mays
  Clone ID: 700142463_FLI
cccaatcagaagagcggcggcgcgggcggacaaggagcaggcggaggaggagttgtgccaagccacaatgggtatctcgcgtgactcgatgcaccagcaccatcggcacagatgatacacacagcaagcgcgagcatatgaggattgccattagagagtagcgacattaaccatgttccccacttctttcccctcccgttcaatctcactggtctttgattgtattatatgtgagcatccatcattctgtgacgatacttgatacttgaatcgcacacacagacacaatgacacgcgagtgtaggggaaaagataggcatgatgttgtgactgactaacatgcccaggccaggccaaaaccctgcagattttcaatgcaaggaatccagc

SEQ ID NO: 1276 - DNA, 506 bp, Zea mays
  Clone ID: 700142480_FLI
tcctgtcgtgggatcccagccaccgccgctagaagaagagctcggcgattcccaggtcccgcgagaatatgccgaagcagatccatgagattaaggacttcctcctcaccgcgaggaggaaggatgcccgctcagtgaagatcaagaggagtaaggatgttgtcaagttcaaggtgcgctgctccaagtacttgtacacgctctgcgtcttcgatgctgagaaggcaaacaagttgaagcaatctcttcccccaggtttgaccgtcgaggaggtctgattggatacatggcaacgccgagttgaactacccaagcttctttatcagtagcagagcatgctactctatgtacttttggaacctaagctattagacctgtcagtgttggatgtctggatcttgcatttttggagaaataccaatttacctcgttcaaggatgcaagtatatttcttgtttaactgcacattactttatatttatgcctgtttcatacctttcctctac

SEQ ID NO: 1277 - DNA, 1007 bp, Zea mays
  Clone ID: 700142574_FLI
ccgaccgaacccacatcctgcttactgcccacaagaaagaagctagggaaacccgggggatcggaggactgaggagaggcagaaaacagaaggcccggctgcggctgcggctgcctttggtttcgtcgtcgtctccgcctgttttcccctctttccatggcaggctgatgctcttcaacacacacagtccactgtcgctcctcagttataagtagctagggcatctggctgctggaaaatcaagcacgcatccaccacacacacagctagctagcagatcgtttcgagtgaagatccaaagaggtagagagatggaaaggatgagttcgtcgctgcagtactgggtggaggagcacaagctctcaaccatcggagccgtgtgggcgacggcggtgggcgcgtcggtggcgtacagccggcggcgggcgccggcgcgggcgacgggcatgcgcctcatccacgccaggatgcacgcgcaggcgctcacgctcgccgtcctcgggggagccgcgctcgcgcaccactaccacggcaagagcaccaacgccgggaagaggcagcagcaggaggacctggactacggcttctactcgcagctgccgccggccaccgacgccgacggcaacgagaacgagcgctggagctggtagagcatgctgcatcgggacaagaacaagacagcagcgagaagaaagaaaaaacaataaattagtagcaataattggtgggtggtttggcatttggcaatgatgcgtgacgtggcgcctgcaggctttcttggtcctaatcctaatcctaatcctaatcccaatccatccagctaagacgtccacgcccgtggttttgtcctgttgatttgccaccggagacgacgatgcagcgcttgctctttgatttccatggcttattatcgatcagcctccgattcttctcctgcactactactacttgtaccatttcatctattgattgaatgaatggtcacgatgatgacgataattatgttt

SEQ ID NO: 1278 - DNA, 662 bp, Zea mays
  Clone ID: 700142588_FLI
aaagcaagacccacccatctccggcaaatttgaccggaccagagcaaagtaattcgactttgaaagatcacccagatcaacaagtgaattcaacagcagtgctgggcaaccaagtacggcctttgactaaccagacgccgtggcccgagttggattctccaaatggcaccttggctctggtaacagatgtccaaaagtccacatctggagctggagatgatggcagcagcacagtggacaagaggacggacggtagagatggtcccaaagaagacgtggatgtgtccacgaaaataatgaacagggcaatcagtgaggatgaagtcgttccagagtgacaaggagatctctcttgccggcttctggtgtaacctgtaagtttgtaggacttggtttcgtctcctagactagacttggagatgcgcaagcagactatctcgttgtgcacgccttttgtgtaagtttgatagatgtctgcttttgtactggcagttagtagtccatcacaatgatctgggtcgagtggagaacaagaagcatgtgtacccacaggaatatgtgtagcgattctgcagctcttgaagcttcgctgctcgaatcaaatgccaaagtaggcagctaaataccatctatcaatgaaatgtccatgcccatcgctgccc

SEQ ID NO: 1279 - DNA, 662 bp, Zea mays
  Clone ID: 700142685_FLI
cgcacgaacagtgcttaaaatctgaaatggacggttatgtatccaagccattcgagggcgagcaattgtacagagaagtagctcgctttttccaaaatcaagaccaagttcagtaggtaggcttatatggaggagtgtaaagtagtggaggatatcgccaacggttcacccgtcgaggccgaaagaattttgtcaaagatctcatcttcttgaaagtgggcatcaattcgcaaagttagagggcccctattaaaacactagaaatgctgggatgtggccgccagttaggtggaaacgatttaggctggagatggaaccacccatgttcggatgcttggtacatctgaccaatctgcaaagctaaatgcgcaatgtcttgaaatcaacatgcacgtgcagctattcattcgacgatttgctgaggtcaaggcgtgtgaaaaaaaatcagctgcattcactaactgcaggtgccctctgccactatataatatataagactagggggagaagttttccttcccccggaaggcacggctgtacatattatattagggattggttggttgtttgtgcaggcatttttgtatgcatcatattcggcctgtatgggtcgaagctgtaaagtgtaaatgacacattcaaagatggaagttttgtttgac

SEQ ID NO: 1280 - DNA, 814 bp, Zea mays
  Clone ID: 700149634_FLI
gttgctctttagttagtctgactgttgctcctctctctctctctccctctccatttgggtcccccttctctttctcatggcggcggcggcggcgtcgacgccgcagggagtggcggagcggcggggcatcccggcagcggccttcgttgaggacgttgaggcctacctccgccaggtcgggctcgacgtcaattccgcgctcgcttttctccaggaaaggctgcagcagtacaaaatagtggagatgaagcttctagcacaacaaagggatcttcaggcaaagattcctgatatagagaagtgcttggatattgttacaacattacaagctaaaaaggatttgggtgaggcactcatagctgatttcgaattgtccgaggggatctactcccgtgcaaaaattgaggatactgactcggtgtgcctgtggttgggtgcaaatgtgatgctggagtactcttgcgatgaggccaatgccctcttgaagaaaaacttggaaaatgccaaggccagcttagaagtccttgttgctgatctccatttcctgcgagaccagcaaaccatcactcaggttacaattgctcgggtattcaactgggacgtgcaccatcggagaagcaaacaggccgtaaaagaaacctgattacttacatcacgaggccgaccaatgcgactgggactttttttttttgtaccttctgctacctctggcagattagcccgtcatagcaagcagtttgttgttgtatcggtttgttcagagttttacggtgtgggaacattagtagaaatgtcatttcactgccttcttttc

SEQ ID NO: 1281 - DNA, 2231 bp, Zea mays
  Clone ID: 700149672_FLI
attcgttgaattctatggtgttggtgtgggcgagctatctttgcctgctagggccacaattgccaacatgtctccagaatatggagctaccatgggcttgttccctgtagaccaagtagcattggactatctcaaattgacaggccgaagcgatgaaactgtgtcgatgattgaagcatacctgcgagctaacaaaatgtttgtggacaagcatgagcctgagacggaacgagttttctcttcatatctggagctggaccttagtgaggtggagccttgcgtttcaggccccaaaaggcctcatgatcgtgtccctttgaaggaaatgaagtcagactggcatgcttgcctggacaacgaagttggtttcaagggctatgcggtgccaaaggaacagcaaggcaaagttgtgaaattcgacttccatggaaggccagctgaaatcaagcatggcagtgttgttcttgcagcaatatgtagctccacaaacacatcaaatcccagcgtcatgattggtgctggccttgtggcaaagaaagcctgcgaattgggccttgaggtgaagccatgggtaaagacaagccttacccctggatctgtggttgctaccgagtacttgaaacatagtggccttcaagattatctgaaccagcaagggttccatgtcgctgcgcatggctgcgccacttgtgtgggcaactctggtgacctggatggatctgtatccgctgctatcacagaaaatgatatcgttgctgctgcggtgctgtcggccaaccgaaacttcgaggggcgtgtgaaccctctcactcgggctaactaccttgcctcgccgcctctggttgttgcctatgctcttgccggcactgttgacattggttttgaggaagagcccattggagttggaaagggtggcaaggaaattttcttgagggacatatggccttcaaaccaagagatcgatgaggttgtggagtccagcgtgcagactcacttgttcaagaaagtgtacgactccatcatggaacgtaaccctaggtggaaccagctgccggttccaaaggaggcactgtacccatgggacgacaggtccacctacatccgcaagcccacttacctggagggcatgtccatgacgccgcctggcccgcccacggtgacggaggcctactgcctgctcaaccttggagacagcatcaccacggaccacatctcctactcggggaagatccccgagggcacacctgcggccaagtatctgctcgagtatggtgtggagcccaagaacttcagctcctatggtggccgccgcgggaacaatgaggtggtgatgaggggagcgtttgccaatatgaggatcgtgaataagcttcttaatggcgaggctggtccctggacgatccatgttcctaccggggagaagctctacgtttacgacgcggcaatgaaatacaagtcggaaggtcatgacatggtcatcatcgctggctccgagtacggcagtggcagctctcgtgactctgctgccaagggaccaatgctactgggtgtcaagtcggtgattgcaaagagcttcgagcggatccaccggagcaacttggtggggatggggatcattcctctctgctttcaagcaggagaggatgccgattcactcggcctcaccggacgtgagcgctacaccatccacctccctaccagcaccgccgagatcagtcctggtcaggacgtgaccgtcacgacccacgacggaagatcattcacttgcactcttcgcttggacacacagcttgaggtcacatacttcaaccatggaggcatccttccctacatggtccgcaacctggcggcacaaatgaaataagttgaagtttattggtgggaataaattaaaaggtactcaatgccacgtatttggcgcatgtatgtaaataagtggcacattctaatcttcaattgtattattcgctctggcattgaggtgggtcatagctgcattatactttctccgcaggacatgagcatggattttgttttagcaacagattatttgtactcttgattctttggttccatgctctcttcggccatctccatgtcaatttgctttgcaaacaatataatatcagcgtgccgtgcccttgtagatttccaaatggttatatgcatatgtactattgaaattgtcattttagtttgcaaacaataccaacgtgcctttgtagatttcc

SEQ ID NO: 1282 - DNA, 968 bp, Zea mays
  Clone ID: 700149703_FLI
tataccttaagccagcagaaaattaggtataggcgtagagactagagagcgagcgagctcagtccgtgttcagtcgagagagctcgtttagcttggccatcgacgagctagcagagcaatagctaggatccatggcgaacgcgggcatgaagccggtggccggcctcctgctggtgctcaacttgtgcatgtacgtcatcgtggcggcggtgggcggctgggccatcaaccacgccatcaactacggcttcttcatcggcaccggcctgcacctcccggctcacttctccccgatcaacttccccatcgggaacgcggcgaccgggttcttcgtcatcttcgccgtgatcgccggggtggtcggcgcgggctcggcgctggcggggctcaaccacgtccgcgcctggagcaccgagagcctgccggcggcggcctccgccgggttcattgcgtggacgctcaccctgctcgccatggggttggcggtgaaggagattgaactgcacggcaggaatgccagactgatatgcatggagtccttcaccatcatcctgtcggcgacgcagctcttctacctgctcgccattcacggaggcttgagataaaatcgatcaccgtgttggccggaggcactgaggcagtgactgatgaatggagacttgtcgtcggttccgtacgtgtgtgtctgtcggattgagtgggcgtgcatcggattcacggggcagcgcgtgtactatatatgtgacttcattcggttcgctgtgtcgttgtgggctgggctgtcttccaagatgcatggagaggcagtacgtatgtacacgtacgtgtatctatctgttcgtgtgtgtgcgcccgctgctgcttgatttatcttgtgcgtccgattggttacgtcattccgtgtcattcattgattgtttcggagatggagagtcaatatgtctacacgtcatgatgacgtggtgatt

SEQ ID NO: 1283 - DNA, 1463 bp, Zea mays
  Clone ID: 700149718_FLI
ctgcgagacctgcaccaagaccaacatggtgatggtgttcggcgagatcacgaccaaggcgaccgtggactacgagaagatcgtgcgcgacacctgccgcgagatcgggttcacctccgacgacgtgggcctcgacgccgaccgctgcaaggtgctggtgaacatcgagcagcagtcccccgacatcgcgcagggcgtgcacgggcacttcacgaagcggcccgaggagatcggcgcgggcgaccagggccacatgttcgggtacgccaccgacgagacccccgagctgatgccgctgagccacgtgctggccaccaagctgggcgcgcgcctcaccgaggtgcgcaagaacggcacctgcgcctggctgaggcccgacggcaagacccaggtgacggtggagtacgtgaacgagggcggcgccatggtgcccgtccgcgtgcacaccgtgctcatctccacccagcacgacgagaccgtcaccaacgacgagatcgccgccgacctcaaggagcacgtcatcaagcccgtgatccctgagaagtacctcgacgagaagaccatcttccacctcaacccgtccgggcgcttcgtcatcggcgggccccacggtgacgccggcctcaccggccgcaagatcatcatcgacacgtacggcggctggggagcccacggcggtggcgccttctccggcaaggaccccaccaaggtggaccgcagcggcgcctacgtggccaggcaggccgccaagagcatcgtggccagcggcctcgcccgccgctgcctcgtgcaggtgtcgtacgccatcggcgtgccggagcccctgtccgtgttcgtcaactcgtacggcaccggcacgatccccgacaaggagatcctcaagatcgtgaaggagaacttcgacttcaggcccgggatgatcagcatcaacctcgacctgaagaagggcggcaacaggttcatcaagaccgccgcctacggccacttcggccgtgacgacgccgacttcacctgggaggtggtgaagcccctcaagttcgacaaggcatcggcttaaggttgggagtgtcactgtggacatgaggactaccttcctctggctctgctgttacctgcaagcattgctgctgctggatgtgtgtgtttgatcagtgactggctgctgctccatagaagatgaacggagagaaggatgatgaagggctttggcaatcgccgctgcaactgcaacccatgccatgccggcttagtgattgggtataatttggcttggcagcagccagcattattatgtgctgatctgttatcttttactagtttggtcgtccgatatctttctttctttttccccccttttcgactctgtactgaaactgctgagagattcgcagtattgttgtatcgtattcatatgctactgttactctggtgcccctctctctctctctgctgagagttttctc

SEQ ID NO: 1284 - DNA, 747 bp, Zea mays
  Clone ID: 700149734_FLI
tgcaggaagtgaagaaaaactagcagcctgcaaagctttgggtgccgatgtatgcattaactacagaactgaagacttcgttgaacgtatcaaacaggaaaccaacggaaagggaactacttcgatgctctcttttttggcagctagtatgtatcgagcattatcatcaaatagcgcaacatccctgactgtaatctgaaactcactaccaggtgttgatgtgattctggataacattggaggatcatatctccagcgcaacctgaatagcttaggtgttgatggtagacttttcatcattggcttccaagggggcatagcagctgaagtgaacctgcaagctgtgcttgcacgccgtttgaccatacaagctgctggactgcgcaacagaagccttgctaataaggcagagattgttagtgaggtggaaaagaacgtgtggcctgctgtcgctgctggcaaagtgaagccggtgatttacaagacgtttccgttatgtgaagctgctgaggctcataggttgatggaagctagcacccacatcggcaagatactgctgctcccatgactgcacctgtggcgtttgcgctcttgctctcggaggagtcagttcaaaaacatatgcaattcctgagactgtgacaacctgcacggatgttgtactggtgtcgcatgtcttttttatatatatcttgtagtactagattggatcttttaccccgagaaattatcttgtcaattggatcc

SEQ ID NO: 1285 - DNA, 1359 bp, Zea mays
  Clone ID: 700149766_FLI
cagaaacacagatgggcgacggggctccgccgccaggggctctatactccttcggaacgccgtggccggagctcaatcaaggcctcacctacaccgacacgttccgttgcgctgatgcggacgccgctaccaccttgattgagttctactctactaaccacaagagctcggcgccattgccagggtggatcaagaggattcgtaatgggcagataaccgttgatggtgaagttgtcactgatccagatatgactctggagccatttgcgccgtatttgctggaagtgctctacgaggatgatgacatggttgcccttaataagccttctggcttgcaagttctgcctaaaggactgtttcagcagcgaactgttttagcacagcttcaattgaaagactggaagatggcctcatcttgccggttcaagagaaaagatgtgcagtcacatccagtacctgttcatcgtttagggaggggaacatcaggcctcctgctttgtgccaagacaaaagttgccaaagttcgacttgcatcttattttgctgaaggtgctataaatgctgcaaagaaaagggataaatcagagttcagtgaagagcgaaaaatttcaaaattttatcgagccttagtgactggcatacttgatgatgatgaggttgttgttacgcaacctatagggttagttcattatcctggagttgcagagggactttatgcagcatgttcctcaggaaagccagcaatgagcaaagtatgtgttcttgagagacttgcacaccaaaatcacacactggtccaggttgaaattcattcaggacgacctcaccaaataaggatacaccttgcatacattgggcacccacttgtagatgaccctctctatggtattggtgggcaccccaattttgttgagccagaatctactggcacagatagttcttttgcatctgatgggggttatgagagacctttgcaacctgttcctggagactgtgggtatcacctgcatgcacattggctggttctttgccacccaacaaccaataagatggtaaaaattaccgctcctcttccacaaattctacagacacgggaggaacgccgcgctgcagctgagcaaaccggtggttgaacatgtagaatcttgaaaatgtatatttcttgaagttagcaagcagcaggttctcacagacgttagagttagacactcagacctctgctcctctgtcaactgtacaacggcgagctatggttccgcttgatgcagcgccgtctcatgtgacgtttaggccaggctaccgagatggagaaataacattaggtatttaaaaataaatagagtactagctaatgagctc

SEQ ID NO: 1286 - DNA, 686 bp, Zea mays
  Clone ID: 700149786_FLI
ctctcgtagaagcaaagctcgacagtagctaccacaccacttgacttcaccatggcactcgccggcatcaccaaccaggacttgctcgacgcacaggttgagctatggcacagcaccttcgcctacatcaaatccatggcactcaagtccgccttggaccttggcctcgccgacgccatctaccaccacggcggcagcgccacgctgccgcagatagttgacagggtcacgctccacccgtccaagaccctccacctgcgtcgcctcatgcgcgtgctcgccaccacgggcgtgttcagcgtccagcacccatcgccgttgggtgacgacagcagcagtgccagtgacagtgagcctgtctacaagctcacagcagtgtccgccctcctggtcggcccgcgccgcagccacgtcccgctcgccgcctttgtcgtcgacccggccctcgtcacgcccttcttcgagctcggcaaatggctccagcgcgagcttcccggcccgtgcatcttcgagcacgcgcacggccagaccatctgggagcacgccaacggtgacgcggccttcaacgcgctcctcaacgacgggatgctctcggacagccacttcatcatggacatcgccagcaaggagtgcgcggacgtcttccaggggataagctccctggtcgacgtcggcggaggtctcgg

SEQ ID NO: 1287 - DNA, 1253 bp, Zea mays
  Clone ID: 700149792_FLI
caagaataagatcgattactgccgcctccatggcatcgagatcgtccacaacctcgcgcaccttgacaacgagctcgccggatactgggccaaattgccgctgctccgccgcctcatgctctcccacccggaggtcgagtggatctggtggatggacagcgacgcgctcttcaccgacatgtcgttcgagctgcccctgtcacgctacgacggccacaacctcatcatccacggctaccaggacctcctcttcgagaagcactcctggattgcactcaacaccggcagcttcctcttcaggaattgccagtggtcgcttgacctcctggacgcgtgggcgcccatgggacccaaggggttcatccgcgatcaggcgggcaaggtactcacggcaaacctcaagggccggccagcatttgaggccgacgaccagtcggcactgatttacctcttgctctcgcaaaaggacaagtggatggacaaggtgttcattgagaattcctactacttgcatggcttctgggctgggttggtggataagtatgaggagatgatggagaatcaccacccaggcctcggcgacgagcggtggcctttcgtgactcactttgttgggtgcaagccatgtgggagctatggggattacccagtggagcgctgcctcaggagcatggagcgagcgtttaattttgccgacaaccaggtgcttcggctatatggtttctcacacaaggggctggaaagccccaagatcaagagattcagggatcagacaactagaccaattaatgatgtggagaacttagatatgaaggccaaaatatctacaatttcctgaaagttcagatgagagttggtggtttggcaattgcatacttgctttggctatcaacaaggtcagagcattttgtgatatgggggacatggttgttctagtttccactctcttgctctctctctttttctttttcgttcaccaatctttattgttatgtgacagctagagattgcaagctttgtttattatcgtggttgaacatgatagaagctcaaatctgatggaaatagtctcgcttttgtactctatgccatttcattttttgttctaggttcttgtggaacatgcattactgatatgtggagtttgtgcatatgttagtagactagtcgttctctatttagctgctacctttcttatcttccatggttgatactgctcactaaatttacctaagcatacattaagatttttc

SEQ ID NO: 1288 - DNA, 1773 bp, Zea mays
  Clone ID: 700149803_FLI
gtgagcgtcgtgggtgttgatggcgtcaacggcgtactcgcggccatccaagccgcctgggccggcggccggagacaggagcggaccgcggctggccaaggagctcggcaggatcgagcccaagaagctgggcatcgggctggttgccggctgctgcttcgcgctgctcacctacctctcctttgcccggctgtttgccatctactcgccggttttcgacagctcgtcgtccatggtgttgaagaacatgccgccagcaacgacgacggtgccgggtacagctacaggggcgctgccggtggaggagcagaaagaggttcgtgaccctgaggcggacccgcacatgccgaacttaccggaggtcacagaaaaggatcagcaggaggaggccacggcgacgaagccagccggtggtgccattattacagaggccaagatcacctgcgacgagaacggcgtcgacgagggcttcccgtacgcacggccgccggtttgtgagctagccggcgacatccgtgtcagtcctaaggagaaaaccatgtacttcgttaacccgtccggcgccggcccgttcgactccaacggggagaagaagatccgaccgttcgcccgcaaggacgacttcctcctccccggcgtcgtggaggtcacgatcaagtccgtgtcctcggccgcagccgcgccgcggtgcacccgccggcacgacgtcccggtggtggtcttctccgtggccgggtacacggacaacttcttccacgacaacacggacgtgctgatcccgctgttcctcaccacggcgcacctgcaaggagaggtgcagctcctcgtcaccaactacaagccgtggtgggtgcgcaagttcacgcccctgctcaggaagctctccaactacgacgtcatcgacttcggcaaggacgacgaggtgcactgcttccgggcaggccacctcgggatgtaccgcgaccgcgatctcatcatctcccctcaccccacgcgcaacccgcgcaactactccatggttgactacaaccgcttcctccgccgcgccttcaacctgccgcgcgacgcgccggcggtgctcggggaggagaccagcgccaagcctcagatgctcatcatcgagcggaagggcacgcggaagctgctcaacctacccgaggtgtccgcgctgtgcgaggcgctcggcttcgcggtgaccgtggcagaggccgacgctgacgtgcgtgtgttcgcggagaaggtgaacgcggccgacgtgctcctcgcggtgcacggcgccgggctcacgaaccagatcttcctgcccacgggcgccgtgctcgtgcagatcgtgccgtggggcaagatggactggatggccaccaacttctacggccagccggcgcgcgacatgcgcctccggtacgtcgagtactacgtctcggaggaggagacgacgctcaaggacaagtacccaagggaccactacgtgttcaaggacccaatgcacatccacgcgcaggggtggccagcgatcgccgagatcatcatgaagcaggatgtcatggtcaacatgacaaggttcaaacccttcttgctccaggcgctcaacgagttgcaggactagctgcagctggagaagggtgattccctttgtatggctcgatacggacagttcggatagggcgataggccagcacagatgcggtacaggagggcctttcgtttgtttcccttttttatttgtcattttaaatcaactaaaattgatatttttatttgggactgtttatt

SEQ ID NO: 1289 - DNA, 1341 bp, Zea mays
  Clone ID: 700149820_FLI
gcatcgcctcgtcggaacggaaggcggcagcgctgcgagcaagggagggagggagcggggatgaggatgctgtcgaaggcgtgctcgattgtggcctcctccctcccgcgctgctcctcctccgccgccgcccccacgatgagggggcagccgtccttgctgccaagcgtgcggaagcaatggcccgggaagccactgctgtatggaatcggcaccctgttggtcatgccactgaggacactgtatggagtgggtcgtgtttttggcgcaggacggtttctctgcaacatgaccaacgtctcttcgtcgctgcaaattgagcttgtaccatgccttcgagataactatgcgtatatcctgcatgatgttgatactggaacagttggagtagtggatccttctgaggctatgcctattataaatgcattggaaaagagaaaccagaacttgacttatatactgaacacccatcatcactatgatcatactggtggaaacttggaattgaaggcaaaatatggtgcaaaggtaattggttctgagaaggataaggacagaatacctggcattgacatcacgcttaaggagggtgacacatggatgttcgctggccatcaagttcttgtactggaaactcctgggcatacaacaggtcatgtgtgctattatttcgctggttctggagctatatttacaggtgacaccttgttcaatctatcatgcggaaagctttttgaagggactccacagcagatgtatgcctcactccagaaaattacagctctacccgatgatacaaaagtatactgtgggcatgaatataccttgagtaatgcaaagtttgccttgagtgtagaaccgggaaataaagcattgcaggaatatgctgcaaatgcagctgagctgcgtaataagaatatacccacggtgccaacaacaattggaagggagaaggaatgcaatcctttcttgcggacctccaatccagaaattaagagaacactgtccgttccagatcatttcgatgaagatcgggtgcttggagttgtccgtcgagcaaaagataacttctgactaacaaaaggaaatgctcgtgacgtatgacccatatcttgttaaagttcagacagagaacctaagtcacaataaacataggaggaaatgaaggtatatatgtttgagctagattttgaaatgcttcggcaaaattatgtcgagtgtatgtagcttgggcagtgcagtgcttgtctatagcaaccaatgattcttttgaccactacaaataagcgtgttctgctatcatctactctctgtaaaaaaaacgccacgtagccgtttcat

SEQ ID NO: 1290 - DNA, 965 bp, Zea mays
  Clone ID: 700149968_FLI
gcgcctccctttccccttccctccctccctctccccgcgggccgccagaggcaatttcgccctcgattcgaccccgattcgtccgcccgcgaccgggattccctccgccaagcgcggatctgaacgctgcgctccgtgtcgccgctcgaatccgccatgaagggggccaaatccaagggcgccgccaaggccgatgccaagctggcggtgaagagcaagggggcggagaagcccgccaagggcaggaaagggaaggccggcaaggaccccaacaagcctaagagggctcccagcgctttcttcgtgttcatggaggaatttcgcaaggagttcaaggagaagaaccctaagaacaagtctgtcgctgcggtggggaaagctgctggcgacaggtggaaatccctgagcgagtcggacaaggctccctatgtagccaaggctaacaagctcaagctcgagtacaacaaggccatcgctgcctacaacaagggcgagagcactgcagctaagaaggctcctgccaaggaggaagaggaggaagatgaagaggagtctgacaagtccaagtcggaggtcaatgacgaggatgatgaagagggtagtgaggaggatgaagatgatgacgagtgatggagctcctcgagacaatggaccgtgcttcatccaacaatggagcggctacacaaggccccgtggcgatcacaaaaaaggagcctatatccatgtactagaattattcagtttcactccacatcgtgatgttttatttttacttttgtcgtgctataacggatagcgctcctcgttggcgccactggcgggtggttctgcctctggtctggtgtgtttgtgtgtggtcacacttgccagccagcagaggcgcctgcttgtacctagattactgtttccattgtcgtcatcatcggctaacattgtcataatgtcagtttgggtaatgttagatt

SEQ ID NO: 1291 - DNA, 1763 bp, Zea mays
  Clone ID: 700150045_FLI
caaattgacaccttctccgttcccgacgactcccgtgagcgtggagcggcgactaggcgaggccatggcctccggcatcggctccggccagcagcaacccccagcgccggcggcagatgctgacccgggagccgtcggcgacaagctcgtcttcgaagcgccgcctcagcccgtgagggaggactacgtccagaacgccgtcaagtttctctcccaccccaaggtcaggggctcccccgtcgtctacaggcgatccttcctcgagaagaagggccttagcaccgaggagatcgacgaggccttccgaagggttcctgatcctcaacccagcactacggctaccacttctccgcagcagcaggtcaacagccagaatcaatccgtcggggtgcaagcttatgcgccagcacaacctgtgcacccagcaaacgctggccctgtcgtccttccaacgcagcccaggtttagctggtaccaagcattcctggctgcagggctcttgcttggttttggtgctagcgctgctgtctttatcaagaaactgttccttcctaggctcaagtcttggatccgcaatgttgtagcagaaggtaatggcactgaaggcaaccagcttaagcctaggattgatgatgaaacggccgatgctgtaaaggcttctgcttcggctgtttctgctattgccaaaacaaaccaacaactgcttgcttcaaaggatgaagaaaagaagatactagtgacgttgacacaagctctagattcccaagccaaggagttaaaatccttgaccgattcaatcggtcataccagggaacccataaatattaccagggatgataggttttctcagtaccgcccactggaagaccatgcccctactgttataaggaatggggcaattaacagttcatggagagcctctcagcaaactaacatgtatggtgtgtcaaatggcgactttggttccgtgaggtcttcatttgcgccagcacctgttgaacctacagctggatcattttcaagatcctatggcgagcagccgatgtccactgcacaacgaagcgataggtcttctggcagtaagccatgggagatgcagcagtattcacaacagaggcctggttatggatccaactcccagttgagtgaggaaggatcatactctgatgcccaggacagctatgctccttcctatcaccagaatggaaaggcccctgattttcaagcggatgaacctaggcctttgacttacaacactggagttgaggaaagaccgccaccgcagcgccgctgggtgccccctcagcctccaggtgttgcgatgccagaagcagcagctgccatacgtcaaccaaaggcccttccaaagcagccctccagcgatgcctctgaggcagctggtgagatgcaggtgaatggttcaagtgcatcggatgctgtgactgaggttcctgttaatggtgctactgcaagtgatgctggacgcagtgagatccaagaacaatcagtggcggcctaagtgaaaccaagaccagctaagaactgggaagcaatctaagagagattcaggatctctagtacatctgggcggtttgtcatacatctctgaataacgtctgtatcagaacagcggggcaaccacaccgatgggtacccgtaataatgcaataagtagcagatagtttctgcatttagattaatgctacttgtacacaggagaacatatcaataatatttctatggctgttcgattgagggtgctt

SEQ ID NO: 1292 - DNA, 349 bp, Zea mays
  Clone ID: 700150128_FLI
gtctgcaagggactttgtagataaggtgcgtgagacgtggacagacgagcacatagcatccaagcactcagcactagatgcagtcagcctccaggaagtaagaacatgcattgaaattgggctaaaatgtgtggatattgatcagaacaagagaccttctatagttgaaattgttgacaagctcaatggaaggcatgctcactgaatgatgaactcctgcatactatacatgcaagtgaaaattatgttgcggacccatggagatttgctctagatggaatcatggacaaaataattgtatgtgttaccgattatgtacttttgaataatgtgttcctcgtgttgtgtc

SEQ ID NO: 1293 - DNA, 1389 bp, Zea mays
  Clone ID: 700150130_FLI
gtctgttcttctcctctccctctcatcctggcgtttgtaccgagagtacgactgactgggtgaagggtggtgcctagctgatcgcctgatccatctcgtccgcccggggcccaagcagggttacaagagttactagggatcctctgatcgaaaggatggacactttctctcatgtcccccctggattccgtttccaccccaccgacgaggagctggtcgattactacctgaggaacaaggtggcgtccaacaagatcgaccttgacgtcataaaagacgtcgatctgtacaaaattgagccctgggatctccaagagaagtgcaagatcgggacggaggagcagaacgagtggtacttcttcagccacaaggacaagaagtacccgacgggcacccgcacaaaccgggcgaccaccgccggattctggaaggcgacgggtcgcgacaagcccatctacaccaagagctgcctcgtcggcatgaggaagacgctcgtcttctacaggggccgcgcgcccaacggccacaagtccgactggatcatgcacgagtaccgcctagagaccaccgagaacgtgaccgccgcccctgaggaaggatgggtggtctgcagggtgttcatcaagaagcgagtggaggccgtgcggcggatggccgacggcgcgccgccgtggttcgatggccacgtccccggcggcttcatggcgcccgcgggccttggctcgccgaggcagctgatgcatcaccacccaaacccggcagcagcagcgccactgctgtacagcggccagcagctctaccactgcaagcccgagctggagtaccatcaccttctgcagccgagccaagaggccctgttgcagcagctccctcagttggtggagagccccaagcctcctcctcccgccttcatcgaccaaggcagctgcagcctccagtcccccgacgaggcttctgggtacaacaccaccccgcagcaaccgccgcccatgacgacggaggccgcctacatggacgacgactcggtcaccgactggagagtgctcgacaagttcgtcgcgtctcagctcttcagccacggcgacggcatggcgaaagaggatggttaccccaacccggggcaggcattatttcaggctgagaacaagcagccggaagaagcactggactacgcctccacgtctgcgtctggtggcggcggcggcgaggcgaacatgtggaaatagcgtatgccgtatacaattcatctgcgagtttaccatatatatgcctcccaaacctgatttagtgtacaaatatatagcgtgcaatataatgcttgtcatgctgacacatgataatatacacatgcatgcatgataataaacacgtaaccgaagtggttattat

SEQ ID NO: 1294 - DNA, 1629 bp, Zea mays
  Clone ID: 700150134_FLI
caaaacgcaacggtcgaatctcctcgaattcgaattgcagccggtgccacccacctcacatggcggcggcggaagagatgatggcggtgctggacaaggagacgctggcgctgatgggtctgggcaacgccgccgccgcggtggttgccgagtgcgagaagttcaaggagaacgcgaggccgctcaagcgcgggcgcgacgtgtccaaactcaaccacgcgctcaaggcacacgccgatcccgcccagcgcgccactcttctcgaagcccgaaagaagctgattgaggcaatctacgagtaccaaggcgaggatccgctccaaccgtggctggagtaagtttttctcatagcccctttaactcgcctttttcgatttcttggttcgtgccaggactggtagctgttctagcagatagattgttcatttcttctctgattcgtccgcgtgcagctgcatcaagtgggtgcaggagtattttccgaccggcggcgagtgctcagggttggtggtgttgtacgagcagtgcgtgcggaccttattggacgacgagcgctacaaggacgacctccgcttcctcaaagtgtggctggaatacgtgagtgatgctttgccagcttgattgtttttctctgtagtttgtgtcagtgcagtggaggcacctcatatatcattccgctgccgatcttgtcctttttgcaggcggggaactgtgctgatgctgaggtaatatacaggttcctggaggccaaccagattgggcagggccatgcgatctactacatgtcttacgcatcgttgctggagtcaaagaacaagttgaggaaagctaatgagatctttgaccttggtatagctagaaaagcgaagcctctggagaagttggaagctgtatacagggcatttcttcgaagatcaatcaaaaagagggaacaagaggatgatacagtagatgatgatctgccaaaacgcagtttcgggaataacttgaaacgagatgaaaacagaaatcagcaagcagggaactcccacctggggagaccaagggcactgcagaggccgctttcagtttacaaagatgaaagtccattaccaaatcagggccttgacagagtgaggagcaaagaaaataacacaagttggcgcgtcctcggaacacgagcagaacggaacaaggaaaataacatgatgcctgctaaatggacgtctcacaagattccacagaagttaggagcaagaggagcggttcaatcaacccgagccagttgttccattgaagtcttcgtcgaggaagactgcacacaggaacctgctcggccggtgccaaagagcccaaatccttctgttctgaagctcaggcaaacaacaagcaaaagccttaagaaggagactgaattgctcaaggagaacccgctgcgcaacttccccctgagcaggcttaggtaattagcatcttgctggttctgagaaacatctcgtacgttatgatttggtcgtatgtatggttgctgtgaggtgttgtgcccaaaaaaggctttattagcctctaaagcttagacgagcaatgtatgcctatggcattatccaagtgatgtaaggctgtgcattatattgacacggcgtgcttatt

SEQ ID NO: 1295 - DNA, 1720 bp, Zea mays
  Clone ID: 700150178_FLI
ctatcaccaacgagggagctcgctcagcagattgcagatgtacttagtgaggctggtgcaccatgtgggataaaatcagtctgtctttatggtggaactaaaaaggaaccccaaatatctgcccttaaatctggagtggatatagtcataggaactcctggtcgtatgaaagaccttattgaaatgggtgtttgctgtcttaatgaggtttcgtttgtggttctagatgaagcagataggatgctggatttgggttttgaacctgaagtcagggcaattttgagccaaacatcatctgtacgccagatggttatgttcagtgcaacatggcctcttgctgtccacaaattagcccaggagtttatggatccaaatccgataaaggttgttattggatcagaagaccttgctgctaaccatgacgtgatgcaaattgttgaagtattggatgatagaacaagggattcaagattacttgccttgcttgacaaataccatcaagcacaaagcaacagggttttggtttttgtgctgtacaagaaagaagctgcacgagtggaaacaatgcttcagagaaggggatggaaggctgtttcagtccatggcgacaaggctcagcatgatagaacaaaagctttatctttatttaaagaagggaaatgcccattaatgattgctacagatgtcgcttcacgtggacttgatattcctgatgttgaagtagtgattaactatagttatcctttgaccactgaggactacgtccacaggataggaaggactggtcgtgctggcaagaaaggtgttgcacatacctttttcactcaagcgaacaaggcacttgctggtgaacttgtgaatgttctgcgggaggctgatcaggttgttcctccagcccttatgaaatttggcacacatgtcaagaaaaaggaatctaagatatacggatctcatttcaaggaacttacagcagatgctcctaaatccacgaagatcacatttggcgattctgatgaggactgatgtgatgacagcttaggccttgttcgtttctatcggattggtaggccggaacgattcctatccggattgcttctctaatttatataaactttgattagctggaacgattccgggtgcaatccgacggaaacgaacaaggccttactgatttttcatccctgctgacggaagcttgatttctccgttggtgatgctatggatgtgatcagatcagccatttgcaagctgattgcagccacggatgagtattgtggcagtgggcaatcccaaaatatagctctcttgttataggttagtttattatgagtagcattcggcttatgtttttctggaccgtccccattatgcattagcttgggctgcttggctgtatgtaataataagcaacattctgcttattatgatttgcattctcttggaggcttagtttggaaacttaaatcgtctccggtatttccagggattgagtgggaaaataagctattttcccactcaatcttcagggaaaccggaggggatttaagttttcaaactagcccagagtgtagttaaattcagtgcgtccttagtacaagcagcccggttatggtaatgataggatagtgaaaggtgtacttctatcctggttagagtaaaaaaagaatatggttttccgtgttatagtaaaaaaaagaggatggttttgcagttggatttt

SEQ ID NO: 1296 - DNA, 1473 bp, Zea mays
  Clone ID: 700150242_FLI
cagaccagaatccgccctaccaatcgcctccccagatcggcggcgatggcgtcgtcgcaggcgaacctcgacaagatgcagctccgccagagctaccgcaacgtctggcacaccgacatgacgaacgccatccaggccgacttcccctactgctgcctcgcgctgtggtgtggaccttgcgtgtcgtacatgcttcgcaaaagggctctctacaatgacatgtcaagatatgtctgttgcgctggctacatgccatgcagtggaaagtgtggcgagagccggtgcccagagttctgtcttgcaactgaggtgttcctttgctttggcaattcagttgcatcaacccgcttcttgctgcaagatgaatttaacatacagaccactcagtgcgacaactgcatcattggcttcatgttatgccttcaacaagttgcttgcatcttctctatagttgcagctattgttggtagcgaggagctttcagaggcttcccagatccttaattgtctgtctgatttggtctactggacggtttgtgcatgtatgcagacgcagcacaaagtcgaaatggacaagagggatggaaagttcagcccacagcctatggcagtgcccccggtgcaacaaatgacacgcatcgatcagcctatgccgcctcctgctggatatgcaccgcaaccagcatatgggcagccttatggtggctatccatctcctcctggccaaggttatccacctcctcctggccaaggttatccgccagctggatactcccagggcggtgcataccctccacccgctcaaggttacccacagggtggtggatatcctccacctggtcaaggttacccccagggtcagggtggtgcatatcctccgcctggttcttaccctccacaaggttcctaccccccagcagagggctcctacccagcacaaggttcctaccacccagcacagggctcctacccagcacaaggttcctattccccagcacagggcccctacccagcacaaggttcatatcccccacccccagcacaaggttcatatcccccagcacagggctcgtacccagcacaaggttcctaccccccacaggcttaccctggcaagtaaagatcacacgacaggtgaaccaaatatcgtgaacatgtaaacagtaggaccgctttagcgctataggttattttgataaaattctttactgttcagggtggcattcggtgaacaatatttctattttatatggtcaacctgtcaacatcttgtgttgatcatgtcgtgttgagtctatcctctttttttttttcctgaataaggaatgacattgaactggaatgtatttgaatttggtgacaactcacgtggatattgttttggttctgagttgtcactttgctgtgtatgatagttgcaacttttgatgacgtttgataatggagtgaaggaatggaatgcttatgacttgtg

SEQ ID NO: 1297 - DNA, 1676 bp, Zea mays
  Clone ID: 700150246_FLI
gaatcagcttcatctgcaagaattcaaatctgttgcagaatacaatcatgctcttcatagtatttgttcaaagttgaagttttgtgagaaagagcccttagagacagataatatagagaaacctctatctactatgcttccagaggataggatgttgcaccagcaatatcgctctaataattttcagaaatattattagcttatgcatacattgactcagtaagaaaaacatcataagcttctttaaagaatgctccgcaccgccctctagattctgctccactgcctgaagttcacttcaatgttcataaacctgctcacccgatgataacgctgatctcttctatgctgctctcggtggtcttggtcagttcgggatcatcaccagagcaaggattgcacttgagctcggattttgaaagcttcaccgaggaccaggagatgctgataatggcagagaactcctttgactacgttgaaggttttgtcatcataaacaggacaggcgtcctcaacaactggagggcgtccttcaagccacaagacccagtcgaagcaagccattttcagtcggatggaagagtactatactgcctcgagctaaccaagaacttcaatagtgacgacactgataccatggaacaggtgaacctggagttcttggacagggtgcacacctctgagttgaaactgagggcacaaggcctctgggaagttccacatccttggctgaatcttctaataccgaggagctccatccgcagatttgctaaggaagtctttggcaagatcctagtggggttcctttcttcagcaccgtctctctcaggttacggcagcattgcacattcaatgaacctgaacaaacagatagtggagttctgtgaagaggctggtattgggatgaaacagtatctggcaccctacaccacacagcagcagtggaaagcccactttggagcaaggtgggagacatttgaacggaggaaacacagatatgatcccctagccatcctagcgccaggacagagaatattcccaaaggcgtcactgccattgcctttgtgacagttcctgctacttgaaggattctgtagagcatacgtttacgttgtacaaaagtgtaggtaaaaagtatcccctgtaaagacaatatctacggaaggtagctagcctgaagaacacagcatagcgactttttttatagtggccgaagacacctcagagcaatacttcaaagtggagcaatgtcacctgaactctgacacctttggaggcaatcactggaggatcgtagcggtccaagaaacctgtatgttgttacagcgttgataattgagacgagctgtgatgatcaactgatcactaaccagtatcccggttatcaacagtgcagaaagttgcttgagggtagtagtgccttgattaacaaataacactgcctgttatttcacttgtaactagcatctcatcccactcaggagtgccttgtttgtaccgtactatcctcctcccgtgcatcattcgtcgcacaatccgtgtaatccttgtcgtaactgtacaagcgaaacttgatccgacagccacagagccgattaatcgaattggagagccatcgtgtacggtgccggcggaacggcgggagacgcgcgcggagtcggaggaaccgacgtgtg

SEQ ID NO: 1298 - DNA, 872 bp, Zea mays
  Clone ID: 700150248_FLI
gctgtcgatttcctggtgatttctcttaaaccaatgaggacattaagagagatacacactgatgtgtgccctgccctcagcatacaacagctagagcgaatagttagtatgtactgggatgatgtgaatggaacaaacactatttcagcagagtttacatcaagcttgaaatctgcggtgcgtgatgaatcgaatatggccacaagtttttctatattgctagatgatgattccagtatacctttttcacttgatgatattacaaagacactgccagtcattgaggtggctgatgacgactttgtgccttttgtccatgaaaacccaagctttgcgtttttattgcaaagaggggagtagtccatttttcctcaccatggtgacttcacccacctgtggataagtcaggattcctgcctaggatgtacagtacgcgtgattctttttgtaccaggtagcaaggcattaaagattagatgctaggtgagcttataggattctggttttattgatttgtgtgttgattgtccatttgtattcaggttttccttgccatttttttctgtttgtagttatttttttgggcttgtatactaggggctaagggcagaaggccctgtcctgtaagcaaagtagcacaaggttttgctgtaggtgggaaagctgtacatgtgttgtaggagggggagtagcggttatcctgctggtgtagtgatgattttgtggttggtgcattgcttacctttgatcatgcattattgatccgtcatatattatttattgtaccgcacaccagtccattgtcgataacttacactcaagatttttttttttctgggataccagtcttaatgagtaatctgttacggtac

SEQ ID NO: 1299 - DNA, 861 bp, Zea mays
  Clone ID: 700150262_FLI
cgggcgcgtgggcgtgcgcgtggggaaaaaacctgaagaaacagctgttctcaaagtattacgagatggtaaagagcaagaattgggagtaacacttagacctctgcaacctttagtcccagtccatcaatttgataaattaccaagctactacatatttgctggttttgtttttatcccacttacccagccctatctccatgaatttggagaagactggtataatgcctcaccacgccggttatgtgaacgggcactaagagagcttccaaagaagactggtgaacagttagttatcctatctcaggttctaatggatgatatcaatgtcggttatgaaaggcttgctgaactacaggtaaagaaggtaaatggtgtggaggttgaaaacctgaagcacctgtgcagcctcgtggaaggctgcaccgaagaaaacttaaggtttgacttggacgatgaaagagtcattgtcctgaagtaccagaacgcaaggcttgccacatcccgggtcctcaaacggcacaggataccgtcagccatatcgagcgaccttgtcgaagatcaagtaactgatggcgaggttgagacgtcatgcaccagctaatgcgagcctcttttttagacctaattgggagttccctgctgtagctcagctcaaggagcgagctgcattgttggcgaggcaagcgcacctggctgcctggctgcctggagtacatggtatcacttcctctaggacggctttagttttgacataaggaggagtgtctttagaaaataagattatgagctccagggcttttcagtctgaatgtaacggtaacataaccattctttactagaacatttattttttccatc

SEQ ID NO: 1300 - DNA, 870 bp, Zea mays
  Clone ID: 700150284_FLI
ccgtagagttcgacgcgaggagcgagcgagtgattagctcgtgcgtgctgtgcaaggaaagtaacccagcagatcgatcggtcgaggcgggtaggacaggatccagaggtagctagccatggcggaggaagcgtctgcgcctgcggcggggacggaagcgccgccggggaagatgacgatggtggtaggggtcgacgagagcgagcacagcttctacgcgctgcagtgggcactgcagcacttcttcccgccgggccagccgcagcagtaccgcctcgtcgtcgtcaccgccaagcccaccgccgcctccgccgtcggcctcgccggcccaggcgccgcggatgtgctgccgtacgtggaggcggatctcaagcgctccgccctgcgcgtcgtcgaaaaagccaaaggcctctgcacacaggcgagcgacgctgtgtttgaggcgctggagggggacgctaggaacgtcctctgcgaggctgtcgagaggcacggggccgagatgctcgtcgtcggcagccatggttacggagccattaaaagggctgttcttggaagtgtgagcgactactgtgcccatcacgcgcactgcaccgtgatgatagtaaagaagcccaagcagcacaagcactgatcaatgccgactgatcactacgtgtactgcaaataatttgtactactgcaaagttatgtgtgcgtccgtccgtttgtgaataattgggtcatcaaccatcacatcttcggttgcttctacaagtatccgatccaatccttctacgagtggattgggatttacaaataattgattgctctctgaacctgaaaacaatgtatttgtattaatgtgttggaacacgtatatgtagttgc

SEQ ID NO: 1301 - DNA, 2300 bp, Zea mays
  Clone ID: 700150330_FLI
ctggtccggccaaagtggaggcagttgtatcctggcctacaccaactaactctaaggagttgcgaggttttcttgggttgacaggttattaccgcaaattcgttcaaaacttcggtgtcattgccaagccccttactgctctcctgaagaagcatgttgtgtttttttatgaacatcggatcatgctactgcttttgccttgttgaaatcagcctttgtcttcagcacccgtgttgggcctcctagattttaccaaacaatttgccattgaaacaaatgcttctagagcaggtgtgggggcagtcctgctacaaaacaaccatcctctcgcttacgtaagcaagcctttgggtgtcaagaatatgggtctttctgcttatgaaaaggagaacctcgccatcttgcttgcagtgaatcactggagatcatacttgcagcatggaacattcctcatcttcacgaatcagtgaagcttaactcatctcaatgaacagcgtctgaagactccttggcagtagtgtgtcttcactaaattgttgggactccaataccaggtggtatacaagcagggatcggccaacagggctgtggatgccctctctcggtgtcctcattcgcctctttcactcaatgcaatatcagtgggcactcttcaatggctatcgaatgtggtggtaggatatcatcaagattctcacgccttaaactgttggcagatctgtctaattcctctacaacagatggtccttacaagttgtaggaaggcattattcggtacaaaggccgcatttggattgtccacaatcccacactacaacaacagataatcttctcattgcacgacagttcggttggccactctggttttccagtaacgtacagtcgcctgaaacatctgtttgcctagccagcaatgaagtatgttgtccgacaatatgtctactcctgtgacatctgctcgcgtgccaaatcggatagatctcagtaccctaggttgttacagctgttgcaagttccttcacatgcttggcaggtgttgtctttggatttcatcgaaggcctccccaaatctggcaagtttgactgcattgtcatcgtggtggataaattttcgaaatttgcccatttcattgtcctcgctcatccttttactgcctacaagatagctcaggtgttcttggacagtatctaccgcttacatggtatgcactcggctattatctcggatcgcgatcggatattcacaagtgccttttggcaaggcttgttcaagctttcaggaactgagttacgcatgagcacatcttaccattcgcaaacagatggccagatggccagacagaggggagtaaatcaatgccttgaaaccttcttgcgttgttttgtcagttctcaaccgagccaatggagcaagtggctgcctcttgcagagtattggtacaactcctcattcaattcctccttgggtaaatctccgtttgaggtgttgtatggctatcatccacaccacctgggtatatctacagtagatgcaattcccttgtcagacttgcaatcatggttatagcagagggagcttatgacccatgatgtccgtcatcatctgctatgtgcacagcaacgtatgaagcctcaagcggacaaacgcctatcggaacgtgtctttgctgtcggcgacatggtgtatcttaagcttcagccttatatccagaattcagtggctactcgcgccaaccataagctctcctacatatattttggtccttacaaggtactccaacgtgtcggcagtgtggcatacaggctgcagttaccatcatctccgtcaatccatcccgtattccatgtgtcccagctgaagcccagtgtcaaatcttctattctggtcagcacttctttaccttatacatgtgctcgaccgacgatccttttcttggggcggccacaacgtcgaccaataagttcgagtgcgctggtctggttatgatgctgcccttgatacttgggaggacgaggctgctctgcgccagcgttttccttcggcagccgcttggggacaaacgccttcttatggagggggattgtcagcatcgctaggtaccgtgcgtcgagaagcaggcgtcgtcgtcggacatggctgggttggagttgggtcgtcgcatcaggaatcccaatgccaagtttctaggagaggactaggtggcataataggccgtccaaccttgtaatagttgatacttaaatactatgaacaggcaggcaccgtaacgatttcaggctgagaaatatatcgaacaact

SEQ ID NO: 1302 - DNA, 1417 bp, Zea mays
  Clone ID: 700150364_FLI
gcatcctcgccgcccggaccctctctgtctctgtctccgccgcggcgggctcctcctccatccccgtcaagatgactgcgcggtcggcgctggacgaggtcaccgacacgggcgccttcgaccggtcgccgtccaccttccggagctccgtttccagggacgggcggttccccgccgtggcggggcggtaccacctctacgtctcgtacgcgtgcccctgggcgtcccggtgcctcgccttcctcaagctcaagggcctcgaccacgccatcggcgtcacggccgtgaagcctatcttcgagcggaccaaggagagcgacgagcatctgggctgggtgttccccgccgccgccgacgaggagcccggcgccgagcccgaccctctcaacggcgcccggagcgtgagggagctatacgagatcgccagctccaactacgccgggaagccaaccgtccccgtgctgtgggacaagcagctgaagacggtggtgaacaacgagagctccgagatcatccggatgctcaacgccgagttcaacggcatcgccaggaaccccgggctggacctctacccggcccacctccgggcctccatcgacgaggccaacgagctggtctacgacgccatcaacaacggcgtctacaagtgcggcttcgccaagaagcaggggccgtacgacgaggccgtgacgagattgtacgaggctctggacagatgcgaggagattcttggcaagcggcgctatatttgtggcgaccagctgactgaggcggacattcgcctgttcgtgactctcattcggttcgatgaggtctacgccgttcacttcaagtgcaacaagaagctgctgagggagtacccaaacctgttcaactacaccaaggacatataccagatccccggcatcagcagcaccgtcaacatggaacacatcaggaagcactactacggaagccatccgtccataaacccatacgggattatccccgctggacccaacatcgactacaatgccccacatgacagggagaggttcagcgcctgactgcgcgtgggaccttgttgcttcctttctctctctctctctctctctcttttctgcaggagccgtgtgcagtgttgttgtgcttcatgagggtcttgtgcttggccgtgtcagaggctgcaagaatccctactgtactttttttcttcttctgagcagttgaagatggaagacaaggttttatttcgcacagataaataaaaggtacaaagggtcgtcgattttatacgaaggcctcgtttggcacagtagcaccgaacgtggtgttttctttctttccttccttatgacatcccttcaaaccaagttgaacaagatggtgcacagtcgccatatacgcaatataatgctatcgacacactaaatgcttc

SEQ ID NO: 1303 - DNA, 893 bp, Zea mays
  Clone ID: 700150376_FLI
cacataataagaagcagcttgttgctgcttttaggtggcgctttggcctttttcatggttttgacagaatatgtccttgtttctgtgactagtgctgtaacagtgactgtagcaggaattgtgaaggaagctgtcactattctggttgctgtgctattcttcaacgatccatttacatggttgaaggcgcttgggctagcaataataatatttggtgtcagtctattcaatatttacaagtataaaaggttcaaaaaagggcattacaatgaaaatgctgggacaaatacccaatcttccaattggacttcaaaatacgtcatccttgatgaagatactgaagctcaagatgatacaggctgatctgaatgtgatagaatgcagactatatatggcgcttccagagaagcaagatcatctgtgcctgcatagtcttactttcacaggctaactgacttcatattctttgagttcatcaattactctggtcagccatgcacgaacatgacgcttgcagccgtgtggcaagttgggaagattacacatacatggaacatacaagatacaacctggtatcagtacatatgttttgtcctttcattcaaaacaaagaacagtgcatatatctgaacgaggcattctgcattatgtccactaagaaaatgctccatcaaatacaattagaactacagctgacacacttaactttctggaagaggataggactcaattttatagtccattctgattgttgaagagagattcggcatcggaacgtagctttcttttctttatttatttttagatgaaaataaacactcgtatatgtaatgttgtatgtatgggactgtatactgttttacacacgagcaccacaagttgaagttcttccc

SEQ ID NO: 1304 - DNA, 1096 bp, Zea mays
  Clone ID: 700150410_FLI
gtcccagcagatcttgtgaccctccctcagccgcgtcgcgtcgcatcctacgatccaaagctctctctgctcgcagccatggcgaagaactacccgaccgtgagcgccgagtacagcgaggctgtggagaaggccaggcgcaagctccgagccctcatcgccgagaagagctgcgccccgctcatgctccgcctcgcgtggcactccgcggggacgttcgacgtgtcgtcgaggaccggcggtccattcggcacgatgaagcatcagtcggaattggctcacggcgctaacgcggggctggacatcgcggtgcggctgctcgagcccatcaaggaggagttcccaatcctctcttacgccgatttctaccagctcgcgggagttgtggccgtggaggtcaccggtgggcctgagattcccttccaccccggtagggaggacaagcctcagcccccacctgagggccgccttcctgatgccactaagggttctgaccacctgaggcaagtttttggcaagcagatgggcttgagcgatcaggacattgttgccctctctggtggccacaccttgggaaggtgccacaaagagcggtctggtttcgagggggcctggactacaaaccctttggtctttgacaactcttacttcaaggaacttctgagtggtgataaggagggccttcttcagctcccaagtgacaaagccctgctgagcgaccctgttttccgccctcttgtcgagaaatatgctgtggatgagaaggctttctttgatgactacaaagaggcccacctcaagctctccgaactggggtttgctgatgcttaaatagaccctatcttggagtgatacattctgctgcctgtatggaatcatgtggtcttttgcatctggagtcaatgtgaacaagcagattgtcgtattgtctttctcgtaataaatttgtcgatgttgagcccttaggctgttgttggtacattggtacttcgtcgatgcttgaattgggacccttagtccgttttcctagactctgatgctgtatgcaactgaaacaagtaaatctatgatcttaaggctgcagtatgttcttgtt

SEQ ID NO: 1305 - DNA, 889 bp, Zea mays
  Clone ID: 700150413_FLI
cgttaagtttccggcccaacaacctttccgactggcccaaaccaactcccaagtcccatcccaaccgaggcgacgcagccgccgccggctgaacctaaacccctcgacgcagccgccgccggcgtaggggagaggggcacgggcacggcacggggacggaaatggcggaggggaacggcggcagtcgcgccgaggctggcgtccgcgagtcctccgagccctcgccgaagcgctcctcgatccccgccatgccgcacgaagaatgcgtcgagggcatccgctccgcgctcaaacatcccacggtgcggttcctgagggagcggatggagagtgccgggtgcctggtgtggccgcgcctcatccgggcggcgacctgctcctccgccggcggctacgctagccagcaagggatacaagtttgctgcaatcacatgacctgtcaagatgagataactcaggtcatgattcatgaactgatacatgcttatgatgactgtgttgccaaaaatctgaactggacgaattgtgctcaccatgcttgctctgagattcgagccaatcaccttagtggtgattgccattacaaacgtgaattgttgcgtggtttcatgaagataaagggtcatgagcctgaatgtgtcaaaaggcgggctctgatgtctgtgaaaaacaacccatactgctcagagggtgctgcaaaagatgcaattgatgctgtatgggatatatgctacaatgacacacgcccatttgatagagccccatgaaatattttcagaacctgggatacattagctattttgtgcacacctgcattgatattctgagccccttcagaaacttgtatttcagcaacctgtgtcagcaaagtacagaaattttctgctgt

SEQ ID NO: 1306 - DNA, 1159 bp, Zea mays
  Clone ID: 700150426_FLI
aaaataaggaatgggttgccaaatttgagaaaccaaagggtgacccctctgcctttgtgaaaccttcaacaactgttttgtcaccatatctaaagtttgggtgcctgtcttccagatatttttaccactgcattcaggatgtgcacaggagcgtcagaaaccatacaaaaccacctgtttcattgacaggacagttgctgtggcgagacttcttttacacagtgtcttatggaacacctaattttgatcgaatgaaagggaacaaaatatgcaagcagattccatggagcgagaacgaagatctatttgttgcatggagagatggccagacaggatatccgtggatcgatgctatcatgattcagctgaggaagtggggttggatgcatcacctcgcacgccattctgttgcttgtttcttgactcgcggtgatatgtttatccactgggaaaaaggacgtgatgtatttgaaaggctactgatagattctgactgggccattaacaacggcaactggctgtggctctcttgctcatccttcttctaccagtaccacagaatttactcccctattacattcgggaagaagtatgatcctaacgggaactacattaggcatttcatcccagtgctgaaagacatgccaagggagtacatttacgagccttggactgctcccactagcatccagaagaaagccaattgtataattggcaaagactacccaaaaccagtggttgatcatgagactgcaagcaaagagtgtagaaagaggatgggagaagcttatgcgtcgagtcgcgttgatgccaaacctagcaaagggaagacgttgaactcacgccgaaaaatgctacatggtgaccgagacacgtctaactcaaccattgctaagcgactgaagaggaatagccgagttgagtgatgcgcagctcctcccgtgacaactttacactacttgttccatcttcagcattttttttattttcagttgtgttacctgcatctgtcatatgtagctcgtctgacattttaccaaagtagtctgaccgtaaggaaatgacttgagcccgtagctagtgtgatatcctacactgaaggatatatctgtaatatatgctcatgtaataacaggtgtaataataataactgctgccc

SEQ ID NO: 1307 - DNA, 882 bp, Zea mays
  Clone ID: 700150494_FLI
cacacagaagcggcggcggcggagcaaacgcaggcgaaggcgagggtgtgagggaaggagcaccagccatggtgcacgtcaacttctaccgcaactatggtaagacgttcaagaaaccaaggcgtccttatgagaaggagcgtcttgatgctgaactgaagctggtcggtgagtatgggctgaggtgcaagcgtgagctttggagggtccagtatgcactgagcaggatccgtaatgctgcaaggcacttgctcacccttgacgagaagaacccccgtcgtatctttgagggtgaggcgcttcttcgccgcatgaaccgctatgggctgcttgctgagggtcagaacaagcttgattatgttcttgccctcaccgctgagaacttcctcgcaaggcggcttcaaacacttgtcttcaaggctggcatggccaagtccattcaccatgctcgtgtcttgatcaagcagcgtcacatcagggttggcaggcaaattgtcaacgtcccatcattcatggtgagggtggagtctgagaagcacattgacttttcactgtcaagcccattcggtggaggccccgcaggaagggtgaagagaaagaatcagaagaaggcaagcggtggcggcgatgctggcgatgaggatgaggagtgaggatggacaagtagcgttacccaatataataatattatctagttttcttgaacttgttcgaatgatgagtgcttagctgtgtgatctgacgcagagttccctgtgctgactctgtgtcatggatggtccattttatcttgtggtattatcagcctttacataactgctatgtttggatatgttcaattctgttgcaattttatgtggttgttttttgcgttttgttgct

SEQ ID NO: 1308 - DNA, 825 bp, Zea mays
  Clone ID: 700150504_FLI
ttccgtctccatatcttcttcttggtccgccgtctccactccgcgttccctggctccctgcgttgcgtcttgggggagagagagaagtgggagacccgcgagaggctgccgtgtagggactagggaccgtagagtaagcgacagcgaaggagggagagggggatggccgggatcgggccgatcaggcaggactgggagccggtggttgtgcggaagaaggcacccaccgccgctgccaagaaggatgagaaggccgtcaacgccgcgcgccgctccggcgcggagatcgagaccatgaagaagttcaacgctggtatgaacaaggcggcgtccagcggcacatccctcaacaccaagcgcctcgacgacgacacagagaacctcgcccatgagcgagttccaagtgacctgaagaaaaatctcatgcaagcaaggctcgataagaagttgacccaggcacagcttgctcagatgatcaatgagaagccacaggtgatccaggagtatgagtcaggcaaggcaattcccaaccagcagatcattggcaagctcgagagggccctgggaacgaagctgcgtggcaagaaataaccaggagcatcatagcgaagacaaggcaaactgtctgcttattatttgctatgtttggtatctcaagtcatgcggactgtttgtgttggtacaagagtgaattaactgtgttctcctgaatgcttgctgcttgtcatatgagtatatgatctagctctaaaaaaattgtgatgaagatgtcaactgatatgacaacctcataaccagcgtgatcaagatgatgctcattactgc

SEQ ID NO: 1309 - DNA, 1638 bp, Zea mays
  Clone ID: 700150510_FLI
ccgacccgaaccctcgagttcgcacgggctccggccagattcgcgcggtctaagcttcgaatcggcgcatggaggcagcagtagccgcggcactcaagtcgcccaccgccgcacgtccctcgtggcggcccgcggccccgggcgccacctcgctcccctttgaccggaggcgcagctttgccttcggctccatcaagggtctcgggcggcagcagctcacctctaggactaggaggcgaagcagtgtggtcagggcctcctggtccccctcggagtctctgccaccgtcctcgtcgatggcgccgctcaggatggaatcgcccgcggggcagctactctcccagattcttcacacgcacccgcacctactgcctgccgccgccgagcagcagctcgagctgctccagaccgaccgcgaggcagagaaggataaggataaggagagcgatgctggcgacaagctggctccgacaggtgtcgacctcatgctgtacaggcggattgctcaagtaaaggagaaggaacggaggaggactttggaggagatactctatgctctggttgttgagaagtttgttgaagccggcgtttccttggttccggcactctcacgctccatcgactcttctggaagagttgatcagtgggcagaaactgtggaaggaaggctccagcgtttgcactcgcctgaggcctatgaaatgatcgagaaccatctcgccctcattctggggcagcgtcagagtgatgccactattgcagccataagtaagctccgtgttggccaagtctatgccgcatctgtgatgtatggttatttcctgaagagagttgatcagaggtttcagctcgagaagacaatgaagagcctcccttggggatcagaagaggaagacggcgcattgaatcaacttatgacgaccgactcgatgccttcagctcaggcttctagctctcacccagagatgggctcctggaccaccgcgcctgacttcaacgcaggaggtcctagcgaatctatcaagccttgtcgccttagatcgtatgtcatgtcattcgatccagatacgcttcagaggtatgcaacggtcaggtcaaaggaggcctttggtatcatcgagaaacacacagaagcgctatttgggaaagcagagattgtagtcacacctggaggcacggttggttcatccaaggatgagcacattaggataagctttgccgggctgagaaggctggtcctggaggctgttactttcggatcattcctctgggacgttgagagctttgtggattccagctaccattttgtgaccagctaagattgtcatcctaagtaaagaaaggttcgtggtttacgtgtctggtctgaatgtctatgggcttcggaaagacttgtacaatgatgctaggctgttaccacaccccttactgatgcgatggtatcaatgatttgcgcagttttatggcatcgcattatttgtaaagaccaactgccattatcctgatattgagccgttatgttctattaacatctgtgctgcccggggggcgtagcgatgtattttatggctatcccctctgcaaattgtaagaggaattctaggctcatagccaattctttagcgaagctattattct

SEQ ID NO: 1310 - DNA, 1121 bp, Zea mays
  Clone ID: 700150522_FLI
cggaacacagattgcacggtaaaaatttgggatccaagtttgcgtggttctgaacttcgagcaacacttaaagggcatactagggcaattcgaacaatcagttcagatcgtggcaaaatagtttctggagctgatgatcagtctgtcatagtatgggataagcagacttttaagcttttggaagaactgaagggccacgaggcaccagttagttctgtccggatgctctcaggagaacgtgtccttattgcatcccatgatggtactgtgaagatgtgggatgtccggactgatacttgtgttgttaccgtgggtcgttgccaaagtgctgttctctgtatggaatatgatgattccactgggattctggcggctgctggaagagatatcacggcacatgtctgggatattcgctccagcaagcagatgttcaagcttcaagggcatacaaagtggataagatcaatgaggatgaccggagagaccataataacaggtagtgatgattggactgctagagtgtggtcccttaaccggggaacatgtgatgcagtgttagcatgccatgctggtcccgtactatgtgtggaatactcaccttcagataaaggaattatcactggttcagctgatgggctcatacgattttgggaaaatgaaggaggaataaaatgcgtcaagaatcttacacttcacacagcatccgttctgtccattagtgccagtgatcactggctagcgattggtgctgctgataattctatgtctcttttccatcggccacaagaaagattcggtggcttctcaaatgcaggatcaaaagttgcaggatggcagctttacaggactccccaaaaaactgctgcagtggtgagatgtatagcatctgacctggataggaaaagaatatgtagtggtggtcgcaacggactcctgcggctttgggatgcaactacaagcatctaggactgatagatgttcatgtgaaaaggcaattgaccatgatgttgcatgccattttccttttagctaggaatttatgtgctatttagaggatgcgaaaggagccggactttgttctactgtttctttctcatctaaaaaaccctgcccagttgagt

SEQ ID NO: 1311 - DNA, 1490 bp, Zea mays
  Clone ID: 700150541_FLI
cacagctaacccaatcccaaatcaatcttccatggcgccggcgaccttgctactggcgagactggccgtggcgtgcgcgctggcgctcggcgccatggcgcagctgtcgccgacgttctacgacgcgagctgccccagcctgcaggccatcgtgcgggccgggatggccgccgccgtgcagcaggagccgcggatgggggcctccatcctccgcctcttcttccacgactgcttcgtccaggggtgcgacgcgtccgtgctcctcgacgactcgccgacgctgacgggggagaagaacgcggggcccaacgccaactccctgcgcggcttcgaggtcatcgactccatcaagtcccaggtggaggccgcctgccccggcaccgtctcctgcgccgacatcctcgccctcgccgcgcgcgacggcgtcaacctgctgagcggtccgacgtgggcggtgcagctgggtcgccgggacacgcgcacggcgagccagtcggcggctaacagcaacctgccgtcgccgtcgtcgagcgcggcggcgctggtgtcggcgttcgcgtccaaggggctggactcgcgggacctggtggcgctgtcgggcgcgcacacgatcggcgcggcgcggtgcgccaccttccgcgcccgcgtgtacaacgacaccaacatcagcgccgggttcgcggcgaagcggaggcagatctgccaggcgcaggccggggccagcgacggcaacctggcgccgctggacgccatgagctccgtcaggttcgacaacggctacttccgcaacctcgtggcccagttcggcctgctccactccgaccaggagctcttcggcggcggcgccgtcgactccatcacggcgcagtacgcgcgcaacggcgccgccttctcgcgggacttcgtcacggccgtcctcaagatgggcagcatcggcccgctcaccggctccagcggcgagatccgcgccaactgccggaagcccaactaatagacagacgtctacgtataccatagcatagacagacatcagtttcgagattcgtgcgacacggacggacggtctggatccgtcgacatggccagctaagaggaccgtggctttttgcgtggaaagtgtggagtgcgttggaagggagcggcggaggcgatgatgattccgggcgatttggtgggtggagcgccgctgtcaggactagtactcatttcaggggagaggggagagctgggggggcccagcgtgccgtcacacatcgatcaacccgcatatgagaccattgctgattttcattcttttttattttatttggccgcgttattctttcttttctctttcgtttctttgtgccacgattttagcctgtgatgagtctgtacgtacactgggcgattcatgattattattctttttttttgttcaagaaatgtacacatgcatatccaatgtgcaaccgatcatgcatgattaataataactctctggtcagaac

SEQ ID NO: 1312 - DNA, 964 bp, Zea mays
  Clone ID: 700150552_FLI
aaccgattggcgagactgatgggacggcgtcacagcggcggcggcggcggcggaagaggaagagggcgagggcgtgggcgagatgaggaagaagatcttcctctgcacaaggccgcaaggtctggtgatgcggcagcagtggagtcggtgtgcgagtccaaccctctcgccgtcaattcaagggatcgcctctcacgcacaccactccacctggctgcatgggctgggcatgttgatgttgtgagatgcctttgcaagcacaaagctgatgtgggagctgcagcaatggacgacactgcagcacttcattttgcttcccagaaaggccatgtagaagtggcccgtgagctgctggcatctggggcctctgtgaaagccaagaaccggaaaggcttcacggcgctgcactttgctgctcagaattctcacctggatcttgtgaagtaccttgtgaagaaaggtgttgacgtcacagcaaagaccaaaggtggccagacagctctacatgtcgctgaggatgatgaagtgcgtgcgttcctgaaggagtgcgagcaatccttgaagaagggtgccgagctaccatcggagaaggatgattctgccgagaaagagggcgatagcaagtcttcaggtgaggttatgaaagatgaggaggatgcagagcagggcgagaagaggaaaagcgaattggttggtgcgtcgagtttgtcaggagtaaaaaaagccaaagtttctcttggtcatctagtttgtgaaaatgacatggacgaggaagaggagtgatttcgagcagccttgaccttgaggatgcaatagaagtgcacttagatagttccacctgcacctgtgtgttttgttatgctagtcttagtctgtacggcgatcttgaatgtaaagacaagtacaaagttgaatctcagttctcatgtgttgcatgaatgaaaattctaagggcttgtttggt

SEQ ID NO: 1313 - DNA, 1100 bp, Zea mays
  Clone ID: 700150553_FLI
tcaggttgaaggctgcaaggttgatctctcttctgctaaagagtaccatcggaagcacagagtctgtgaacctcattctaaggctcccaaggtggttgttgctggtctggagcggcgcttttgtcaacagtgtagccggttccatggattagctgagtttgaccagaagaagaaaagctgccgcaggcgcctcaatgatcacaatgcccgcagacggaaaccacaacctgaagcactttcttttgggtcatcaaggctgtcggcaatgttctatgacacaagacaacacacaagccttctgtttggtcaaggtccttatggtcaaatgagaagttgtgcaagttcttcatgggataacccaggaggcggcttcaaatttgcagagacaaaaggtccctggttaagagctggtggtgttgatgggttgcatcaatcaagtcagcaggtgtggaacaactttatgccgcatggtgtccatcaagattttgatgggttcacagctttcaaaggaaccaatgcaaaggtccttcatcaaggcgttgaagcttctgcggtcgcctccaaccagaacggagccccacaaccggaccttcatcgtgctctctctcttctgtcaaacagctgggctggtgccggtaccgaccagcacccgacggcccagctgcgccaccacgctgccctgagcagcagcctcgccgccagctccgtctccgtggcgcaggcctcgccagcagggctgtggcaggacggcggcggcggcgcaaccctgagccaccacgactatgcccacgcgcaggcacggttccaggctatcgacgcgctgggcggcgccggcgccgccgccgttgcagcgggtcaggagcttctccagctcccgcgtccgccgtccccgtacgatggtggctcctcgtcccgctacgacctgatgcgctgatccttcttctcccttggggcttctggtggagcgcggggtttcgatttttgaacgaactctggatggaactcggagttttgaacgaactgctgtatgcttgctatcaaggtctgctggctcgggctcggacgctcgtgggatcgccagcagctccgtgtgcttgaat

SEQ ID NO: 1314 - DNA, 1754 bp, Zea mays
  Clone ID: 700150612_FLI
gtccaagcggtggatccgtcccgaggtgtacccgctgttcgtgccgatgcccgtgatgttgcgcacaagctggtacgagcagatgcccaaggccacggcccttcacaaacgccggcgcaaactctcgcccgagcccgacagatcttcaattccccattccgcccaccgatcgaccttcacgccagtctcggtctcttccgaaggcgtcgcgcgcggttgtttgagaggagaggaggaagatgagggagtgcatctccgtccacatcgggcaggccggcatccaagtcggcaacgcgtgctgggaactttactgcctcgagcacggcatccagcctgatggccaagtgcctggagataagaccgcgggacatcacgatgatgccttcagcaccttcttcagccagactggtgctgggaagcacgttccccgtgcaatcttcgttgatctagaacccactgtgatcgatgaggtgcgcactggcacgtaccgccagctcttccaccctgagcagctcatcagtggcaaggaggatgcagctaacaatttcgcccgtggccattacacaattggcaaggagattgttgatctgtgccttgaccgtatccgcaagcttgctgacaactgcaccggcctccagggcttcctggtcttcaatgccgttggtggtggcaccggctctggccttggttctctcctccttgagcgcctgtctgtggagtacggcaagaaatccaagctgggcttcactgtgtacccatctccccaggtgtcaacctctgttgtggagccttacaacagcgtgctctccactcactcactgctggagcacactgatgtctccatcctgctcgacaacgaggccatctatgacatctgcaggcgctccctcgacattgagaggcccaactactccaacttgaatcgccttgtgtctcaggtgatctcatcgctgactgcttctctgaggttcgatggtgccctcaatgtggatgtgaacgagttccagaccaacctggttccttacccgaggatccacttcatgctctcctcctacgcaccggtgatctcttctgcgaaggccttccacgagcagctgtctgtggcggagatcaccagcagcgcgttcgagccggcttccatgatggtcaagtgcgacccacggcacggcaagtacatggcttgctgcctgatgtaccgcggcgacgtggtgcccaaggacgtgaacgccgcggtggccaccatcaagacgaagcgcaccatccagttcgtggactggtgcccgacggggttcaagtgcggcatcaactaccaggcgccaactgtggtgccgggtgccgacctcgccaaggtgcagcgtgccgtgtgcatgatctccaactccaccagcgtcgtcgaggtgttctcccgcatcaacagcaagttcgacctcatgtacgccaagcgcgcgttcgtgcactggtacgtcggcgagggcatggaggagggggagttctccgaggcacgcgaggacctggccgccctggagaaggactacgaggaggtcgccgcagagggcggcagtgatgacggtgacgaggaggaggaatactgatctgcttgcatgaatctgtttggctgtcgagccaggttgtggtgttgaaaaacctttgtttgtgtcctggccccctgggtaatgtttgggtgtttccttccatcatcacttgctgaactgctctagtatttgcatttgtaattgaagtctgtcgctttaagc

SEQ ID NO: 1315 - DNA, 1355 bp, Zea mays
  Clone ID: 700150727_FLI
tcctagtcaccgcgttcgcttcccgagcacgcaaccatggctcgactgtcagccaccgccgcgctcctcctcctcgtcctctccctcctcgccgtcgcgcactgcggtgccctcgcagtcgcagcagagcacgacaccgagcccgaatcaaccgccgccgtggccgtcagcgacgacaacgtgctatccgaccccacggtccacgctgaggcgggcaccgccagcgccactgaagaggaggccatcccggcggagcagcagcagcatgggttcgaactcctccgcctgccgtctcaccggctccaccaccaccaccacctctggtggaagcgccaccacgggatctaccgtgacgcgtcgcacaagttcccttgttctggccacggcgcgaggcgcgagcaggcagtgagccaccttgccatcttgcccgcatccgcagaggtggccagggaggcgggggaggagatgcccgtggccgagccggacccggatcgctccctcccggacagcgacggagagggggaggtggctattacaagcgagcagccgtcgccgttcaccgacgccgacgggcacgacgacgagagctcggcggcagtcagggcgtggaagcacgagatgctgcggaggtggttccacttccaccacgacatgcgccgccaccgtctccaccacgtccaatacgaggtggaggaggaggctaccaccgccccagagacgacagggagtatgggcatgaagcggcaccggttccacttccaccaccacgacgacgaggacgaggagaagaatatggcggcgaggaagcggctccgccacgctgatgagcacgacgaggacagcgacgacgaggaggatgagcaagtggaagagatggtccggcgcttcaggaaggcgatcatgaggaggaggttcggccacggccacggccatggacgccgttcccgcttcttccaccacatccaccgccacgccgaggaggccaagaagcaggcagatgttgaagaagaggagagcggtgtcctggcctggatcaagggcctcatgaaccggttctagagctgcctcattcgagcgatccgtccactcagtcactcacagccatggctgcttgcctttttactatttgccatcggccatcccgcgtgcatactgcagtgtcttggcacggctgaatttacttggtgttattagtgtgttttctatccacggtgtgtcgtcttatatacgcacttgtatcacagattcacagtacgtactacctgcttgtgtgtgcttcacattgtgttgtttcatgtaattctgtgcagttatgtgccttttgttcttccagatattcgtgatgcttgttcagt

SEQ ID NO: 1316 - DNA, 1555 bp, Zea mays
  Clone ID: 700150739_FLI
gcctcgacgcgcctctgaaagttcggagccgccggcccgtccgcctccctctccgcctcccgtccccaaggccaatagttttcaagtggcaatggcggaccaggctaaccaacccactgtccttcataagctcggtggccagttccacctgcgctcgatcatctctgaaggtgtacgggcccgtaacatatgcccatctgtctcatcttatgaaaggagatttgccacaaggaactacatgacccagagcctttggggcccttcaatgtctgttagcggtggcatcaatgtcccagtgatgcagaccccgctctgtgctaatgctcctgctgagaaaggaggcaagaacttcatgattgatttcatgatgggcggtgtttcagctgctgtttcaaagactgctgctgctcccatcgagcgtgtgaagctgcttattcagaaccaagatgagatgattaagtctggtaggctatcagagccgtacaagggtattgttgactgcttcaaacgtaccattaaggatgaaggtttctcttccttgtggaggggtaacactgctaatgttattcgttacttccctactcaggctttgaactttgcatttaaggactacttcaagaggttgttcaacttcaagaaggatagggatggctattggaagtggtttgctggcaacctggcctctggtggtgctgctggtgcttcctctttgttttttgtgtactccctggactacgcgagaacaaggttggctaatgacgcgaaggctgccaagggaggaggtgaaaggcagttcaatgggcttgtcgatgtctaccgcaagacactcaagtctgatggtattgctgggctttaccgtggatttaacatctcctgtgttggaatcattgtttatcgtggtctgtactttgggctctatgattccatcaagccagttgtccttactggcaacctccaggacaatttctttgccagtttcgctctgggttggctgatcactaatggtgctggtcttgcatcttaccccatcgataccgtccgcagaaggatgatgatgacatctggtgaggctgtcaagtacaagagctccttggacgcgttccagcagattcttaagaaggaagggcccaagtccctgttcaagggtgctggtgctaacattcttcgtgccattgctggtgctggtgtgctttctggctatgaccagctccagatcctcttcttcggaaagaagtacggctccggcggtgcttaaatggagaaatatgatgacgaacaagagcagtgtgtgttcccggtcctttccaatcaggatctggtgaagtttttgcctttcatatcgaagaaattaataattcatgtagagggaggattcttccaacaatttgttttggatggagacttagatctccaaacactcgtaactatcctactaggtggtgacatcggtccccaaaaacatttatggtcatagagtctgcccttcgtttgtcagtcgggcaatttttcttgcatacaatgccttcgtttaagtatcggatgagttgctgcgact

SEQ ID NO: 1317 - DNA, 3094 bp, Zea mays
  Clone ID: 700150788_FLI
gaggcctccatcatctatctcctctctcgtcgtgctggccgaccggcgacgacctatagctcctgccgcctcacgtcgaacgcgccatggccgccaactcaacagctaccaagcatgctttcaagcgtatattgacgagcctgattaagcctggcggtggtgaatacggcaagttcttcagccttcccgcactaaatgatccaaggatcgataagcttccctactctatacgtgttctcctggaatcagctatccgccattgtgataacttccaagttacagagagtgatgtcgagaaaatcattgattgggagaacacatctcccaagctggctgagatacctttcaagccagcgagatgcattctaatggacaacactggagtcccagctgttgtagaccttgcagctatgcgtgatatgatgccaaagttgggttgtgatccctacaagatcaatccattgattcccgtggatgctgttattgaccatgcagtgcgagtggatgtagcagggacctatgatgcattggatagaaacgaggagttggagttccaacgcaacaaagaaaggtttgcttttcttaaatgggcatccaatgctttccacaacatgcaggttttccctcctggttcaggcactgtacaccaggtaaaccttgagtatcttgcccgagttgtcttcaacgaagatggcattctttacttcgacagcgtggttggcacagactcacacaccactatgattaatagtcttggagttgctggttggggagtaggcggtattgaagcagtcgttgcaatgcttggccagccaatgggcatggttttgcctggtgtggttggattcaagttgagtgggaagttacaggatggtgtcactactactgacattgttcttactatgacccaaatgctaaggaagcacggtgctattggcaaattcgttgaattctatggtgttggtgtgggcgagctatctttgcctgctagggccacaattgccaacatgtctccagaatatggagctaccatgggcttcttccctgtagaccaagtagcattggactatctcaaattgacaggccgaagcgatgaaactgtgtcgatgattgaagcatacctgcgagctaacaaaatgtttgtggacaagcatgagcctgagacggaacgagttttctcttcatatctggagctggaccttagtgaggtggagccttgcgtttcaggccccaaaaggcctcatgatcgtgtccctttgaaggaaatgaagtcagactggcatgcttgcctggacaacgaagttggtttcaagggctatgcggtgccaaaggaacagcaaggcaaagttgtgaaattcgacttccatggaaggccagctgaaatcaagcatggcagtgttgttcttgcagcaatatgtagctccacaaacacatcaaatcccagcgtcatgattggtgctggccttgtggcaaagaaagcctgcgaattgggccttgaggtgaagccatgggtaaagacaagccttacccctggatctgtggttgctaccgagtacttgaaacatagtggccttcaagattatctgaaccagcaagggttccatgtcgctgcgcatggctgcgccacttgtgtgggcaactctggtgacctggatggatctgtatccgctgctatcacagaaaatgatatcgttgctgctgcggtgctgtcggccaaccgaaacttcgaggggcgtgtgaaccctctcactcgggctaactaccttgcctcgccgcctctggttgttgcctatgctcttgccggcactgttgacattggttttgaggaagagcccattggagttggaaagggtggcaaggaaattttcttgagggacatatggccttcaaaccaagagatcgatgaggttgtggagtccagcgtgcagactcacttgttcaagaaagtgtacgactccatcatggaacgtaaccctaggtggaaccagctgccggttccaaaggaggcactgtacccatgggacgacaggtccacctacatccgcaagcccacttacctggagggcatgtccatgacgccgcctggcccgcccacggtgacggaggcctactgcctgctcaaccttggagacagcatcaccacggaccacatctcctactcggggaagatccccgagggcacacctgcggccaagtatctgctcgagtatggtgtggagcccaagaacttcagctcctatggtggccgccgcgggaacaatgaggtggtgatgaggggagcgtttgccaatatgaggatcgtgaataagcttcttaatggcgaggctggtccctggacgatccatgttcctaccggggagaagctctacgtttacgacgcggcaatgaaatacaagtcggaaggtcatgacatggtcatcatcgctggctycsartacsgsagtggcaagctctygtgactytgytgccaagggaccaatgctwcttgggtgtcaagtcggtgattgcaaagagcttcgagcggatccaccggagcaacttggtggggatggggatcattcctctctgctttcaagcaggagaggatgccgattcactcggcctcaccggacgtgagcgctacaccatccacctccctaccagcaccgccgagatcagtcctggtcaggacgtgaccgtcacgacccacgacggaagatcattcacttgcactcttcgcttggacacacagcttgaggtcacatacttcaaccatggaggcatccttccctacatggtccgcaacctggcggcacaaatgaaataagttgaagtttattggtgggaataaattaaaaggtactcaatgccacgtatttggcgtatgtatgtaaataagtggcacattctaatcttcaattgtattattcgctctggcattgaggtgggtcgtagctgcattatactttctccgcaagacatgagcatggattttgttttagcaacagattatttgtactcttgattctttggttccatgctctcttcggccatctccatgtcaatttgctttgcaaacaatataatatcagcgtgccgtgcccttgtagatttc

SEQ ID NO: 1318 - DNA, 724 bp, Zea mays
  Clone ID: 700152129_FLI
cactctccgcttcccgctccgatcgacctgctccctccccaccaccgagcccatggcggaccagctcaccgacgaccagatcgccgagttcaaggaggccttcagcctcttcgacaaggacggggatggttgcatcacgaccaaggagctgggcactgtcatgcgctcgctggggcaaaatcctacagaggctgagctccaggacatgatcaacgaggtcgatgctgatggcaacggcaccatcgatttcccagagtttctcaaccttatggctcgcaagatgaaggacaccgactctgaggaagagctcaaggaggccttccgtgtgtttgacaaggaccagaacggcttcatctcggccgccgagctccgccatgtcatgacaaatcttggtgagaagctaactgatgaggaggtggacgagatgatccgtgaggctgatgtcgatggtgatggccagatcaactacgaggagtttgtcaaggtcatgatggccaagtgagccacagaaccataatctgaaggcagagaagattatgcattgcatattagtcaagatgcaactttttattccatcgacttctagtgaaacattctgctagttgtagttgctgaaaaaggcaatgtagttcctgctttgttcttccctccagtgtgttttcagaactgttgtttcatgtgaacttgtaatgattgccctctctgctgtgtcttgattgcagtt

SEQ ID NO: 1319 - DNA, 1123 bp, Zea mays
  Clone ID: 700152622_FLI
gcggaagcacagattgcacggtaaaaatttgggatccaagtttgcgtggttctgaacttcgagcaacacttaaagggcatactagggcaattcgaacaatcagttcagatcgtggcaaaatagtttctggagctgatgatcagtctgtcatagtatgggataagcagacttttaagcttttggaagaactgaagggccacgaggcaccagttagttctgtccggatgctctcaggagaacgtgtccttattgcatcccatgatggtactgtgaagatgtgggatgtccggactgatacttgtgttgttaccgtgggtcgttgccaaagtgctgttctctgtatggaatatgatgattccactgggattctggcggctgctggaagagatatcacggcacatgtctgggatattcgctccagcaagcagatgttcaagcttcaagggcatacaaagtggataagatcaatgaggatgaccggagagaccataataacaggtagtgatgattggactgctagagtgtggtcccttaaccggggaacatgtgatgcagtgttagcatgccatgctggtcccgtactatgtgtggaatactcaccttcagataaaggaattatcactggttcagctgatgggctcatacgattttgggaaaatgaaggaggaataaaatgcgtcaagaatcttacacttcacacagcatccgttctgtccattagtgccagtgatcactggctagcgattggtgctgctgataattctatgtctcttttccatcggccacaagaaagattcggtggcttctcaaatgcaggatcaaaagttgcaggatggcagctttacaggactccccaaaaaactgctgcagtggtgagatgtatagcatctgacctggataggaaaagaatatgtagtggtggtcgcaacggactcctgcggctttgggatgcaactacaagcatctaggactgatagatgttcatgtgaaaaggcaattgaccatgatgttgcatgccattttccttttagctaggaatttatgtgctatttagaggatgcgaaaggagccggactttgttctactgtttctttctcatctaaaaaaccctgcccagttgagt

SEQ ID NO: 1320 - DNA, 1053 bp, Zea mays
  Clone ID: 700153213_FLI
ctctcgtctgcagtctccacccacacacacgcgtaaccttctacaccaccttgcgcaaggatcagctctcagctccaattgacatggaaggagacacaggctgccgatctgagaaagaggtcgctgtggtcacaggaggcaacaggggaattgggctagagatatgcaggcaactggcttccagtggagtcaccgtagtgttgacagcaagggacgcggagaggggcgcggaggcagccagcacgcttgggctacccaacgtcgtcttccatcagctggatgtcggcgatccgtcgagcgctgcacgcttagctggttttatcgaggagaagtttggcaagctggatatattggtcaacaatgcagcaattactggaacgacaagtaacgtcgtcgatccagaagcttttcgtcaagagctcgcgggcttggatgtcatgcagatgatcgaagcaatcaacaagcacaacacagaaccgtacgagcaagcacagaagtgcttgcggacgaactaccacgggatcaaggctgtcacaaaagcgctgctccctcttctgcaatcctcgtcccatggacggattgttaacctgtcatcctcctatggattactcaggtttttcagcggagacgaactgaaagaggagctcagcagcatcgacggcctgtccaaacagaggctggacgagctgtcagagctgtttctcaaggacttcaaggatgggcagctggaggctcgagggtggccgaatgaaggagggttcatcgcgtacaaggcgtccaaggcgctcgcgaacgcctattcccggatccttgcgaaggagcacccgtcgctgtgcatcaactgtgtgcatcctggctacgtccagacggacatgaacttccggtctgggcatcttacggtcgaggagggcacgcggggagctctcatgctggccatggcgcccaagggaggcgtcactggcgcgttttttgaccacaccgaggccgcgtccttcgtgtaatatgctcgcactcgtaccgttagctatcgcagtaataaaattccacacaacc

SEQ ID NO: 1321 - DNA, 524 bp, Zea mays
  Clone ID: 700153220_FLI
ggccaaggaaattgacctgtattcaaccaaccaggactgtgtaaagatgcttgttggaaataaagtagacaaggaaagtgacagccctctcacgaaaaaggagggaattgaatttgccagggaatacggttgtttgtttctagaatgcagtgcgaaaacaaaagtaaacgtagaacagtgttttgaggaactggttctaaagatcttagacacgccaagcctcctggcggatgcttcctcagcaggggtcagcaagaagaacatcttcaagcagaaggctccagaagctgacgccgccacaggcagctgctgttaacatggttttggtcctgtatattgctatatgtggtgaagacaattggcagcagctatataatgatgtatcaagttaaacttacctgacaatatgtagtcttgcctcccaaccgcagctaagtagcagaggcacgggtgggtggcatcaataccggcatgatacagtatcagacactgtcatctatataagaaacagccatacttcggtt

SEQ ID NO: 1322 - DNA, 1327 bp, Zea mays
  Clone ID: 700153752_FLI
gcgccgccaccaagtccatcgagcgcgaggtcaactccgtcaacgacaacccggtcatcgacgtccaccgcggcaaggcgctgcacggcggcaacttccagggcacccccatcggcgtgtccatggacaacgcccgcctcgccatcgctaacatcggcaagctcatgttcgcgcagttctccgagctcgtcaacgagttctacaacaacgggctcacctccaacctggccggcagccgcaaccccagcctggactacggcttcaagggcaccgagatcgccatggcctcctactgctccgagctccagtacctgggcaaccccatcaccaaccacgtgcagagcgcggagcagcacaaccaggacgtgaactccctgggcctcgtctcggccaggaagaccgccgaggcgatcgacatcctgaagctcatgtcgtccacctacatcgtggcgctgtgccaggccgtggacctgcgccacctcgaggagaacatcaaggcgtcggtgaagaacaccgtgacccaggtggccaagaaggtgctgaccatgaacccctcgggcgagctctccagcgcccgcttcagcgagaaggagctgatcagcgccatcgaccgcgaggccgtgttcacgtacgcggaggacgcggccagcggcagcctgccgctgatgcagaagctgcgcgccgtgctggtggaccacgccctcagcagcggcgacgcggagcgggagccctccgtgttctccaagatcaccaggttcgaggaggagctccgcgcggtgctgccccaggaggtggaggccgcccgcgtggcggtcgccgagggcaccgcccccgtggcgaaccggatcgcggacagccggtcgttcccgctgtaccgcttcgtgcgcgaggagctcggctgcgtgttcctgaccggcgagaggctcaagtcccccggcgaggagtgcaacaaggtgttcgtcggcatcagccagggcaagctcgtggaccccatgctcgagtgcctcaaggagtgggacggcaagccgctgcccatcaacgtcaagtaaagaacgccaaggagaagaggagggaggggaggaaatacgtgaaaaaaaataaaacctgtacacgtgtatgtccagatcgtgtgtcgtcgatcgttcttcgttgttgatttttggttgtattgatcgatccgtatgtgtgcgtgcgtgtgtggcgttgctctttcttcttttgtgtagctgtgccctgccaccggccgacgtgcgtgcatgccatggtggcgggcagcgttttctaaggtcatatactgttgttgtgtttaagtacatcttgcgtactc

SEQ ID NO: 1323 - DNA, 1224 bp, Zea mays
  Clone ID: 700155805_FLI
ctctggatatctttcccagcaggaaatcagatctgccattttaaaagcatcacaatctttaaggaaagcaaaaggggagtccaatggcaatgatgagaaaacagatgcctcagcagttgataagtatccacttgtatctgttcctgatgagacactgacgccagaacagttaaaggaaaagaagaaacagatattacttaaaaccacaacagagggcaaattgcgcgcaaagcagaaacgtgctgaagaggaggctttgcgggagaaacaagaagaaaagaggcgtgcggagaacccagagttataccttgaagagcttcgggcccgatattcagaactttctgataattttgagcagaggaagcgacagaaagttaatggtagtcagacaaatgggaaccatagttcatctgcaggtgtaggccgtggagaaagactaaatgcagctcagaaagaaaggatgcggctgcttgcctcagctgcttttgatcggggcaaaggtgaggacacttttggaatgagagacgaggattggttagtgtacaacaagatgagcaaagacaatgatgatgacagcaatgatgatgatgaatcggaacttgttcgaatttcatcgaagctccaggagattgatcctacatttgtgtccaaatccgaagctgttcaactgactccggagccacccaaagtccggccactaaccgctgaggattacagaattgccattgggatcgagcggttccgttgccctgaagtcctcttccagccaggcatgattggaatcgaccaggccggcatcgatgagatggtcagcatctcactcaggagattaatggaggacgagtctgtgaaggagcgcctctgccagtcgatccttgtcactggcgggagctccctgttccctggcatgatcccccggctggagtctgggatacggcaatatcggccctaccttgctcccctgaagcttgtcagagcagctgaccccattttagacgcgtggaggggtgctgcggcctttgcggcatcaagcaagttcggcaaacagactttcagcgtagcagattacagagagcatggagagaacctatttcatcggtacaacattgtttattcactataacttgtcacacagaaaatgacatagtgatcgaaccatctcagcaggctatttatttgacagctgatacaaattgatttagcaacaaagtttttcaaaactgc

SEQ ID NO: 1324 - DNA, 854 bp, Zea mays
  Clone ID: 700155810_FLI
cgctcgtctgcaaatctgcaaatggctagcatcagcagtcttgcagcacttagcctcttgcttctcgtgagcgttggattaagcgacgccatccgggtggccagatactccagctctcaaggagcgggacagggaggggggaatggtggggcggatcagaacggctcaggttcaggggttgggctcggttcgggatccggtgagagcggtgcggacggcgtctacgtgagtgccggaggcggaggtgagggcggtggctggtcacagtacggtggtactgcttttggtggcgggtctggtacggggtccagttccagccagtatagctcgggatcatctttcggtaatggcgggtctactcttgccgggggcatcggtggcggcggcggcggtggacagggctcggagaaccaaggctccggtggctacggtaccggcggtggcaccggatccggctctagtgaggctagctccggcgacccgccctcggccacaccaccgtacgcaagcgcagatgcttctggcaatggtggtggcatgggcggtggtcgcgacggtgggactggtggcggtaaaggccacggatctggattcggcgaaggacagccttaagagtttcctatcagattttcaaagctggaggccaaaagatgctatttcattttcatttgctttgcgtacgttgatttttttatagttttacttgtggcccttttttgtacttctagttctagacaggaactaataatggcttccagcaaccctagctagccatgacctagcaatgcgagttcaacagatcagatgtttgaagattattgtgtggtcattattatagtaactcattgtgttct

SEQ ID NO: 1325 - DNA, 817 bp, Zea mays
  Clone ID: 700159426_FLI
caaggatatcatcatggttgaccacatgaggaagatgaagaacaatgccattgtctgcaacattggccactttgacaatgaaattgatatgctcggccttgagacctaccctggcgtcaagcgcatcaccatcaagccccagactgaccgctgggtgttccccgagaccaacactggcatcattgtccttgctgagggtcgcctgatgaaccttgggtgtgctactggccatcctagctttgtcatgtcctgctcattcactaaccaggtcattgcccaacttgaactgtggaaggagaagagctctggcaagtatgagaagaaggtgtatgtgctccccaagcaccttgatgagaaggttgctgctctccacttgggcaagcttggtgccaagctgaccaagctcaccaagtctcaggccgactacatcagcgtggcgatcgagggtccctacaagcctgcccactaccggtactaggcagccagcacacggcttgcagctcactcgggccgttgtgtgctatgaagttcgctacactggcctgtcagttatcttttgcatgcatatgcattatcatatacgcagtcgcgtagcaggtttccttatggttatcgcttgagctgagggggagggaaggagctgtttgcttttgctgaagaataatggtgtagtcggctggggtgaggcgatgtgcgttgccagatacagttttgtcttgttgactctacttatctgattatcatttgtaagcgatttgctcaagttatttgtcgtttatgaataacttgctttcctcaagagcatacttaaagacgg

SEQ ID NO: 1326 - DNA, 2062 bp, Zea mays
  Clone ID: 700150613_FLI
ctgcaccggcggcgccagttcctcttccgagttccccaccgccccagccgccgcgccccactgctaacttcggcggctgagcgtccagcagggcgcaccatggctactgcggataccggagcgtccacggtgaccgattcgaggctccgaggagtgaagcaagcactgatatcattgtcagataaaacagacctggctaatcttggaaatggtcttcagcgtttggggttttctattatttccactggtggcacggcatcaagtttggaagcatctggtgttaatgttacaaaagttgaagaaattacacagtttcctgaaatgcttgatggaagagtaaaaacattgcaccccagtatacatggtggtattcttgcgcgaagagaccaggagcaccatctgaaagcactgaaagagcatggcattgggacatttgatgtggttgtagtgaatttgtatccattctatgataaggtcacctcaggtgcaatatcttttgaggatggcattgaaaatattgatattggtgggcctacattgatccgagctgctgccaagaatcataaggacgttcttgtcgttgttgatcataaagactatcctgctctactggaatatctagaagggaaacaagatgaccctgatttccgcaggacacttgcatggaaagcattccaacatgttgcttcctatgattctgctatctcggagtggttgtggaagcaatctaataaagattcatttcctcccagctttactgtgcccctcacaatgaagtctacacttcgctatggtgagaatcctcatcaaaaggctgccttttatggtgacaggagtctttctctagtaaatgctggcggtattgcaacagcaattcagcaccatggaaaggaaatgtcctacaacaactatctggacgcggacgctgcgtggaactgcgtctcggagtttgagagcccgacttgcgtcgtggttaagcacacaaatccgtgtggcgtagcgtctcggcacgacatcctggaagcgtacaggttggctgtgagggcagaccccgtgagcgcgttcggaggcatagtcgccttcaacacgacggtcgacgaggatctcgcgagggagatccgggagttcaggaggccgacggacggcgagacgaggatgttctacgagatcgtggtggcgcctgggtacacggcggagggcctggaggtgctgaaagggaagtcgaagacgctgaggatactggaggcgaagcggaggaggagcgggaagggcacgctgctgtcgctgcggcaggtcggcggcggctggctggcccaggagcccgacgacgtgaccccggaggacgtggccttcacgaacgtgtccgagagggctcccgacgcccgcgagctctcggacgccaagttcgcgtgcctctgcgtcaagcacgtgaagagcaacgccattgtgatcgccaagaacagttgcatgctaggcatgggcagtggccagccgaaccggctggagagcctgaggatcgctttcaggaaggcaggggaggaggccaagggagctgctttggccagcgacgccttcttcccgttcgcttggaacgacgcggtggaggaggcgtgccagcgcggcgtggcggtgatcgcagagcccggcggcagcatccgggaccaggacgccgtggagtgctgcaacaagtacggggtggccctcgtcttcaccggcgtccggcacttcaggcactgatcgacggcgacggcgagggtggcaacgtagaccgtcacggacgatggtacctgtagctgcgtcgacctgatgcccgctggcgtttcttggctagggagactgatgacgctgaagcaaccaaatgtcgcctcctctagtctggagaggatgggtcggtgggtcccggtttgtatatataacgtcgtcagcctggcaagaggttgactgagcttagtgactcttgcggtggatggaaatcggaaacggtcgctgacccggtgggaccgcacagtctgttgcttggctacatgccgtgttattattattaatactatttattgctgtc

SEQ ID NO: 1327 - DNA, 131 bp, Zea mays
  Clone ID: 700150621_FLI
gcatagatccaaaccgagcaccttattcaggtttattgaaacatgggagatagattctgcagtacatctaccaccacctggaacactccgtatcattagtatcagttacacgtagcgtagatgagcgcgat

SEQ ID NO: 1328 - DNA, 779 bp, Zea mays
  Clone ID: 700150635_FLI
ctcgccgctgccgtcgccgcagcatcctcgcacactcactcgctctcgcgttctgcctcggcctgccaccaccaccaccatctcgcctgctgctcgccaatggcccctgcctcgtcgccggttgcaggctcctccactcgctccgtcgcctccgccacatcctcgggatatgatgctctgtccccttcggatccggctagccgtcgccagggacacaaccaagcttggcctgggcgcgacaaccaggtccaaccgagccagcggccggggagatctgaaggggtgagggggtggggggacacgagcgcgcactctcggctcccgccccgcgggggaagcagagcggagacgggcggcgaaggcggaaggccatgaggtgttgggatttgggaggggtcaggtcaggagtggccgtcccgctcgtgaactcctgcgccaaacgcaaaactgtcggctgcagcctgcagtcgccggccggaactgggacgagtttggtttggtgatggtggcctgctcttggatcgagacggcccgattggatgaatgatcgcgtcgccgattaaataatcaccatctgattctattggttttaaatctactattgagtttgtgatttgtctttcttattttggttgtccagttactaaaacaacaaaaagacaacaatgtaatggtgggtgttctgaaggagtttgggaacatgctagcctatggtcgtctagatttgtcaattaccctctattttacaataaataaaggagatgattttatgttacatc

SEQ ID NO: 1329 - DNA, 1088 bp, Zea mays
  Clone ID: 700150644_FLI
aaacaagctcctgacaacccacgccacgacgacacaacaaagcaccgcagctactaaacccatggccggggtcgtggtggtgttcgacttcgacaagacgatcatcgacgtcgacagcgacaactgggtcgtggacagcctcggcttcaccgagccgttcgagcgcctcctgcccaccatgccctggaacacgctcatggacaccatgatgggggagctgcacgcgcacggcaggacgctggacgacgtcgccgaggcgctccgtgcggcgcccgtcgtcgcgggcgtccccgccgccatcaaggccgcctacgcgctcggctgcgacctgcgcgtcctcagcgacgccaacgccttcttcatcgacaccgtcctggcgcaccacggcctgctgggctgcttctcccagatcaacaccaaccccagccaccccgacgccgacgccgacggccgcctccgcatcgggccctaccacgacctgcacgggtgcggcgtcggcacctgcccgcccaacatgtgcaagggccaggtgctggaccgcatcctccgcgaggcgtcgtcgtcggccgccggcaggaagcgcgtcgtgtacctgggcgacggccgcggcgactactgcccggcgctgcggctggcaagggaggacttcgtcatgccgcgcaggggcttccccgtgtgggacctcatctgcgaggaccccgcgcggctgcaggcggaggtgcacccctgggccgacggcgccgagctggaggagacgctgctgcgcctcgtcgggagggcgcgcgtggaggaggccgcactgctgccgccgctcgactgcaagctcgagtccatgcccgttgccgcgcaggagggcatgggacccatcatgccgctcggcgtcaagcactgacgatacacgcagcagtgcagtctctggtttgctggttaatgctggtttggttcgggttggacgaacgattagtaagtagctcgaataattagtataactgtatcggctaattttatgtgtttgtgtgtgtgctgtgtggtgtatgcctccgcatcgagctgcctgtcactgctgaattggctctgcctcgctgtgt

SEQ ID NO: 1330 - DNA, 1069 bp, Zea mays
  Clone ID: 700150655_FLI
gtgcaccagagggggaggaagaaggaaagcaagcaagtggtgggaggagtcatggactgctgcatctgcagccccacggcgtccgtgtacaggcttccgaggaactccatctgtgctccatgccacgagggcgccaaggcagtcatcgcttttctgaacaaggatggtgagcggcaggaggaagacgccggtggccaccaccaccatggctctgccctcaagtccagagggtccacgacgcagcctcatagcgcagccaaggggatgagggacgcgtgggagcaggtgaaggagatgagaggcagggaggaggaggcccaccggagagccgccttcctcgcgatggcgccgtggaaggagcgactccacaccgacatcgtcgtcaaaccgggcactgggtctccaatactggcccacaaagccatcctggtaagcacgtgggcctgatgcactgagccctgcatgcatttcacgccggcctgacgcacgcacgcacgccggccgcgaggtcggaggtgttccgcaacatgctggccgccgccgctggcgacgccatctcgctcccggagctggcccacgacgagctatccctcctgctcgccttcctctacaccggcaacctcctggaggacggcccggccgtgccgccggtcccggaggccggaggagcggcagctgcacgcgctgctcgtggcggccgacaagaagtacgacgtcccgttcctgcgccgggcctgcgaggcgcagctggacgcggccctggacgcctccaacgcgctgcggacgctggaggtcgcggacctgagctccagcgcggcgctcagggagcgcgccatgggcgcggtggtggagcacgcccagcaggcggtgttctcgcccgagtactacgacctggccaccaggaacgcgggcctgtgcgtcgagatcacccgggcgctgctggccaagatgtccatgacgacaaataaagcctcatgcatagatgtagctagagcttcaatgcaaagctgcatgctgcgacgatagtgtttgatttcatcaacgatcctatagatttattctatatgtt

SEQ ID NO: 1331 - DNA, 1971 bp, Zea mays
  Clone ID: 700150674_FLI
tacccacctccatttagctactactactccctcgctgtcttccccaaccaacaaatcgacctagctaggcacaagagcgctagacgccgcagcgcagcacgcaccacccaccgagcggcggcggaggcagggcaatccgcagggagcagaggccgcgcgcgcaggcatgggcgcgccggtgcacggcgccctcgccttgttcctcctgctcctggtgggggcaggggcggcgcccgaggagacggcgccgcaggaacccacattgccagccaccggctccggcgctaccggcgcggcggcggtcggggtcaactccaactccgtgcttgtggcgctgctggattcgcactacacggagctggcggaactggtggagaaggcgctgctcctgcagacgctggaggacgccgtcgggaagcacaacgtcaccatcttcgcgccgcggaacgaggcgctggagcgggacctggacccggagttcaagcgcttcctgctggagccgcgcaacctcaggtcgctgcaggcgctgctgctctaccacgtcctcccctcgcgcctgccctccgactcctggcccgcggcgtcccaccccacgctgtccggcgaggaggtcgagctcgcccccgccgccggcgccggcatgcgcgtcggccacgccgccgtcacgcgcccggacgccgtgctcaggcccgacggggtcatccacggcatcgagcgcctcctcgtgccgcgctccgtgcaggaggacttcaaccgccgccgcagcctcgcggcgatctcggccgtgctgcccacgggcgcgcccgaggtggacccgcggacgcaccgcctcaagaagcccgcgccgccggtggcccccggcgcgccccccgtgctcccggtctgggacgccatggcgcccggcccctccatcgcccccgcgccggcgcctggcccgggctccgggaagcaccacttcgacgggcacagccaggtcaaggacttcatccagacgctgctcctctacggcggctacaacgagctcgccgacatcctcgtcaacctcacctccctcgccaccgagatgggccgcctcgtctccgagggctacgtcctcaccgtgctcgcccccaacgacgaggccatggcgcgcctcaccacggaccagctcagcgagcccggctcgcccgagaacatcctctactaccacatgatccccgagtaccagaccgaggagtccatgtacaacgccgtgcgccgcttcggcaaggtgcgctacgacacgctgcgcctgccgcacaaggtcgtggcgcgggaggccgacggctccgtcaagttcggccagggcgagggctccgcctacctcttcgacccggacatctacaccgacgggaggatctccgtgcagggcatcgacgccgtgctgttcgcgcccgacgacaccaaggccacgcagacagccgaccctaacaggaagcctcccgccatcgtcacccacaagaagaagatcaagctccggcgaggcaagttgttagaggcgacgtgccagatggccgggctcttcggtcagcgatcgcgattcgcgagctgccagtagacggagaaaggatctgttgatctccacgacaccgaaagacgaacgaacgaacgaactgacgggctgccgcaggagggagggggagccgtccacattattgcttgtattttttttcactcttttgtttattgttgagaataataatgaatcaggtgggggatgtaaactctgtgggttgttgttggtgtgtcgtccagatggggaaaaaaaggagaaaaagaaaggcagccaaaaaaaaattgtccatacatgaatgaagaagcccaggatcgttgtctttgtataggagaaggaattgaaacgtttttgttttgttttctttttctgtcattctttgcttctgttcccgttttgacaatgagaaatatcgggtaaacacacaaccattcttactt

SEQ ID NO: 1332 - DNA, 1066 bp, Zea mays
  Clone ID: 700150710_FLI
catcgcctcatcttcctcttctcgcacctgcgaagtccccccgctttctatccccccgcctggccgcctctaagacaacagagacagcaatggccgtgcgcgccatcgatacgccgctcctcctgtgcaccatggtggtggtgctgaccggcctcgtgtccccgtccaccgccgggctcagcctggacacggtgagggacttcctgacgcgggaggaggacaccattgtgttcagcctcatcgagagggccaagtacccgctcaaccggccggcctacgaccccctccactccgccgccggccgccgcctcaacgcctctttcgtcgagctcttcatccgcgagtccgaggccgttcagtccaaggccggaaggtaccaaagcctacaggagattccattcttcgcttacagagttccttccgctctggcgcctccatacaacttcacaagcgatctgtatcccgctgccgcgtcagtcaacgttaacgacgccatatggagcatgtacttcgacgagctgctccctcggctggctaagaatggcgatgatggcaactacgccgtagctgctgatgcagatcttgcgtgtcttcaggtgctttcaaggaggatcaactacggcaggtacgtagctgaagtgaagttcagaggagaccagcagacctataccagcttaatccaggcgaaggacagagacgctctggtgaagctactgacgtctgaagcccaagaggacgtggtgaagagaagggtagagaagaaggcggccgtgttcgggcaaagcgtaacgttggacggaccagtccaaacggatgccaacagccaggctaactctagcttattcaaagtcgacccttcggtcgtttacgagctgtatggccagcgggtgattccgttgacgaaacaggtggaggtcgagtaccttctccatcgcctcgactgagactgatcactgatcgatcgcgtcaaatgtgtatatatccggctgacggatttgtatacccgtaacgtatttacatacatacatacgcaataagaaatatacaggactgttgtcctcagttt

SEQ ID NO: 1333 - DNA, 1100 bp, Zea mays
  Clone ID: 700150712_FLI
cgtcggccagatcaaacgaatcggcacgacgcatcggcatcgcctccgacgatcttgagacaaacaaaacccaccgctgcggcaactccgcctcccgccgacccggggatcgcctgacaacaggcagcgaaaaggggcgcagggtttgcccgccaagatggaggacgtggacgtctcgcggcagctgaagcagatgacggacttcatccgccaggaggccgtcgagaaggccgccgagatcgaggccgccgccgccgaggagttccaaatagaaaagttgcagctggtggaagctgaaaagaagaagatcaggcaggaatatgaccggaaagagaagcaagttggcatcaagaagaaaattgattactcgatgcagctcaatgcttccagaattaaagtccttcaagctcaggatgatttggtaacagatatgttggagtcagcaaggaaagagctactgtgcataagtagagatcaccccacttacaagaagctcctcaagacacttattgttcagagtttgctgcgcctgaaagaaccagctgtgcttctccgctgcaggaaggaggatcttcaacttgttgatttagttttggagtctgcaaggaatgagtatgcagataaagcaaaagtatatcctcctgagatagtggtagatcgtcaaatctatctgccatctgctcccagtcattatcaggcacctggtccctcatgctccggtggagttgtgctagcttcccgagatggaaagattgtctgtgaaaacacactggatgctagattgcaggtagttttcagaaagaagctgccagagattcgtcagagccttttcgggcaggtagctgcgtagccaattcttgaaaggagaacgtggcccagtactctttggggtaccctgacgatgtccaggagaagctttggcagctctcaattgtgatttatcacacttttggatctcgattattattatttgtgtatacttttttcctggttatggatacctttgaatcctgcacagagcaaataaactgtgttcatttgtgggacgatcgtttgttgcaataaggcatcgagatgtgttgcgatgccacttctgttat

SEQ ID NO: 1334 - DNA, 2079 bp, Zea mays
  Clone ID: 700150816_FLI
accaccggcttcggcggcacctcccaccgccgcaccaaggacgggcccgcgctccaggtcgagctgctcaggcatctcaacgccggaatcttcggcaccggcagcgacgggcacacgctgccgtcggaggtcacccgcgcggcgatgctggtgcgcatcaacaccctcctccagggctactccggcatccgcttcgagatcctcgaggccatcacgaagctgctcaacaccggtgtcagcccctgcctgccgctccggggcaccatcaccgcgtcgggcgacctggtcccgctctcctacatcgccggcctcatcacgggccgccccaacgcgcaggccgtcaccgtcgacggaaggaaggtggacgccgccgaggcgttcaagatcgccggcatcgagggcggcttcttcaagctcaaccccaaggagggcctcgccatcgtcaacggcacgtccgtgggctccgcgctcgcggccaccgtgatgtacgacgccaacgtcctggccgtcctgtcggaggtcctgtccgccgtcttctgcgaggtcatgaacggcaagcccgagtacacggaccacctgacccacaagctgaagcaccacccggggtccatcgaggccgcggccatcatggagcacatcctggatggcagctccttcatgaagcaggccaagaaggtgaacgagctggacccgctgctgaagcccaagcaggacaggtacgcgctccgcacgtcgccgcagtggctgggcccccagatcgaggtcatccgcgccgccaccaagtccatcgagcgcgaggtcaactccgtgaacgacaacccggtcatcgacgtccaccgcggcaaggcgctgcacggcggcaacttccagggcacccccatcggcgtgtccatggacaacgcccgcctcgccatcgccaacatcggcaagctcatgttcgcgcagttctccgagctcgtcaacgagttctacaacaacgggctcacctccaacctggccggcagccgcaaccccagcctggactacggcttcaagggcaccgagatcgccatggcctcctactgctccgagctccagtacctgggcaaccccatcaccaaccacgtgcagagcgcggagcagcacaaccaggacgtgaactccctgggcctcgtctcggccaggaagaccgccgaggcgatcgacatcctgaagctcatgtcgtccacctacatcgtggcgctgtgccaggccgtggacctgcgccacctcgaggagaacatcaaggcgtcggtgaagaacaccgtgacccaggtggccaagaaggtgctgaccatgaacccctcgggcgagctctccagcgcccgcttcagcgagaaggagctgatcagcgccatcgaccgcgaggccgtgttcacgtacgcggaggacgcggccagcgccagcctgccgctgatgcagaagctgcgcgccgtgctggtggaccacgccctcagcagcggcgacgcggagcgggagccctccgtgttctcaagatcaccaggttcgaggaggagctccgcgcggtgctgccccaggaggtggaggccgcccgcgtggcggtcgccgagggcaccgcccccgtggcgaaccggatcgcggacagccggtcgttcccgctgtaccgcttcgtgcgcgaggagctcggctgcgtgttcctgaccggcgagaggctcaagtcccccggcgaggagtgcaacaaggtgttcgtcggcatcagccagggcaagctcgtggaccccatgctcgagtgcctcaaggagtgggacggcaagccgctgcccatcaacatcaagtaaaagaacgccaaggagaagaggagggaggggaggaaatacgtgaaaaaaaataaaacctgtacacgtgtctgtccagatcgtgccgtcgatcgctcttcgttgttgatttttggttgtattgatcgatccgtatgtgtgcgtgcgtgtgtggcgttgctctttcttcttttgtgtagctgtgccctgccaccggccgacgtgcgtgcatgccatggtggcgggcagcgttttctaaggtcatatactgttgttgtgtttaagt

SEQ ID NO: 1335 - DNA, 1367 bp, Zea mays
  Clone ID: 700150827_FLI
caagcaaggcaggcggagcgggcaagggcaagcgagggatgagaatgagggccgtggtgatcacgtgcgccggcgggccggaggtgctggaggcgcgggaggtggaggaccatcccgcgctaggcgaaggagaggtgctcctcgaggtcgccgccgcgggcgtcaatcgcgcggacaccgtgcagcggatgggccggtacccgccgcctgccggcgcgtccccttacccggggctcgagtgctccggcaccatcctcgcgctcggccccaacgtcccctcccgctgggccgtgggcgataaggtttgcgcgctcctcagcggcggcgggtacgcggataaggtggtggcgccggcggggcagctgctgccgatacccgagggggtgtcgctgacgcacgcagccggcttgcccgaggtggcctgcaccgtctggtcaaccgtattcatgaccagtcacctctcccccggtgaatcattccttatccatggaggatccagtggaattggtacattcgctatacagattgctaagcacctcggaattaaggtttttgtcactgcaggaagtgaagaaaaactagcagcctgcaaagctttgggtgccgatgtatgcattaactacagaactgaagacttcgttgaacgtatcaaacaggaaaccaacggaaagggaactacttcgatgctctcttttttggcagctagtatgtatcgagcattatcatcaaatagcgcaacatccctgactgtaatctgaaactcactaccaggtgttgatgtgattctggataacattggaggatcatatctccagcgcaacctgaatagcttaggtgttgatggtagacttttcatcattggcttccaagggggcatagcagctgaagtgaacctgcaagctgtgcttgcacgccgtttgaccatacaagctgctggactgcgcaacagaagccttgctaataaggcagagattgttagtgaggtggaaaagaacgtgtggcctgctgtcgctgctggcaaagtgaagccggtgatttacaagacgtttccgttatgtgaagctgctgaggctcataggttgatggaagctagcacccacatcggcaagatactgctgctcccatgactgcacctgtggcgtttgcgctcttgctctcggaggagtcagttcaaaaacatatgcaattcctgagactgtgacaacctgcacggatgttgtactggtgtcgcatgtcttttttatatatatcttgtagtactagattggatcttttaccccgagaaattatcttgtcaattggatccttaaagtgctgatgacatttttctgtgagctatgatataataaatctggcagatagagccc

SEQ ID NO: 1336 - DNA, 2040 bp, Zea mays
  Clone ID: 700150837_FLI
ccagcgagacccccggcgaggaccccttcgtcgtcggccgctacgccgtcaacttcgtccgcggaatgcaggacgtcgacgaccgcccctacgccgccgccgcagacccgttctcgcggcccatcaaggtgtccagctgctgcaagcacttcgccgcctacgacgtggacgcgtggttcaaggccgaccgcctcacgttcgacgcgcaggtggaggagcgcgacatggtcgagaccttcgagcgccccttcgagatgtgcatccgggacggcgacgccagctgcgtcatgtgctcctacaaccgcatcaacgggatacccgcctgcgccgacgcgcgcctgctgtcggagaccgtccggagccagtggcagctccacgggtacatcgtctctgactgcgactccgtacgcgtcatggtccgggacgccaagtggctcaactacaccggcgtcgaggccaccgccgcggccatgaaggccgggctcgacctcgactgcggcatgttctgggagggcgcccgggacttcttcaccacctacggcgtcgacgccgtccggcaggggaagatcaaggagggcgacgtcgaccacgcgctcagcaacgtctacacaaccctgatgcggctcggcttcttcgacggcatgccggaattcgagtccctcggcgctagcaacgtttgcaccgacaaccacaaggagctggctgccgacgccgcaaggcaggggatggtcctcctcaagaacgatgcccgacgcctaccattggaccccaacaagattaattcagtgtcgttggttggcctgttggagcacatcaatgccacggatgtcatgctgggagactaccgaggtaagccatgcagaattgtgacaccatacaacgctatcaggaacatggtgaatgccacatacgtgcacgcctgcgacagtggggcttgtaacacggcggaagggatgggcagagcatccgggacagcaaagatcgccgacgcgaccatcgtcatcgccggtctgaacatgagcgtggagagggagagcaacgacagggaggatctcctgctgccgtggaaccaaagcagctggatcaatgccgtcgccatggcctctcccacaccgatcgtcctggtgatcatgtcggccggcggcgtggacgtctcgtttgcgcacaacaacaccaagatcggcgccatcgtttgggccgggtaccccggcgaggaaggcggcacggccatcgccgacgtcctcttcggaaaatacaatccaggaggacggctgccgctgacatggttcaagaacgagtacgtcaaccagatccccatgacgtccatggcgctgcgtcccgacgcagcgcttggctaccccggccggacgtacaagttctacggcggcccggccgtgctctacccgttcggccacggcctcagctacaccaacttcagctacgcgtccggcaccaccggcgccactgtcaccatccacatcggcgcctgggagcactgcaagatgctcacctacaagatgggtgcgccgtcgccgtcgccagcctgcccggccctcaacgtcgctagccacatgtgcagcgaggtggtgagcttcagcctcagggtggcgaacaccggcggtgtcggcggcgaccacgtggtgccagtgtacaccgcgccgcctcccgaggtgggcgacgcgccgctgaagcagctggtggcgttccggagggtgttcgtgcccgccggcgccgccgtcgacgtgcccttcgccctcaacgtgtgcaagacgttcgcgatcgtcgaggagacggcgtacaccgtcgtgccgtcgggcgtcagcacggtcgtcgtcggagatgacgcgctggtgttgtcgttccccgtcacgatcaacctggcagtgtagactacttgtctgcaggactaggcgtttattgattctttttttttactcaaggtaataactttaaaccattaaatgtggcgggcgagaaagtggaagcaagtgtaattactttacacagtgctatacaaaagcagaagcagatcgatccatt

SEQ ID NO: 1337 - DNA, 1174 bp, Zea mays
  Clone ID: 700150844_FLI
gccaaaccagagacgcggcacgcgacgcggaaggaccagcagcggcggcgcggcgacatcgcgaggccagggcagaggcgaccgccgagagtccctgccaccatggacaccttcttcctatcgcacggctcgcccacgctctccatcgacgacagtatcccggcgcggcacttcttcaagtcatgggtgccggcgaaggtcgcgggcgaccagcccccgcgcgccatcctcgtcgtctcgggacactgggagacggccacgccggcggtcaacgtcatccgcggcagcaacgacaccatctacgacttctatggctttcccaagcccatgtaccagctcaagtaccccgctccgggcgctccggacttggccctgcggaccgtagagctcctggagcaagccgggttcggccccgtgaagcaggaccacagccgcgggctcgaccacggcgcctgggtgccgctgatgctcatgtacccggacgccagcatccccgtgtgccagctctcggtgcagaccgaccgcgacggcacgtaccactacaacctcggcaaggcgctggcgcccctgcgggaggaaggcatcctcatcctcggctccggtagcgccacgcacaacctgcgcaagattagcccgtccgacgcgcccgtgccgcagtgggccgccgagttcgacacctggctcaaggactcgctcctcaacggaaggtacgaggacgtgaagcggtacgaggagaaggcgccgcacgcgagggtggcgcacccgtggccggaccacttctacccgctgcacgtcgcgctcggcgccgccggggacggggcgaaggcggagcagatccaccagtgctggtccaacggcacgctctcctacgcgtcctacaggttcaccaccaacacctgacgcgctgcttgtggtgtcggtggaataccacccggccagctgctgaattcgcggggaagcatccatcgacgggtgtggcactggcagcattgcacatactgtatttctaataaacccccgtgtgcctgccgttccgttcgcggtagatatgcgtttgttgatgttttgcgttgtttggtgcagcagcttaggctgattgattgcctgcatggtggtgccgggatctcgctggcctagctgaatcatgcattctatcgagaaacatttgtttgtt

SEQ ID NO: 1338 - DNA, 1328 bp, Zea mays
  Clone ID: 700150847_FLI
gtgagggcgggagaggttgaggttgaggaagagcagaggaatccattccaggagtgtttaatggcgggaggcaaggaagcgcacgggtgggcagccagggatgtctctggtcacctctccccttaccacttctcacggagggttcagagagacgacgacgtcaccatcaaggtgctcttctgcgggctttgccacactgacctccacgtcatcaagaacgagtttggcaacgccaagtaccccgtcgttcccgggcacgagatcgtcggcgtcgtcaccgacgtcggctccggcgtcacaagcttcaagcccggcgacacggtgggcgtgggctacttcgtcgactcctgccgcagctgcgacagctgcagcaaggggtacgagagctactgcccgcagctcgtggagacgtccaacggcgtgagcctggacgacgatgacggcggcgccaccaccaagggcggcttctccgacgccctcgtcgtccaccagcgctacgtggtgcgggtcccggccagcctgccgcccgccggggccgcgccgctgctgtgcgccggcgtcaccgtgttcagccccatggtgcagtacggcctgaacgcgccggggaagcacctgggcgtcgtcggcctcggcggcctcggccacctggccgtccgcttcggcaaggcgttcgggatgaaggtcaccgtcatcagcacgtcgctgggcaagcgggacgaggccctcggccgcctcggtgccgacgcgttcctggtcagccgcgaccccgagcagatgagggcggcggcgggcaccttggacggcgtcatcgacacggtgtcggccgaccaccctgtcgtgccgctgctggacctgctcaagccgatgggccagatggtcgtcgtcggcctgcccaccaagccgctccaggtgcctgccttcagcctcgtcgccggcgggaagcgcgtggccgggagtgccggcggcggcgtcggggagtgccaggccatgctcgactttgccggcgagcacgggatcaccgcggatgtggaggtcgtcgggatggactacgtcaataccgccatccagcgcctagagaggaacgatgtcaggtaccgcttcgttgtcgacgtcgcgggcagcaagattggaggctaggcatcaccattcctagtgttctgtcgatcgacgtgtgatttgcttcttcctcgagcgtgtcttattgttctggttggagcacgtacgcggccatcacacgcaggcgtggataataaacaaggtagagtttcgggttgtgtcgtttctggatgtatggtgccggtggataataaacaagcttggtgtggtcg

SEQ ID NO: 1339 - DNA, 863 bp, Zea mays
  Clone ID: 700150852_FLI
ttcgcatccgggcatcccaccccacccacctccttcctcttcccgcccgctaaaacccacgccaccgccgcgcgccgccggcggcgcaagggacgcacgatggccatgcaggtggtgcgcaacctcgacctggagcggtacgcggggcggtggtacgagatcgcgtgcttcccgtcccggttccagcccaagacgggcaccaacacgcgcgccacctacacgctgaacccggacggcactgtgaaggtggtgaacgagacgtgggccgacgggcgccgcggccacatcgaaggcacggcctggcgcgccgaccctgccagcgacgaggccaagctcaaggttcgcttctacgtgccgcccttcctccccctcatccccgtcaccggcgactactgggtgctccacatcgacgccgactaccagtacgcgctcgtcgggcagccctccaggaactacctctggatcctttgcaggcagcctcacatggacgagtccgtgtacaaggagctggtggagcgtgccaaggaggaagggtacgacgtgtcgaagctccgcaagacggcgcaccctgacccgccgccggagagcgagcagagccccagggacggcgggatgtggtgggtcaagtccatctttggcaagtagccttgtggtggtgggtggcagcgcgggtgctgccgtgccgagcaggcgagcgcacgcaagagatgcctgtgaccgtcggttccgcgtgtacattcagcactagctggggattaagttggttcgttgttgctgtcgcgatctgcaaatggcgaaaagtgtgcttgtttcttgcccgtctgtattgtatcgaactttgagcgaatgtttcagtttgctgc

SEQ ID NO: 1340 - DNA, 1600 bp, Zea mays
  Clone ID: 700150876_FLI
ggatcactggattgtgggttgtgctaactgcaggctggcttgtcagcctatcataaggaaagtgaaaaagagacaacaaagcaatttgttgtctcattcttaggagctggcgagcactcggcatggcagatgctagttcgaggactgacacctcgactgttgtagacatggatgataagaatcaaaggattattttacgaaatttcaacttctctctgtgggacatctaatggtacaggtcttggagagatgcatgtaaagtgttagaaaacggacagagtggagccatggtcccggcttctaattcatctgaccggtctgacagatctgacaaacctatggaccagaaggttttacgacggcttgcccaaaatcgtgaggcagcaagaaaaagccggctgaggaaaaaggcatatgtgcaacagctagagagcagtaagctaaaacttgcaagcctggagcaagaactccagaaagctcgacagcagggaatcttcatttctagttctggagatcaaactcatactatgagtggaaatggagctatgaccttcgatttagaatattctcgatggcaagaggaacaaaataagcagataaatgagctgaggactgcagtaaatgctcatgcaagtgatagtgacctccgtcttatagtcgatgggataatggcacattatgacgagatattcaggctgaagggcattgctgcaaaggctgatgtgttccatatactttcaggcatgtggaaaacatctgctgaaaggtgcttcttgtggcttgggggtttccgttcgtctgagcttctaaagctccttgtgaatcagcttgagcctctaactgagcagcaattgatggggctgtccaatctgcagcaatcttctcagcaggctgaggatgcattgtcacaaggaatggaagcattgcagcagtccttggcagaaacgctggctgggtcccttggtccatcaggatcttctggaaacgtggcaaactatatgggtcaaatggctatggccatgggaaaacttggcacactcgagaatttccttcgccaggctgacaatctacgacagcagaccttacatcagatgcaacgtatcctgacaatccgacaagctgctcgtgcgcttcttgcaatccatgactacttttcacgtttgcgcgcactgagttctctttggcttgctaggccacgagagtaacatcacccccgttggggtcactcgatgaactgatctgtgaatgtgggactgctggctgcaaactcgcaaagcatttgcagatgactggaggatcagtcctctctgtacaagttgtattaacatcttctggtctcatattgtgctccagtgttgtacaatttagggaaaagcttggattaacttgtaagttatcatgaatttgttattggcatattgtacaattgtattagcaataaaaatagaagtacataagtgctggaagcctggaaggatatccagaatctatattggttggaaacgagcagcagaagattgttatagattgttatgttgctttgaatattcggttgtaagtgccttttttggggtatatagaacaaagaaagattcaggag

SEQ ID NO: 1341 - DNA, 1523 bp, Zea mays
  Clone ID: 700150887_FLI
caatactatctgaagactggcacatgcaagtttggagcaacttgcaagtttcatcatccccgagaaaaggctgcaatggcaactcgagttcagctgaatgaactgggctacccactccgcctgaatgaaaaggaatgtgcttattatttaagaacagggcagtgcaagtttggaagcacatgtaagtttcaccatccacaaccatccactatgatggttgccgtacgtggctctgtttattcacctggacagtctgcaacttctcctggccatcatgcttaccagggggctgtaacaagctggcccttgtcgagatctgcttctttcattgcaagtccaaggtggccaggtcattcaagttatgcacaagttattgttcctcctgggcttgttcaggtcccagggtggagtccttatgctgcgcagattggttcttcatcctcggatgaccaacaacggacacctggagctgcccaatactatactggctcacgccagagtggaacacctggcataggcgatcgaggaatgttttcatcctaccaagcaggttctgttcccgttggactttatgcagtacagacggagaatgtatttccagagagacctgaccaacctgaatgtcagttctatatgaagaccggagactgtaagtttggttctgtatgcaagttccatcatcccagggagcgaataattcctactcccaattgtgcactaagtccattaggcctacctttgcgcccgggagaaccaatatgcagtttctataatcgctatggcatgtgcaagtttggtccaaattgcaaatttcatcatccgatgggaaaccctatgtatggccatgcttcatcaccgacaagtgaggcccaaacatctcggcgtatgctggcacatgtaccatcgcatccagaagtatcacctgacagtggctcgggaaggtctaggaggattgttcattcagattcccagcaaataccctctgttgaaaggatcaccgagagagaggcgtcctaagccatcctcggtgtcttcgttcatgctgcctcccctcccctcccctcccattcttgacgagtaattaaatgcaacaacatctgagaatccgaagctgtacaggtcttttgcctcatctttgagctttacataccggagcttgcttcaacatgtattgcatccaggcatgaaaaagttcttgccggttcgggatgctcatttgcccccataaaaacgggaacaaacctaccttatttaaacatatgtatgaaactcactcacctctggacattcaaacccattcgagtaatggtcccggtgttgtagtttatagagctgtgtttcagtggacaaacctttgcgaaactgactggggatgcgcaagcatagcctcctttattaattattatctcgtttttttcctagcatctctcttttcataagggcaacccaaagtgttggaataatagattgccaccataatgctctgtattacccaccatatttaaacctggttacttgtgagt

SEQ ID NO: 1342 - DNA, 1792 bp, Zea mays
  Clone ID: 700150895_FLI
ctgtctagagtacaagtgagtagttaagcaagtgcctgtaaaccaagcttgcttgcgacttgcgagacaacacacaacacaacagccatggcagtggtagacaggtgggcgggcctgggttcggcgctcgcgagcttcctcttcctctggtccatggtgcagagacacgtgcctgtcaccatcagccaccgcgtcgccacctgggccaacaagctcgtctcctacttcaacccctacgtcgagatcaccatctccgagtacggcgccgagcgcttccgccgcagcgacttcttcctcgccgccgaggcctacctgtccgacgcctgcgcgccccgcgcccgcaagctcaaggccgagctcggcagggacagcagcaacctccaggtctccgtcggcgacaacgacgaggtcaccgacgccttccagggagccacggtctggtggtacgtcgtcaagaagttgcccaggtccaacgtcatcagcttgtacgccaaccaagacgacccgcgcacctaccgggtcgtcttccacaggcgccaccgcgacctcgtcgtcggcaagtacctgccccacgtcctcaaggaaggacgcgccgtcaccgtccgcaaccgccagcgccgcctcttcaccaacaaccccagcggcggcggccgtgggaggggcgacgtctggagccacgtcccgttcgagcacccgtctacgttcgacacgctcgccatggatcccgacgacaaggaggctgtcgtcgacgacctggaggcgttccgggaggccaaggactactacaccaaggtcggcaaggcgtggaagcgagggtacctgctctatggtcccccgggcaccggcaagtccaccatgatcgcggccatggctaacttgctcgactacgacgtctacgacctcgaactcacggcggtcaacaacaacaccgacctgcggaagctattcatcgagaccaccgggaaatccatcgtcgtcgtcgaggacatcgactgctccgtcgacctcaccggcaagcgcaaggacaagaaatccgaacgcgaggccgacgacaagcccaagctgccgatggagcctgacaaggacgaaggcagcaagattacgctttcagggatgctcaacttcatcgacggcctgtggtcggcatgcggcggcgagcgcatcatcatcttcaccaccaaccataaggacaagctggaaccggcgctgatacggcgaggcaggatggacaggcacatcgagatgtcctactgccgcttcccggcttcaaggtgctcgccaagaactacctggacgtcgaggagcacgagctattcgaccagatagggcagctgctcgaggagaccgacatgtcgccggcagatgtggcagagaacctgatgtccatgtccaagaagaagaagagggacgccaacgcgtgcttggagagtcttgtgaaggctctgaagcaggccaaggaggaggcggccaaggcgaaggtggaagcagaggcaaagaagaaggtagaggcggcggccgaggcagcaacgtccaaagaggaagacgaggcaaagaaaggcagcggataagacgaaggcgacaaaacttcagaatcgatgagcaacgtacgaacgcaaatcaaaagagatgacaaatgacaagtctaggctcgtgattctaataggagtcatcattaaaaaggcttaaattgtagaatcattgaaattaaggaacaatgtacactgtctctggaaatttgttgcaactcttccacttgcctataggttggtaatggatatataaatgtttattc

SEQ ID NO: 1343 - DNA, 861 bp, Zea mays
  Clone ID: 700150896_FLI
aaggtgatgataagaaagaggaggagccccctgcagagaaaactgttgagaaagaggtggtccctgctgtagatgcagcagagaatactgaacaaagcaccggtgggcaagcacagcctaacgatgttgctgccccagaatctgagaataaaggagacggcaagccagctgaatccgaatcagctccccttgcatttgttgatgaagcagcgccccatgtaatcgttggtgaagagaaaactgaggacagtcaggcagctgaatctgcggtgccttccctggcgtcttcagagggagagaagaaagagaacggtggtgccactgaaccagcagcacctcctccagctgatgcagacaagggcgcggagaattcaggccaggtgaacaccgccccccaagaaccgacggcagcgaactgcgacaaggggcagatccaacctggtgcctctgctgtcaggtgcacataagggagcttggtctccgatgagagaccgttgctttgtgtgtttagggcaatacctcgcatttgctttgagaattataatcgtggttaacctgacaggacagcgctgtgcagcactaggctgcccagcacgtagttatctttccgttttttttatggcggcagggacaaatgcgtgtacccggttcaaagtgtaactcgtcattagcgtgctgaacattgatctctggagcggactggaggacgtagtactgtctccgactgttgtaacgtgacgttgtttgtgttgttgccttgtgttattgaacttattatgatccataaataaaagccataagcgtggcaggggccattccctgaccaccttcaggcaccagatgcatctgtttgttggccgc

SEQ ID NO: 1344 - DNA, 937 bp, Zea mays
  Clone ID: 700150907_FLI
ctccttctccatcccacgcgcgcgcaggccaaggccggatcggcggcctctcagatctcgccggccgccgtgagacagagaccgaagggggggttgaccggtgctcgggaggaagatgtttagcgggacgcagcagaagtgcaaggtgtgcaccaagacggtgtacccgatggaccagctctccaccgacggcgtcgtcttccaccgctcctgcttcaagtgccagcactgcaagtctaccctctcactgagcaactattcctcgttcgaaggagtgccgtactgcaagacccatttcgagcagctgttcaaggagaccgggagttacaacaagagcttccaatcacagtcacctgcaaagattactccggaaaagttggcccctgagctgaccagatcaccaagcaaagctgcaaggatgttttcaggaacacaagacaagtgtgcgacttgtggtaaaactgcgtatcctcttgagaaggtaacagtcgaagagaagtcctaccataagtcatgcttcaaatgctcccacgggggctgcgcgattacaccttccaactatgcagccttggagggcatcctctactgcaaacaccatttctcccaacttttcaaggagaagggaagctacaaccacttgatcaagtgcgcgtccgtcaagcgcgctgctgaagcacagccagaacaaccggcctctgattcctcctcctgaccacgccatttaaacagtgggggtttggaggcgagagagttgggaagcctcctgtttctacttaaaaccgcgtgatgtatgttattccatctatgccccgaggatactagactactactctattttggtatcctctgctgtgctagctggatcatatcagcgaaccatggaattgctgtcattttcaatgaaactgttgtgcatcaagtagtgaaatcttcactg

SEQ ID NO: 1345 - DNA, 939 bp, Zea mays
  Clone ID: 700150942_FLI
cgcagttcccccgcgcccgagacgcaaccccgcgccaggagtaagtttgttcttttatcgatattatcgatatggcgagggaggagaatgtctacatggccaagctggctgagcaggccgaaagaaggaggagtcccgtaagaacgaagagcatgtgaaccttatcaaggaataccgtgcgaagatcgaggctgaactgagcaatatctgtgatggcatcctgaagctgcttgactcccacctagtgccttcttctactgctgctgaatcaaaggtcttctacctcaagatgaagggtgactatcacaggtatcttgcggaatttaagactggtcctgagaggaaggaatctgctgagagcacgatgatggcctacaaggctgctcaggacattgcgctggctgagctggcacctacccatccgataaggcttgggcttgctcttaacttctcagtgttctattatgagattctgaactccccagacaaagcttgcaaccttgcaaagcaggcgtttgatgaagctatctcccagttagacacccttggggaggagtcatacaaagatagcactctgatcatgcagctccttagggacaacttgaccctttggacctctgacctcacggaggatggtgctgatgagggcaaagaagccccgaaaggtgaggctggtgacggacagtaatcttgggagagcgcatattgttcgagcccattgttttagatgctctatgctgtcgaagctgaagctgtgccgtgctattattgtagctgatttcctgttccctcacttctttttttatattagtaggctggtagtgttcgaattagttccccattgctttgtgttgccgctagttggcattaagtccgtgtggactggtattattcactggatttgagaagcatgtcagtggttgctctagcgttttattg

SEQ ID NO: 1346 - DNA, 1580 bp, Zea mays
  Clone ID: 700150972_FLI
gctctgccggccagcctagtgctctcggctttctttcatctccctccttttgccacttgctgtagctttaatttgcctggcactttgcacgttgtggccggccggggcctgtgcttccattggtcggcagcaagcaagcaaggctagctagcgtccgtggatcagtcatgggcagccagaggcagaggcaccgagcggtcactggcctcccggcggcgggcgcgcggatgctggccctgctgtgcgcgtcgtcgtgggtgctggtgctcgcgacggcgcagaactacagcgccatcttcaacttcggcgactcgatcaccgacaccggcaacctgtgcaccagcggcaggccgtcgcagatcaccttcacgcagcccccctacggcgagacctacttcggcacgccgacgtgccgctgctccgacggccgcgtcgtcgtcgacttcttgagcacccagttcgggctgccgttcctgccgccgtccaagtcgagcagcgcggacttcaggcagggcgccaacatggcgatcacgggcgccacggccatggacgcccccttcttccgctcgctcgggctctccgacaagatctggaacaacgggcccatcagctttcagctgcagtggttccagcagatcgccacctccgtctgcggacagagctgcaagagctacctgggcaactccctgttcgtgttcggcgagttcggcggcaacgactacaacgccatgatcttcggcggctactccatcgagcaggccaggaaatacgtccccaagatcgtcaacaccatctcgaggggcatcgataaactgatcggcatgggcgcgaccgacatcgtcgtccccggggtgcttcccatcgggtgcttccccatctatctgaccatctaccagagctccaacggcagcgactacgacagtctcggctgcctcaacagcttcaacgacctgtccacgtaccacaacgccctgctccagaagagggtggacgtcatccagagccggcacaggaagacggcgcgcatcatgtacgccgacttctactccgccgtctacgacatggtccgcaacccacagagctacgggttcagctcggtgttcgagacgtgctgcggatcaggcggcggcaagtacaactaccagaacagcgcgcggtgcggcatggcgggcgccgccgcgtgctctagcccggcgtcgcacctcagctgggacggcatccacctcaccgaggccgcgtacaagcacatcaccgacgcctggctcagggggccgtactgccgcccgcccatcctgcacaactaatcctcagtgcatatggacacgctggaccggaggccggcagcgcgttgtcttttttataaataatttatttattattcgtacaagctttggttggatccatcgcggcgggggttattaattatagcattggttggtcctttcgttatatttgaccatatttttttttgtgttcggggtaaggtgtttattatattttgcgttgctcaagaaaaagagctgacgatggcaaagtgtacgtggaatacgatgataatgccatgattatttatagtcctt

SEQ ID NO: 1347 - DNA, 1174 bp, Zea mays
  Clone ID: 700151076_FLI
cgaagaaagaagtatgaataaaacaaaatttgaagacgcctaacagcccgactgcttcgtttccacgcgcacgaaaccctagactagataaaaagttcccatttccctcaattccccaacttccctcgccgcaatctctcgccgcctccagtccagagccaccgtgagatctgcccgattccgccgcccggacccggggactccctcccctcctcgatccgttcgggcggccggccggcctagcttcaagtgcggggatggtgttctacttcaaggcgcggcccgaggccggcgactataccatcttcatgggtcttgacaagtacgagaacgaggacctcatcaaatacggcttccccgaggacatctggttccatgtagataagatgtcctctgcacatgtgtatgtgagattgaataaaggtcaatcaatggatgacatgagtgagggtttgctggaagactgtgcgcagcttgtcaaagctaattccattcaaggtaataaagtcaataacattgatgtagtttatactccatggtacaatttgaagaagaccccttcaatggatgtaggccaagttggttttcacaaccctaaattggttcgcactattaaagtggaaaagaggatcaatgagattgtgaaccgcttgaataagacaaaggtggaacggaaacctgatttaaaggctgaaagagaggctattagtgctgctgaaaaggcagaaagaaaggcacagcttagagacaagaaacgtagggaagagatggagaggcttgagaaagagaagcaggctgatatcaggagctacaagggtctaatggtccaagagaagatgacttccaacaagcaaatcgcttctggcagcaagaccctgcaggaacttgaagaagactttatgtgagaggcggacattataaatgccatgctgaagatttccttgaactgcttctgtcgaagacagaaggggtaccacaggcttgtgagatactggatgactcatgggcaggccatggtctgttattatctcctcttgctgttgtggtctatgtaaaccttgtttacttgctgaaaaaacaacggtgcatgctctaactgtggttgatgtaatggtctgttgcccatcaagttgaaatggtaatggaattatggtttcctggatttttttcaaac

SEQ ID NO: 1348 - DNA, 801 bp, Zea mays
  Clone ID: 700151077_FLI
ggcgctcgcgcggctttctttcccaactccgacgaaggctagctacaccaccttgtgcgggctcgtcttcatctgccgccacccgctccgtcgtcgtcgtccccgccgcgccgatcccgaatcgaatggggagcctggcgtccgagaggaaggtggtcgggtgggccgccagggacgccaccggacacctctccccctactcctacaccctcaggaacacaggccctgaagatgtggtggtgaaggtgctctactgcgggatctgccacacggacatccaccaggccaagaaccacctcggggcttcaaagtatcctatggtccctgggcacgaggtggtcggcgaggtggtggaggtcgggcccgaggtggccaagtacggcgtcggcgacgtggtaggcgtcggggtgatcgttgggtgctgccgcgagtgcagcccctgcaaggccaacgttgagcagtactgcaacaagaagatctggtcatacaacgacgtctacactgatggacggcccacgcagggtggattcgcctccaccatggtcgtcgaccagaagtttgtggtgaagatcccggcgggtctggctccggagcaagcggcgccgctgctgtgcgctggcgtgacggtgtacagcccgctgaagcactttgggctgacgaccccgggcctccgtggcggcatcctgggcctcggcggcgtgggccacatgggcgtgaaggtagccaaggccatgggccaccacgtgacggtgatcagctcgtcgtccaagaagcgcgcggaggcaatggaccacctcggcg

SEQ ID NO: 1349 - DNA, 2276 bp, Zea mays
  Clone ID: 700151120_FLI
ggatagtttgcgtcagctaccagcagatctttgtagaaaaccaaaggaacagaacaggctagcgtggcctaagctgcagctgtcagcgtcgccgtcgccgccgccgccgccgcgatgatcaccgggcgggacatctacgacgttcttgcggcgatcgtgccgctgtacgtggccatgttcctggcgtacgggtcggtgcggtggtgggccatcttcaccccggaccagtgctccggcatcaaccgcttcgtggccgtcttcgccgtgccgctgctctccttccacttcatctccagctgcgacccctacgcgatgcagtaccggttcctggcggccgactcgctgcagaagctggtcatcctggcggcgctggccgtgtggcacaacgtgctctcccgctaccgcaggggcgcggcggcgtcgtcgctggactggaccatcacgctcttctcgctgtccacgctgcccaacacgctggtgatgggcatcccgctgctccgcgccatgtacggcgacttctcgggcaacctcatggtgcagatcgtggtgctgcagagcgtcatctggtacacgctcatgctcttcctcttcgagtaccgcggcgccaaggcgctcatctccgagcagttcccgcccgacgtcggcgccagcatcgcctccttcagggtcgactccgacgtcgtctccctcaacggccgcgaggcgctgcaggcggacgccgaggtcggcagcgacggccgcgtccacgtcgtcatccgccgctccgcctccgcgtccaccacgggcggcggccacggcgccgcgcgctccggcgccgggtaccgcccctacggcccgtcctcggccatgaccccgcgcgcctccaacctcaccggcgtcgagatctactcgctgcagacctcgcgggagcccacgccccgcggctccagcttcaaccagtccgacttctacgccatgttcaacgggagcaagatggccagcccgctggcgcagcccggcgccgcacgcgcgccggggctcgacgagcaggtggccaacaagttcgcgtctgggaagggtggcgacgccgcggcgtaccccgcgcccaaccccggcatgatgccaccgccacggaagaaggagctgggcggctccaactccaactccaacaaggagctgcacatgttcgtatggagctccagcgcgtcgcccgtgtcggaggccaacctccgcaacgccgtcaaccacgccgcctccaccgacttcgccgccgcgccaccaccgtcgatgccggtcgacggcgccaccccaaaaggcgtgagtgggactgtcacgccggccaagaagccggaccccgcggccaacggcggggacctggagatcgaggacggcctcaagagccccgcgacggggctggccgccaagttccccgtgtcgggctcgccgtacgtggccccgcgcaagaagggcgccgacgcgccggggctggaggaggccgcgcacccgatgccgccggcgagcgtgatgacgcgcctcatcctcatcatggtgtggaggaagctgatcaggaaccccaacacctactccagcctcatcggcctcgtctggtccctcgtctcgttcaggtttaacatccagatgccctcgattataaagggatcgatatctatattatccgacgcagggctaggcatggccatgttcagcttaggtctgttcatggctctgcaaccgaagctcatctcctgcggtaagagggtggcgacgttcgccatggccgtgaggtttttgaccggcccggccgtgatcgccgccacctccatcgccattgggctccggggagtgctcctgcacgtcgccatcgttcaggctgcacttccacaaggcatcgtccccttcgtgtttgccaaggagtacaactgccatcctcaaatacttagcacagcggttatattcgggatgctgatcgcgcttccgatcacgatactctactacattcttcttggaatttagatttctgggtaggcagagccgctaggattctaggaatgtagcagcgaacgcatgcaaagtgaagcaaattggatatcctgaagaccatcggagcagagaaataggggaagctaataggaccctagacagaaatgcagatgagggtgaaaaaaaaaatccttgattctatatattttttttgcattttctgttaccgttttagattcaaagcaaagtttagagctttgagcatggaggattgaaccgttaaccgggcaacttggtactaaagattcctaccagtt

SEQ ID NO: 1350 - DNA, 1864 bp, Zea mays
  Clone ID: 700151128_FLI
gccaacaactctcgcgagggcgccgtccgcctccgcctccgtctcggggagcgatgacgatcgcgcgacgcctgctccgatccaatgcctccgcccaggcaatcagcttactgaagcatgtaactggcactgcaagtttgcaaggccatgcacatagtccgttggatgcgtcagtcagacattttagttcagctccatctgcccagtctgacacaactgaagaaaatgggttcaagggccatggcatgttggcaccttttacagctggctggcagagcaatgatttgcatcctctaattattgagagatctgagggttcctatgtttatgacatcaatgggaataaatacctggattctcttgcagggttatggtgcacagctttaggtggtagcgagcctcgattagtcaaggcagcaactgagcaattaaacaatttgcccttctaccattccttttggaaccgcacaaccaaaccttcattggaccttgcacaggagatccttagcatgttcactgcaagggaaatgggaaaagttttcttcacaaacagtggttcagaagcaaatgactctcaggtcaaactagtatggtattataacaacgcattggggaggccagacaagaagaaatttattgcacgatcaaaagcataccatggatctacactgatatcagcgagcctaactggtcttcctgccctgcaccagaagtttgatctaccagcaccttttgttctgcacactgactgccctcactactggcgatatcatcttcctggtgagacggaagaagaatttgcgactagacttgccaccaatttagagaatcttattctcaaagaaggaccagaaacaatcgctgctttcattgctgaacctgtgatgggtgccggtggtgtcatccctcctccaaagacctattttgacaaggtcatcactgcatttggaaggttgggaactatgtttggatgcgattattataacatcaagccagatctagtttccttggccaaggctctttcaaatgcctatgtacccatcggggcaactcttgttagcccagagatatcagaggtgattcactcccagagcaataagctcggctcatttgctcatgggtttacatactctggtcatccagttgcctgtgcagtggcaatagaagctttgaaactttaccgcgaaagggatattcctggtcatgtcaagcaaatcgctccaaagttccaggacggaattagggcgttggcagacagcccaatcatcggggagatacgtggcttagggatgattatgggaaccgaattcaccaacaacaaatcaccggctgatctattccctgccgaatggggggttggtgccatctttggagaggagtgccagaagcgcggcatgctggtcagggttgctggcgacgccatcatgatgtcgcccacgctgatcatgacgcccggcgaggtcgacgagctggtgagcatctacggggaagccctcagggccacggaggagagggtgtcagacctgaagatgaaatccgagaagaactaaccaaaagggcgaggacgacgacgataacgcctggcggcaacggtagcagctgatgtacaggtgaataaaatggtcgtgactgcgagatggcaataatgcgcgggaatggtcgacggtcgtctctgatcttggagtgcaaggtcaagctgctcggtcgctaaacaacggtggctgaacttttaaacgggacatagatgtttttttccctaagcaatggcagtatctcaaatgtttgctgccctgtagtttctgaacataaagggttagcagacgttataaaatttaaattttatcgtaaaacagttgttattctc

SEQ ID NO: 1351 - DNA, 1383 bp, Zea mays
  Clone ID: 700151146_FLI
cgaaacgtggccaatgtatgctgtgtacaattctctccatactcctcccgcatgctagcttttggttcagctgattacaaaatatactgttatgatctgaggaacacaaggataccttggtgtactatttcgggacatggaaaggctgtcagttatgtaaggttcttggatccagaaacacttatctctgcatcaaccgacaacacattgaagatatgggatcttaaccagactaattgcagtggattatctgctgattcttgcagcctgactctgaatggtcatagcaacgagaaggtatgagaaggttttatgtactgcatgtttgttttcttacattaagttgtttgtgggattaatgtgaatctcactaattgcttgtgcagaattttgtagggctatctgttcatgatggatacataacttgtggctctgaaaccaatgaagtgttttcttactacaaagatttccccatgccaataacttctcataggtttggttccattgacccgataactggacaagtgacaaatgaagacaaccagcagtttgtgtcgagtgtttgctggagagggaagtcaaacatggtagtggctgccaactccagtggcagcatcaaagtgcttgagcttgtgtgaatgatccaacgagagtgtcatattggagagaagaaggttctagggttgccatgcgggcctgtgatgctctcgtgccctcggtgatgctccaatggccctgcttatccggtgtctgcatcctcaatggaagcactaagcgaactgggtacctcttctaggtctgcatttcactgttttgccagggcactaaaagatgcgactgctctgtgcaagcaacctacagcaccgatcattggtcattattggaagctttgcttgaaactcccaagcgaaccaaagaaaaataaaataaaatcaagagtatgttgtgtttggaaatctctggcattttggcacggtaccttattcatcatcgtaaggagggccccaggtctgtacagaattagggggccatggggctgatgaaatagaacatgtgatgcatgcaaacttcttttgggctagagaggctgacggacgccgtggcgccttactgaatcagttgggaatttaactcagttttgatgtgcgccggacttgccatgactgttaagagcgaacgatggagagaaagaaatgatcctgtagctcgaagaagttaatcgtgccgtgtgaatgtttcaaggagaatgtgtgtagtaattttctttctacctcccttcattattgtacatatgtttagggctgcctaatggaaggccttgtaactagagtagagatgctcaaaagactcggtcatgagttcagtataatgaatgatcttctc

SEQ ID NO: 1352 - DNA, 892 bp, Zea mays
  Clone ID: 700151154_FLI
cgcctcaaatcgctccctgcctctggtcacctcgcttccgctcccggctcccctccggccacccagacatcgtccgttcgctcgccaagagacaggaccggagaccatggcggaccagctcaccgacgaccagatcgccgagttcaaggaggccttcagcctcttcgacaaggacggcgacggttgcatcacaaccaaggagctcggaactgtcatgcgatcactgggtcagaacccaaccgaggctgagctccaggacatgatcaacgaggtcgatgcggacggcaacggcaccatcgacttcccggagttcctcaacctcatggcccgcaagatgaaggacaccgactccgaggaggagctcaaggaggcgttcagggtgttcgacaaggaccagaacggcttcatctctgcggcggagctccgccacgtgatgaccaacctcggcgagaagctgaccgacgaggaggtcgatgagatgatccgcgaggccgacgtcgatggcgatggtcagatcaactacgaggagttcgtcaaggtcatgatggccaagtgagtaaagcctgcggtaacggtatactaccccgcgggaattgaaggaggaaaccaaaccgtgcatcgcatattagaaaggcaatgcaggtcttgtttccttcgtcttccccatgaagaaaccgtactagctgtagctgctgaacgtttgagtcctcctgctgccacccttatctccatttgtgtcatcgaaactccttgcttcccctgctgtgtgaatctgtacggctttgcgtgttctggacactgattgcagttggatccagtttgtagttatatttgttcatcgaatctgcccagactcctttggtaccattcaacaggctgctgctttctgttt

SEQ ID NO: 1353 - DNA, 1367 bp, Zea mays
  Clone ID: 700151216_FLI
atctcccatcacttcctagctagtccttcttactcaacacattattcgatcttgagtggaagcaagcaggcagacatggcggcggctactgcaccaaagacgatgccgtcgtccgttttcgccgccgcactgctgctcctagccgcggcggcgtgccaggccagcccttactaccctctggagctagggtactaccgttacacttgtccccaggctgaggctatcgtcaaggccagcatggagaaggccatcgcccagaaccctggcaatggcgccgccgtcatccgcatgctgttccatgactgcttcgtcgagggctgcgacgcttccgtgcttctcgacccgaccccgttcagcccgacgccggagaagctggccgcgcccaacaacccgagcctgcgcgggttcgagctgatcgacgccatcaaggacgccctcgaggccgcgtgccccggggtcgtctcctgcgccgacatcatcgccttcgcggcgcgcgacgcgtcctgcttcctgagccagggcaaggtctccttcgacatgccgtcgggccgcctcgacggcaccttctccaacgcctccgagtcggtcaagttcctcgtcccgcccacgtccaacctcagcgacctcgcctccagcttcgccgtcaagggcatgtcgctggaggacctggtcgtcctctccggggcgcacaccgtcggccgctcccactgctcctccttcgtctccgaccgcctcgacgtcccctccgacatcaaccctgcgctagccgccttcctcaggacccgctgcccggccaacacgacgaccagcgacgaccccaccgtgatgcaggacgtggtcacgcccaacgccatggacaaccagtactacaagaatgtgctctcgcacaccgtgctcttcacctccgacgccgcgctcctcacgtcgccggagacggccaagttggtgctggacaacgccaagatccccgggtggtgggaggacaagttcgagaaggccatggtgaagatggccagcctcgaagtcaagactgggcaccaaggacaggtcaggaagaactgcagggcgatcaatcactactagctaacagctggttgttgatcagcttgcaccactgcaatgtggaagaccttcagaaaagaaaaactgcacagtacgggtgatggatggtgaaggatcaatcggttcagttgtgttggtgtttaatttgttcatgacctgcaagcgtgtggttgttgtatgatatggcaactgttgttattatctttccatttgcctttgatttgttgaaaacctggagaggtttgtatctgttattattctttggtttgtgtttctatatttggattatcaataaagttgaatat

SEQ ID NO: 1354 - DNA, 313 bp, Zea mays
  Clone ID: 700151223_FLI
ggagctctctatcctctgcgacgcggaggttggcctcatcatcttctccagcaccggcaggctctacgatttctccaacaccaacatgaaagctgtgatagaccgatatgggaaggcaaaagacgagcagcttggcaagaacgatgcaacttcagaactcatggtacggtgaggaaaatgtatacctatttctagctaactagcagttattggtcgtagtacacacgtgccatatgatgtatgttggtcggaccaagatcagaagtttagtccttcattactcacaaataatgacaatttgttgtgtttagct

SEQ ID NO: 1355 - DNA, 1818 bp, Zea mays
  Clone ID: 700151231_FLI
cgttccctacaccctactccctccgtcagccagcgaagttccttcagtcactcaacaccttacgtccctagccatcctccgccgcctccgtctctgcttccctagagccgtcgcgatggcagcagcccctgccggtgcccctgcaatcaccgcatcctcctcctttgtttcttcgtctccgttctgtctcaaggcatcgatgaccagccagcgccgacccgcggggagagtctccatcgtcatccgctgcgtcagtagcccaccggccgtcgacacattgctgtgcacggatagctaatggatatacaaatacggattttctcaattactattacaaaaaatgtcggtaatgaatatttcttcggatattggctttcaagactaatgtcccgcgcaatgctaatatggccaaactccaagcaggatatttgtttcctgagattgccaggagaagagccgctcatttgctgaagtttccagatgccaaaattataagccttggaataggcgacactaccgagcccattccaaatgtcataacaaatgccatggcagagagagcacataccttgtcaacaattgatggctactccggttatggagctgagcaaggtgaaaagaaactcagagcagcaattgctgcaacctactatgcggaccttggtattgaagattcagacatatttgtctctgatggtgccaaatgtgacatatctcgcttgcaggtcctttttggatctaatgtgacaattgcggtccaagatccatcataccctgcatatgttgattcaagtgttatcatggggcaaactgacttatatcagcaagacgttcagaagtatggaaacattgagtacatgagatgcggtccagaaaatggattttttcctgatctgtcaactgtccctaggacagatattattttcttttgttcacccaacaatcctactggtgctgctgcatctcgggaccaactaaccaaattagtaaaatttgcaaaggacaatgggtccatcatagtctatgattctgcttatgcaatgtacatatcagatgacagcccaaagtctatctttgaaattcctggagcaaaggaggttgctattgagacagcctcattctcgaaatacgctgggttcactggtgtccgtctaggttggactgttgtccccaaggagctccttttctcggatggacatccagttgctaaagatttcaatcgcatagtttgcacttgcttcaatggtgcatcaaacattgcgcaagctggtggtttagcctgcctctctccagacggtctaaaggctatgcaagatgttgttggcttctacaaggagaacactgaaataatcgttgagacatttacatcactcggattcaacgtgtatggcgccaagaacgctccatacgtatgggtgcacttccctggccgcaattcgtgggatgtgttcgctgagatcctggagaaggccaatgtggtcactactcctggcactggatttggaccgggtggcgaaggctttgtgagggtcagcgcgttcgggcacagagagaacatcattgaagccgcaaggaggttaaagcagctgtataagtgagcaccgatgcagcttctgtgccctcctagacagatgtatcaataagaacacatcagggcaccaaaaaggcaaaaaaacgcttggtgaagctgccagaaaatgttagtttttttttaaaattctcgtgtggtgtccacattcaaaccatttcgaactctagacagtgcttgttgtaatcctgagacccttcattcactggtgaagttgtgattgtcttgtc

SEQ ID NO: 1356 - DNA, 698 bp, Zea mays
  Clone ID: 700151235_FLI
cagaaacgagagggccggagcagccgcagtcccggcgatcccgccgccggtcgccctcatacttcctcgtcactgccttcgtttctctttccaacaatcaagatgagccgtggcggtagcgcgggtggtggtcaaagttctctgggttacctctttggaagcggtgagccccccaaaccagcagtggcaccagctgtaagtgctccacctgctgctgcaggtgctccacctgctgagaaaccacctgctgcaaagcctgatggcaccagtcagattgctgctggggttaccagccaaaccaataactaccacagggccgacggtcagaacaccggaaacttccttacggaccgtccttcgaccaaggtccacgctgctcctggcggtggctcttccctgggatacctgtttggtggcaactgatgccgctcaccaagctatcaccccccactgtcgccgcatgctttttctgaatcgtgaacagccgttgtcatttcatgtgtacccaaacctcccgtcccgcgtgggcccgtaagctgcgcctagatttcagggctaatcgtgtgcctgaaccctcatcataagtcgtctctgtacccagcttctcgtttcgtttgcacccgtgatggtatggtttggttgttgcccgctggacctatctattctttgcatttttcctttgaaatgtatccttgccc

SEQ ID NO: 1357 - DNA, 723 bp, Zea mays
  Clone ID: 700151309_FLI
gtgacggttgctctagatccgttcatcctggtggttttgtgaggtcgaaagcggcgagcgaattagaagatgctggacaagctgtgggacgacgtggtggccgggcctcgcccggagacgggcctcgagaagctccgcaaggccaccaccgcccgcccgctcgtcatcaacaaagacgcggacggcggcagctacaagcgggcgcagtcgacgccgtcgaccccgacgacgccggtgacgccgtcgtcgtcgacgacgccgcgcggcgccggcaacgtgtggcgcagcgtcttccacccggggagcaacctggccaccaagggcatgggcgccaacctcttcgaccggccgcagcccaactcccccaccgtctacgactggctctacagcgacgagaccaggagcaaccaccgctagatcgggcgagatggatggacagtgaagaggccatgtttgctggtccttgtggttatctaaaacgcacgcatgctctattatagctagtcatcactatatatatacttgtgtttgtgtattgttgttcttgttctgctggtgtctccgccgtttaatttgacctatgttatggagtgagtgatatatgtgccgtcactcctagtatatagtagtgagtgactagttggtatgtgtagtactgtactatcttttctccatatgcatgttttgccagcgcgtaatgaatgtaatgtcagtactgctaat

SEQ ID NO: 1358 - DNA, 911 bp, Zea mays
  Clone ID: 700151333_FLI
tcgaaaaagccgccgtcccgtcgagcaacagggcgagcggcggcgggaacggcaacactaagctggaggacgggtacaactggcgcaagtacgggcagaagcaggtgaaggggagcgagaacccgcgcagctactacaagtgcacgtaccacagctgctccatgaagaagaaggtggagagggccctggccgacggccgcatcacgcagatcgtgtacaagggcgcgcacaaccaccccaagccgctgtccacgcgccgcaactcatccggaggtggtgcggcggcggaggagctgcaggccggcaacagcagcctctcggccgcagcggcggccggctgtactggaccggagcactccggcgccaccgccgagaactcgtctgtcaccttcggcgacgacgaggcagagaacgggtcgcagcggagcgacggcgacgagcccgacgccaagcgctggaagcaggaggacggcgagaacgagggcagctctgcaggcgccggcggcaagccggtccgcgagccccggctggtggtccagacgctgagcgacatcgacatcctggacgacgggttccggtggcgcaagtacgggcagaaggtggtgaaggggaacccgaacccgcggagctactacaagtgcaccacggcggggtgcccggtgcggaagcacgtggagcgcgcgtcccacgacacgcgcgccgtgatcaccacgtacgagggcaagcacaaccacgacgtgcccgtgggccgcggcgccgccagccgagctgctgctgctgcggcggcgggttccggggccttgatggccaccggcggcggccagctcggctatcagcagcagcagcagcagcagccatacaccctggagatgctgagcagcggatcgtacggcggcggcggcggcggctac

SEQ ID NO: 1359 - DNA, 1415 bp, Zea mays
  Clone ID: 700151344_FLI
atttcaaattggtataccctcttcaaaattaatatctaaaaccctcttgaacactaagaggaggatttcattaagggggagttttgtttagtcaaatgaaaagcatttgaaacagggggagaaaatttcaaatcttgaaaatgcttctcaaaatcttattcatatacctttgactagttgcaaaagattttgaaaaagaatttccaaaacattgcaaaacaaaacaagtggtgcaagtgtggtccaaaattttaaataagaagaaagccatccttgcatatctagtagaaataattattggtttcattccaagcaacctttgcacttaccttatgcaaactagttcaattctgcaattttatatttgctttggtttgtgttggcatcaatcaccaaaaagggggagattgaaagggaaataggcttacaccttttcctaatgaattttggtggttgaattgcccaacacaaattaattggactaactagtttgctctatattatgagttctacaggtgccaaaggttcacaacaaaccaataaaaagaccaagaaagggttcaaataaaaagagcaaaagactactgaagtgtgccctggtctagcgcaccggacagtgtccggtgcaccagggaacccgactccgaacttgccaccttcgggaattcaaggagccgctccgctataattcaccggactgtccggtgtagcaccgaactgtccggtgtgccagcggagtaacggctacacagcgccaacggtcgactgcaacgctatagtgcaacgctacagtgcgcgcctgcgcgcgcagaagtcagagcagcaccagaaggcgcaccggactgtccagtggcccacctgtcagaagctccaacggtcagaacccaacggccgggtgacgtggctggcgcaccggacaatgtccgtggcgcgcagaacaatgtccggtgacgcaccggactgtccggtgctccttgcaacagcagcctcaaccaacggtcaacttggtggttggggctataaataccccccaaccaccacacttcaatgcatccaagttttcagccatcaaacctcatacaagagctatagacttcattcaagacacatacaaagagatcaaatcctctcccaagtccaaagatcattccaatcaaatagtgactagtgagagagagatacttgtgttcatttgagctcttgcgcttggattgcttttcttcttcctcttttcttgtgttcaattcacttgtaatcaaaacaagagacaccaagttgtggtggtccttgtagtggacttagtgtcccatttgattgaagagaaaggctcactcggtctaagtgaccgtttgagagagggaaagggttgaaagagacccggtctttgtgaccacctcaacaaggagtatgtttgc

SEQ ID NO: 1360 - DNA, 1934 bp, Zea mays
  Clone ID: 700151354_FLI
ggccggcgtcgtcgtcgaggaccactacggcgaggacagcgccaccgaggagctgcccatcctgccctgggccttctccgtcgcaagcggttacaccctcttgagggatccacatcacaacaagggtcttgctttcatggagaaggagagggatgcacaccacttgcgggggctgcttcctcctgcagttgtgcctcaagaactccaaattaagaagatcatgcacaacctgcggcagtaccaggtccctttgcagcgctatatggccatgatggaccttcaggagaggaacgagaggcttttctacaagcttttaattgataacgtggaggagctgcttcctgtggtttatacaccaactgtaggtgaggcctgccagaagtatgggtccatctttcgacaaccacagggtctgtatgtcagcttgagggacaaggggaaggtcctagaagttctaaggaactggccacataggaacattcaagttatctgtgttactgatggtgagcgaatcttgggacttggagatttgggttctcagggaatgggaattcctgtaggcaaacttgctctatacactgctcttggaggagttcgtccatcagcttgtttgcctatcacaatcgatgttggcacaaataatgagaaactgcttaatgatgagttttacattggactccggcaaaaacgtgcaactggcgaggagtatcatgagcttatggaagagttcatggctgctgttaagcaaatctacggcgagaaagtcctcattcagtttgaggacttcgcgaatcataatgcttttaatttgcttgcaaaatatagcaagagccatcttgttttcaatgatgacatccagggcacagcatcagtggtccttgcaggtttgttagcagcactcaaggtggttggtaggaccttggcagagcacacttatttattccttggtgctggggaggctggaactggtattgcagaactcattgctcttgagatttcaaaacagacgtcggctccaattgaagagtgccgcaagaagatttggttggtggactcaaagggtttgattgttgactctcgtaaaaactccgttcaatcattcaaaaaaccttgggcacatgagcatgagcccttgacaaccttgtacgatgctgttcagtccatcaaacctacagttctgattgggacgtctggagttggaagaacattcacaaaagaagttgttgaggccatggcttccttcaatgagaggcctatcatcttttcactgtcaaatccaacctctcattctgaatgtactgctgaagaagcatataactggactcagggtcgtgtaatatttgccagtggcagtccatttggccctgtggagtacgatgggaaggtttttgtacctggacagtcgaacaacgcctacattttccctggatttggcctcggtcttgttatctctggagccatccgtgtccacgaggacatgcttcttgccgcctcggaagcactagctgctcaggccacacaggagaacttcgacaagggatcaatcttcccgcccttcaccaacattagaaagatctctgcgcgcattgccgcagccgtggctgcaaaagcttatgaactcggtttggcgacccgtctgcctcccccaagggacctggtgaaatatgcacagagctgcatgtacactcctgtctaccgtaactaccggtagtgctgctgggatcaattctgcagtaataaaatatgtcgacgcagatgatcctgcaatgttgtagtttattttttcatttgttggccctgctgctgaccacctttgtggctgctagacactgtacctgtctatgcatatatgatactggaacatttggcgcgctgtgggcgtccctgtcatgagatcaattgcagaaataaaatgcaatttagatttgagcacc

SEQ ID NO: 1361 - DNA, 1535 bp, Zea mays
  Clone ID: 700151385_FLI
ccctgcgctgtcgccgtctgccgagcccgagcccggaaaaggggaaggcggctacgcaaacgcaaggcaccccaccccgttcaccgcagccgaatcaattaaaaagccggcggcgagaaggtgggttggggaatctgaagcgatcagagaaggcaagcttgcttgcttgcttctccaccgaatcccccatctcgcgccctccgtctctcgccgcggagactcgcccccccgctgatggaccagctcgtcaatttcatcatccgcccgcccagagctgactacagtccaaatgatgatctattagagcaggagtttatgctgaagggaagatggttcctgaggaaggatttggaggtaaaaaatggtcagggcaagaagttacaatgtagtcactacatgcctgttgtgattcctgaaggaaaagctcttccttgtgtcatatattgtcatggaaacagtgggtgcagggctgatgctagtgaagccgctattattcttctaccgtcaaacattacagtctttacactggacttttcagggtctggactctctgaaggagagcatgtcactttaggctggaatgaaagagaagatctcaaagctgtggttaactatttgcgaacagatgggaatgtatcttgcattggtttgtggggtcgctcaatgggtgcagtcacaagtctaatgtatggagcggaggatccatcgattgcgggaatggttcttgatagcccattctccaacttggttgacttaatgatggagctagtggacacatacaaatatccactgccaaaattcactgtcaaacttgcaatacagcatatgcgaaaaattgtcaagaggaaagctagtttcgacatcatggatcttgataccattcaggtagcaaaacaatgttttgttcctgctttgtttggacatgcaactgaggatgattttatacttccccatcattcagacaagatatatgaatcatatattggcgacaaaaacattataaaatttgatggggatcacaattcaccacgtcctcaattctactttgactcaatcactatatttttccataatgtgctaaaccctcctgaagtggcagaggatcattatttcatgacaccacatggtagccttggtcagggtcattgggatacagaacaagacatagagtatcggttctctcaatcacctacagggacagccaatgctactacaacagaagatgccattgcacagttgcgctctagaaggctcatgagtagaatggaggtcccatctggtgccaccaccgaagacaggactgatcgaactgagggtttcgatagtgatcttggtccctcttcatctagtgtatcaacagcaactcctcccaatggtcgcaacggaaggctgctgactccaacctctgatgatggcgagtatgtggagtactcatttgatagcttgtcagatatgcctcacaccgtggaagatgaagatagaatgctaatgcaagcaattcttgaatcactgaaagactatgaacagtcgaatac

SEQ ID NO: 1362 - DNA, 2222 bp, Zea mays
  Clone ID: 700151401_FLI
ataataagcaatataatactgatctagaatcgagttgttgtactcttcgcagataggttcgttccttcacatagaagcgagtacagactacagaccacacagtatcagctggcacaaaacgaaaatggttacttgcaaattgcatgcacgagctagaattatattcttctaatcttcttcgttgactttctggcttcagcaggcgcgtgatggcgctttcagcttcccgagttcagcaggcggaagaactgctgcaacgacctgctgagaggcagctgatgaggagccagcttgctgcagccgccaggagcatcaactggagctacgccctcttctggtccatttcagacactcaaccaggggtgctgacgtggacggacgggttctacaacggcgaggtgaagacgcggaagatctccaactccgtggagctgacatccgaccacctcgtcatgcagaggagcgaccagctccgggagctctacgaggccctgctgtcgggcgagggcgaccgccgcgctgcgcctgcgcggccggccggctcgctgtcgccggaggacctcggggacaccgagtggtattacgtggtctccatgacctacgccttccggccaggccaagggttgcccggcaggagtttcgcgagcgacgagcatgtctggctgtgcaacgcgcacctcgccggcagcaaagccttcccccgcgcgctcctggccaagagcgcgtccattcagtcaatcctctgcatcccggttatgggcggcgtgcttgagcttggtacaactgacacggtgccggaggccccggacttggtcagccgagcaaccgcggctttctgggagccgcagtgcccgacgtactcggaagagccgagctccagcccgtcaggacgagcaaacgagaccggcgaggccgcagcagacgacggcacgtttgcgttcgaggaactcgaccacaataatggcatggacatagaggcgatgaccgccgccgggggacacgggcaggaggaggagctaagactaagagaagccgaggccctgtcagacgacgcaagcctggagcacatcaccaaggagatcgaggagttctacagcctctgcgacgaaatggacctgcaggcgctaccactaccgctagaggacggctggaccgtggacgcgtccaatttcgaggtcccctgctcttccccgcagccagcgccgcctccggtggacagggctaccgctaacgtcgccgccgacgcctcaagggcacccgtctacggctctcgcgcgacgagtttcatggcttggacgaggtcctcgcagcagtcgtcgtgctccgacgacgcggcgcccgcagcagtagtgccggccatcgaggagccgcagagattgctgaagaaagtggtggccggcggcggtgcttgggagagctgtggcggcgcgacgggagcagcacaggaaatgagtggcactggcaccaagaaccacgtcatgtcggagcgaaagcgacgagagaagctcaacgagatgttcctcgtcctcaagtcactgcttccgtccattcacagggtgaacaaagcgtcgatcctcgccgaaacgatagcctacctcaaggagcttcagagaagggtgcaagagctggagtccagtagggaacctgcgtcgcgcccatccgaaacgacgacaaggctaataacaaggccctcccgtggcaataatgagagtgtgaggaaggaggtctgcgcgggctccaagaggaagagcccagagctcggcagagacgacgtggagcgccccccggtcctcatcatggacgccggcaccagcaacgtcaccgtcaccgtctcggacaaggacgtgctcctggaggtgcagtgccggtgggaggagctcctgatgacgcgagtgttcgacgccatcaagagcctccatttggacgtcctctcggttcaggcttcagcgccagatggcttcatggggcttaagatacgagctcagtttgctggctccggtgccgtcgtgccctggatgatcagcgaggctcttcgcaaagctatagggaagcggtgaaggggcagctggaaatttggacatcgacgggcatggaaggcttcatgggatcgaagcaaagatgtatttcttgtttctttagataacagacatgaatcggacctctatatcaacaattatattggcatgaatacttagactccagcccttaacacgtagaaactc

SEQ ID NO: 1363 - DNA, 1554 bp, Zea mays
  Clone ID: 700151403_FLI
cgacgatattggatgtccacggtgtgggctggaaaaactttagcaagattgcaagggatttggtgcgttgtatgcaaaaaatagatggtgactattatcctgagacattacatcaaatgtttattgtaaatgcgggacctggtttcaagctgatatggagcactgttaagggacttcttgaccccaaaacgtcatctaagatacatgttctaggaacaaaatatcaaagcagacttcttgaagctattgatgcaagccaattaccagagtactttggtggttcgtgcacatgttctaaccatggagggtgcctgaggtctaacaaaggcccctggagcgatccttcaatcatgaaacttgtacatagcatggagtcattgaaggaaattgggcaagtatctgatatagaagaaacagttacaggctccatgagattgcgtgctctcaagttaccagaacgaattagtgacacgtcaaatgctgaatcaggttcagatgttgatgatcttggatcccctgtggctcctgaagatgttgaatatcctagtttggccccagttcgagaggaagcgagggaatcaggatctacaacatatagtggttcaattggcatgtctcgtatggcagataaagttgtaggatccaacgggagatacaactctactggaaatgaaactaggcaggtcaatgcagaacaaggttccctgataaatgggggtttacttgcgcccggtcagcgtgccccaaatgatgctgtaggcaatgatgatgggttcttgaaatatatatcaagaagagtcgttgctatatttcttgaagtactctcttttttgcggttcttcattcgtcgacgacaacactcggaaaatgttcattcacatactgcaactgcacccagtagtctggcaaatcttcagacaattaaggaagatcgtgtaaatccttgtctggagcgtcttgatcgacttgagtcaatgtttaatcagctgagcaaaaagcctccagagcttccagaggacaaggaccgggccatacaagattcttttgacaggataaagtccattgagtttgatctgcagaagacaaagaaggtattgcatgcaacagttatcaaacaaatgcagatggcagaaaccttggaagctgtaacggagccggatcttaggcggaggaaattttgtacataatacacttacctgcagtgtacagaaacaagaaaagatggcgatttactaatgtctgctgcctggcagagaattgaactacattgctttgtacatggccgccctttgctgattatctttctcagcttactatagagatgagtgcattggcatgttagcctcaatcagggggcctcaataacaacagatagttgacctgtgataaactgacgagataacagcgtcctggaaaatcaccggacactgcccaatctattgagctaaagagttctgtattatgcatcttttgtgtttcagaacagttagtttcacccataattcgatccattttttggttggtacatgtgaacatctgattgaacttggtttt

SEQ ID NO: 1364 - DNA, 1551 bp, Zea mays
  Clone ID: 700151424_FLI
cgacgcgcctctgaaagttcggagccgccggcccgtccgcctccctctccgcctcccgtccccaaggccaatagttttcaagtggcaatggcggaccaggctaaccaacccactgtccttcataagctcggtggccagttccacctgcgctcgatcatctctgaaggtgtacgggcccgtaacatatgcccatctgtctcatcttatgaaaggagatttgccacaaggaactacatgacccagagcctttggggcccttcaatgtctgttagcggtggcatcaatgtcccagtgatgcagaccccgctctgtgctaatgctcctgctgagaaaggaggcaagaacttcatgattgatttcatgatgggcggtgtttcagctgctgtttcaaagactgctgctgctcccatcgagcgtgtgaagctgcttattcagaaccaagatgagatgattaagtctggtaggctatcagagccgtacaagggtattgttgactgcttcaaacgtaccattaaggatgaaggtttctcttccttgtggaggggtaacactgctaatgttattcgttacttccctactcaggctttgaactttgcatttaaggactacttcaagaggttgttcaacttcaagaaggatagggatggctattggaagtggtttgctggcaacctggcctctggtggtgctgctggtgcttcctctttgttttttgtgtactccctggactacgcgagaacaaggttggctaatgacgcgaaggctgccaagggaggaggtgaaaggcagttcaatgggcttgtcgatgtctaccgcaagacactcaagtctgatggtattgctgggctttaccgtggatttaacatctcctgtgttggaatcattgtttatcgtggtctgtactttgggctctatgattccatcaagccagttgtccttactggcaacctccaggacaatttctttgccagtttcgctctgggttggctgatcactaatggtgctggtcttgcatcttaccccatcgataccgtccgcagaaggatgatgatgacatctggtgaggctgtcaagtacaagagctccttggacgcgttccagcagattcttaagaaggaagggcccaagtccctgttcaagggtgctggtgctaacattcttcgtgccattgctggtgctggtgtgctttctggctatgaccagctccagatcctcttcttcggaaagaagtacggctccggcggtgcttaaatggagaaatatgatgacgaacaagagcagtgtgtgttcccggtcctttccaatcaggatctggtgaagtttttgcctttcatatcgaagaaattaataattcatgtagagggaggattcttccaacaatttgttttggatggagacttagatctccaaacactcgtaactatcctactaggtggtgacatcggtccccaaaaacatttatggtcatagagtctgcccttcgtttgtcagtcgggcaatttttcttgcatacaatgccttcgtttaagtatcggatgagttgctgcgact

SEQ ID NO: 1365 - DNA, 1331 bp, Zea mays
  Clone ID: 700151433_FLI
tggcggcggtggcggccacgtgggggcccatgaccgacggcgcgcgcgtcgagacggcgcccaggctcgcccaatggcgcgtcgacccgctcccctgctacacctaccgcaagtcactccccttcctcatcggcctctggaactggtgcatatctgtggagagaaataacaagcaaacctgtgttaagctctttgcagagaatacaagttctctcaagaacggttcctcagccccaatagcttcctttatcgccaaacttattgtatctcttccacctaatcagcagaccatagtccacccaggaatttttgacaaacagctgaaatacgacggttttgtgtggacaatcgatagcaccgtcactgggaggtttgtgattgagatagagtttcttgacctgaaggtcgctgatccgtctggcggggagccggcctcgatttgggcctcccgccaggtcaagcagtgctcggacagcacggccctgtcgtccctggctcggatgctgcacgaggacgtcctcaccgacatcaccatcaacgcggcggacggcagcgtgggcgcgcaccgcgcggtcctggcgacgcggtcgccggtgttccggagcatgttctcgcacgacctgagggagaaggagctctccaccgtggacatcaccgacatgtccctggacgcgtgccgcgccttcctcagctacatctacggcgacgtgcgcggcggcgaggagttcctggcgaaccggctggcgctcctccgcgccgccgacaagtacgacatcggcgacctcagggaggcctgccacgagagcctgctggaagacatcgacgcgcgcaacgtgctggagcggctgcagacggcgcacctgtaccggctgccgaggctcaagggcggctgcctgaggttccttgtggacttcaggaaggtgtacgagatgcacgacgacgacctcaacgcgttcctgcagacggccgacagggaactcgtggccgaggtgttccatggcgttcttgccgcgtggagcgggcggtaagccgggcgcatgccatggcactgccgctctgctgcaggtgttgcacatctggttggttcagttcgtcacaactcagaagcgttgtttgcaactggaggattcttgctgggaaagcgtgtaaatatttgcaaactgtacatgcgtgccagtggttggtctaaaatttactgtgcatgccttgattggattttgttcctatgatgtggaaatcagctcatatgctgctcatattcacgttttgaggaatttcagacttgatcttcaggtttacacatggcatggcaacagagagaggcaatgctc

SEQ ID NO: 1366 - DNA, 800 bp, Zea mays
  Clone ID: 700151440_FLI
cccaaaacacaagtagggttaggaaggcggcggccagcggcgagagcgcgagaggaggaggggtcggccatgacggggaaggcgaagccgaagaagcacacagcgaaggagatcgccgcgaagatcgacgcggcgacgacgaaccggggcggcggcaaggccgggcaggcggaccggctggggcaggacaagggcgggcacgcgaagctggcgtgccccctctgccgcaccccggcgcccgacatcaagtccatgcagatccaccacgaggcgcgccaccccaagctccccttcgagccggagaagctcctcaacctgcactcctccgcccccgctgctgctgccgccgccgccgccactgccgaggccaccacctccaagcccaagcccggcgtccgcggcagcctcaagaagtaagcttgctggcttggttggctcgcccgcctgcatggggcacaattcccttcggtttcaatcccatccgccgacccgatctataatcaatcaaatcgccgctctccggcctggcggctgccgcagtcggcctgcggtgtactgttagtctgctgctgatttccgttgttatactgctggtacatgtgtcgtgtgatagatgtgtcaactatatatcaatctcgtcgccggcagctctggcatgtttgagtatgtgttgctgctctgtggtgccggcgacgatggctgctagtactgttaatgtgatcgggtctccttgaacaatggcataaatatgttgcttgtttactttttcctctaatggcaagtaaagatcatgatttgcg

SEQ ID NO: 1367 - DNA, 1125 bp, Zea mays
  Clone ID: 700151452_FLI
cactgatgctgcaacccttcaactgcaagtaacaatgaagcagctgagactgagagatactagtgcttccctgcacattattgagtccttgttgggttggtcggtagcagctgatgtttctaaacaaaaacaatactctggatatataccgacgacgccaggagttccatggagcgaggaggagcacaggcagttccttgccggcctggacaagctgggcaagggcgactggcgaggcatcgccaggagctacgtgccgacgaggaccccgacgcaggtcgccagccacgcgcagaagttcttcctccggcagagcagcatggggaagaagaagcgccggtccagcctcttcgacatggtatgcgcatgcaggcaccaacatctctctcttttttttctgtacgtaattgcttgagttttgataaccgggtccagcggcaggtgccgatctgcgagaacagtgcgagcatctccgatccgctggacgtggcacgccatggcgtcgcctcggcagactccgagagggcggccgtggacgtggacctgatgaattcgacgacggagggtgacgacggcaggagcagggacgtcgtgtcgtcggcgtcaggtgcagggaccgcactgcggttcccggcagcggcagctcagacggagccgctgcatccttcgtcatcgcatggccatgggcgcggccaccactgctctccgttggacctggagctgggcatgtccctgcccgccccatccgtcggaacgtgatggagatgaggcgaggccgaggccgtgcgtgactgctgtctccctcagctgtgtgtgtcagccagatggagatgatgcgctagccaatacagtactgttcgtgatcgtgaaaacggtgtgcaaacactagcacagcggcactaaactaggatgtcgctcctcgcaccatattgtgtactgtaaccacgttgatccacatcatctctatctcttcaccaccgttggatcataggctgtcagtttcatctatccgtccatgtgtcatactcattcacgatgcggtggcttaatgatccagcagtaatttttcttctttcgtgacttaagggtatatacggtggtatttaatgtagaggcttttgatgt

SEQ ID NO: 1368 - DNA, 1022 bp, Zea mays
  Clone ID: 700151493_FLI
gcggcacgccaccattcccacgggctcacgtagaccgggcccagcctccgccccaccaacccttgcctccccacacctcagcatgaaccactcgtctctttttctccgccccgcccgaagccgaggaggagaggggagcagcgagatcgtgcgcacctccgagatctccacgaagttgtggtaacatggggctcaccttcacgaagctcttcagccggctcttctccaagaaagagatgaggatccttatggttggtctcgatgcagctggtaagaccaccatcctctacaagctcaagctcggagaaatcgtgaccaccatccctacaatcgggtttaatgtggagactgttgaatacaagaacattagcttcactgtctgggatgttggaggtcaggacaagatcaggccattgtggaggcactatttccagaacacccaaggccttatctttgttgttgatagcaatgacagagatcgtgttgttgaagcaaaggatgagctccacaggatgctgaacgaggatgaattgagggatgctgtcttgctcgttttcgcaaacaagcaagatctaccaaatgcaatgaacgctgctgagatcaccgataagcttggtctccattccctgcgccaacgccactggtatatccagagcacttgtgctaccacaggagaaggtttgtacgagggtcttgattggctctccaacaacattgcaaacaaggcctgaatggacaattctgctgtttcacgaagcacatctgcacatggcgaggcatggtcattttgaccctcagacgattattgtttcattggaaagtatcgtatttctttgctaggcttttcagagagatctctctaagaaactgatccgaaattaagacactataattggcagtggcactagtagatcgtttactgagtaatgcagtttattttaatgtatcccaattgtgttgtaagatacaaatatctgtcggaattatccattcaatttgaatctagatacgtagtttttgtt

SEQ ID NO: 1369 - DNA, 924 bp, Zea mays
  Clone ID: 700151520_FLI
gcttctatggccactgcttatgaaaagaaatggccattgtatcttagcaccaaaaacactattttgaagaaatatgatggcaggttcaaggacattttccaggaggtgtatgaagctggttggaaaaccaaatttgaagctgccggcatatggtatgagcaccgccttatcgatgacatggtagcatacgcacttaagagtgaaggagggtatgtctgggcttgcaagaattatgatggagatgtgcagagcgatttcttagctcaaggttttggctcattgggtttgatgacttcggtactggtgtgccctgatggaaagacgatcgaagctgaagctgcccatggtactgttacccgtcattaccgtgttcaccagaaaggaggtgaaaccagtacgaacagtattgcctcaatctttgcgtggacaagaggacttgcacacagggcaaagcttgatgacaatgctagactacttgacttcacccagaagcttgaggctgcctgcgttggagccgtcgagtctgggaagatgaccaaggaccttgcccttctcgttcacggatcttcaaatatcacgaggagccattacctgaacacggaggagttcattgacgctgttgctgacgagctcagatcaaggctggcggccaactcgaacctttgaaatccttgccgaagttgtggtgctttcctgcgcgacgctttcgaaccgtttttattatgtcgccattttctttccctgtgccaccaccctgaatgaagaaggcctgagctaggcgaacatctgcaggccgcagcagtatgccaaatcattatcattaccgttgccattaccaattggagattgccgtagatttccgcgattatgggaactcatttacctgattatctgatacgtttgaaataaaaggtcgccattcag

SEQ ID NO: 1370 - DNA, 945 bp, Zea mays
  Clone ID: 700151522_FLI
cgaaaacagagcaaatccggcgagccggtgcggcggcggagggagacgcctgctcgagaaggagcattagcaggaggcagcggagatggatccggacgcagtgaagtcgacgctctctaaccttgccttcggcaacgtcatcgccgccgccgcccgcgacctccagaaggaaatggtggctaaagacaaggctcaagcagcacctgcaagccatgatgaagttgatcttgatgagttgatggatgaccctgaacttgagaagttgcacgcggagagaattgctgcccttaagaaagaggttgagaagcgtgaagtgctaaaaaggcaaggtcacggtgaatacagggaggtaattgaaggggacttccttggggaggttactggcagtgaaagagtcatatgtcatttctatcaccgtgaattttaccgttgcaagatcatggataagcatttgaaggcccttgctcctgtctatgtgggaacaaaattcatcaagcttgatgctgaaaatgctccattctttgtagccaaactggcaatcaaaaccttgccatgtgtaatattgttcaagaagggtattgctgttgaccggttagttgggtttcaagatctcggaagtaaagacgatttttcaacaagagcgttggaaaacattctcaagatgaaagggataatcgatgagaagaagaaagatgacgatgatgatgatgaagaaagcgagtctaagaataggaggattagatcttcaactgctcaagattctgactcggactgaacatgagatggggattgaggattcaccctttttgcactttatattttgtctgttctgtactgcaattgatttgtgcgactcatgtatctataccagataaccagaacaaaagcatgtacaagagattcttaacttatctaacttatgaacacgttcaaaattgagctggc

SEQ ID NO: 1371 - DNA, 1644 bp, Zea mays
  Clone ID: 700151539_FLI
agaaaaggcggcgcgcggcggaaaaccctagcttagctcctctccggcgtcaagtgctctccggtttgagggcgcgatgagggtgaaggtgatttcgcgttccaccgacgactacacgcgcgagcgcagccaggacctgcagaaagtattccgcaactatgatccagcgcttcgtagtcaagagaaagctgttgagtatactcgggcactcaatgctgccaagttagagaagatatttgctaagccatttatcggagctatggatgggcatattgacgcggtatcgtgcatggccaaaaaccccaatcatttgaaagcaatattttctggttcaatggatggagatgttcgcctttgggatattgctgcgaggaagacagtttgtcagttccccgggcaccagggtgctgtaagaggtttaacaacatccacagatggtgatcttcttgtatcatgtggcgttgactgcactgttcgactctggaaagttccgatgcttaaaatggtggatactagtgagcgtgctggagataattcccagccatcagcagtttacacctggaagcatgcattctggggtgctgatcaccagtgggacggcaatcttttcgcaactgttggtgctcaagttgatatatgggatcctgacaggtcagagccaataaatagcttcgaatggggtaaagatacggttctttctgtgcgatttgatcctggagactctaatattttgattacgtcgggcagtgatcggagtctgacactctatgacttgcgtatgtcatctccagctagaaagctgataatgaagacaaggtgcaattcagtatgctggaaccctagagagcctatgaacttcactgctgcaaatgaagacacaaactgttactcctttgatgctagaaaattagatgaagcaaaaattgttcacaaaggccatgtttcagcagtgatggatattgactactcaccaacagggcgtgaatttgtcactggttcatatgatagaacagtaaggatttttaattatcttggagaccacagcagagagatttaccacaccaagaggatgcaaagggtgttttgtgtgaagtacacctatgatgggacctatttagtctctggcagtgatgatacaaatcttcgtctgtggaagtccaaagcttcagaacaacttggagttcttcttccacgggagcgcaaaaagcaagagtaccaggatgctttgaaggagcggtacaagcatctcccagaagtcaagcggattgtaaggcatagacatctaccgaagccaatctacaaggcagccaacctacggcgtacgatgatcgaagctgaaagccgtaaagaggaaaggaggcgaaagcacagtgctcccgggagcatgcctgtgcagcccttcaggaagcggagaatcatcagagaagttgagtagacatgcggtttgcattgcatggtcgtggtacacgtttgtgtttctgaggcgatggagttgagagaatacatgatgtttcctttgggagttgagctccagttttgcctttcgtactacatatatgtgctccatcaatcagtttgtttgactagttattattgtgtatttgaaataccacacaaaatattcatatcgtgccattgcattgc

SEQ ID NO: 1372 - DNA, 1675 bp, Zea mays
  Clone ID: 700151543_FLI
gtcggcgtcttcacaaacgccggcgcaaactctcgcccgagcccgacagatcttcaattccccattccgcccaccgatcgaccttcacgccagtctcggtctcttccgaaggcgtcgcgcgcggttgtttgagaggagaggaggaagatgagggagtgcatctccgtccacatcgggcaggccggcatccaagtcggcaacgcgtgctgggaactttactgcctcgagcacggcatccagcctgatggccaagtgcctggagataagaccgcgggacatcacgatgatgccttcagcaccttcttcagccagactggtgctgggaagcacgttccccgtgcaatcttcgttgatctagaacccactgtgatcgatgaggtgcgcactggcacgtaccgccagctcttccaccctgagcagctcatcagtggcaaggaggatgccgctaacaatttcgcccgtggccactacacaattggcaaggagattgttgatctgtgccttgaccgtatccgcaagcttgctgacaactgcaccggcctccagggcttcctggtcttcaatgccgttggtggtggcactggctctggccttggttctctcctccttgagcgcctgtctgtggagtacggcaagaaatccaagctgggcttcactgtgtacccatctccccaggtgtcaacctctgttgtggagccttacaacagcgtgctctccactcactcactcctggagcacactgatgtctccatcctgctcgacaacgaggccatctatgacatctgcaggcgctccctcgacattgagaggcccaactactccaacttgaatcgccttgtgtctcaggtgatctcatcgctgactgcttctctgaggttcgatggtgccctcaatgtggatgtgaacgagttccagaccaacctggttccttacccgaggatccacttcatgctctcctcctacgcaccggtgatctcttctgcgaaggccttccacgagcagctgtctgtggcggagatcaccagcagcgcgttcgagccggcttccatgatggtcaagtgcgacccatggcacggcaagtacatggcttgctgcctgatgtaccgcggcgacgtggtgcccaaggacgtgaacgccgcggtggccaccatcaagacgaagcgcaccatccagttcgtggactggtgcccgacggggttcaagtgcggcatcaactaccaggcgccgacagtggtgccgggtgccgacctcgccaaggtgcagcgcgcggtgtgcatgatctccaactccaccagcgtcgtcgaggtgttctcccgcatcaacagcaagttcgacctcatgtacgccaagcgcgcgttcgtgcactggtacgtcggcgagggcatggaggagggggagttctccgaggcacgcgaggacctggccgccctggagaaggactacgaggaggtcgccgcagagggcggcagtgatgacggtgacgaggaggaggaatactgatctgcttgcatgaatctgtttggctgtcgagccaggttgtggtgttgaaaaacctttgtttgtgtcctggcccccctgggtaatgtttgggtgtttccttccatcatcacttgctgaactgctctagtatttgcatttgtaattgaagtctgtcgctttaagcactcttggttct

SEQ ID NO: 1373 - DNA, 569 bp, Zea mays
  Clone ID: 700151586_FLI
gcggggagaaggaagccgccctcgccaccgacctcaacagcacccccaccatttttgacaaaattattcggaaggagatcccatctcaggtggtttatgaggatgagaaggttcttgcatgtagagacatatcaccacaagctcctacacatattataatcattgcgaaggttaagtatgggctgtctaggttgtcgaaggcagaggaagggcatgtcgagcttctgggcaatcttctgtatgctgcaaaggttgtagcagagcaggaagggcttgctgatggcttcagaattgtcatggacgatgggcccagaggatctcaatcggtctaccaccggcacctacacgttcatcttctcgggggacggcagatgaattggccaccggggtgagttggtgttgtaagactcaagcaatgacttcgtgaggcatgttgttcactcgttagaatttcataatatgctgtcatttgcagtttgctattagggttgcacaaatagtcatcggtagacgctgtcccaatgattttgtgtacggagctcaaatagtataaaaagttttcatttcgt

SEQ ID NO: 1374 - DNA, 765 bp, Zea mays
  Clone ID: 700151621_FLI
gacaacccgtcagcccctctcgtttttcatccgccttcgcctccaaccgcgtgcgctccacgcctcctccaggaaagcgagagcttctgcataagaacaacaaatcaaaagcgtgatcagctcggtgccaacaaaacctcaacaaccaagtttcatgtctgatctcgacgtccagcttccatctgcctttgatccgtttgctgaggcaaatgctgaggactctggtgctggtcctggaacgaaggattatgtgcatgtgcgcatccagcagcgcaacggcagaaagagtctgactacagtccagggtctgaagaaggagttcagctataacaagatcctcaaggatctgaagaaggaattctgctgcaatggtactgtagttcaggacccagagctaggccaggtcattcagctccaaggtgaccagcgcaagaatgttgctactttcctagttcaggctgggattgcgaagaaagagaacatcaagattcacgggttctaagggacctgtaaatgcttgtgccctatattgtgtgcctcaacatattggggagcttgaagcatcgacagttgctagtcattgcttacttatataagaacataagtagtatttgctattgtcaagtgtgccttgcttgatgcaagttgtgttttcgtctcattattattatgcacggccatcgtacgtgtatggcttgtatgggttattgccaacttaataaaagcacactctgtttgcctataagcactgatgtttgcctcgtc

SEQ ID NO: 1375 - DNA, 1731 bp, Zea mays
  Clone ID: 700151622_FLI
gccgccgctttccaattccaggccatcaagacgtagcagctccccttgcgtctgcgcacgccaccgaaggatcctcgccgcgcgtgcagtgcgatccgaggggaggggtccaaggccatgatgaagagcgtcagcggcaccggctcggccgggagccggagcgatccgggcggcagcggcgagctgtcccgcttctccgtcgccaccacggcgtcgtccgcctcgcagccttccgcgaacggtggcgcgcgcgggatctccttcctcgacgccttccggtcctgcttcgtgcccccggaggcgcgctcgccggagaactccatgtccgacgaatcccacccttcccaccaactctcgcagtctttgagctcacaaggttctaacagtgggagcgtgtttgggagcaagcgatcgattaaaggaatgtatagtcccatgcacaagagttctttagatagggagatccctggcagcacaaaattctccttgccgcagatccagaaagcaacaaagaacttctcgccgaacttcaagattgggcagggtggttctgggactgtatacaagggtcagcttgctgatggtactcttgtcgctgtcaaacgtgccaagaagaatgtttatgacaagcatatgggtcgtgagttctggaacgagattgagacattgcaacgcattgagcacctgaatttggttaggtttcatgggtacctggagtttggtggcgagcagttgattattgtggagtatgttcccaatgggaatcttcgagagcacctcgactgtataaatggtaaaatattggaattctcactgagattggaaattgcaattgatgtggctcatgctattacatatcttcatacctattcagggtttgaccttcagatgtatattaaagatcatccagtcatccacagagacatcaaatcctcaaacattcttctaatgaacaattgtcgagccaaggttgctgactttggattcgccaaactggctccaactgattctagtcatatatctactcaagtcaaaggaacagcaggctatctcgatccagaatatctcagaacataccagctcaatgagaagagtgatgtctactcctttggagtccttctggtggagttggttactgggaggcgccctatagagccaaaaaaggcaatcattgagcgtgttaccacaaaatgggcaatggaaaaatttgtggagggcaatgctatccaaacactagatccgaatctggaagcgaccgatgcgatcaatctagcggtcgagaagctgtatgagctggctctgcaatgcttagccccaactaagaggaaccgaccgagcatgaagcggtgcgcagagattctgtggagcatccgtaaagattacagggagttggttgtacccacctctgccatgaactgaagcaggtcgtctggagcagtcaagtgaacaaaaagatgtatcattccagtttgcctctcttgattcgcttcaaagattggtggttgaaatcatccgattgctgggattctttcagttaccgcaagtggtcgtgaacaggactgatggccttcctagatgctgtgtttgtgctagaaaccagaaaagtccctgtgtgaaagtgttgctgagtaaacatgtacgagtatatatcagatatctaatggtgtgtatatcttgtaggttctcttatacaggtaagtgcatcacgcatgaagaaatctagttgtttcc

SEQ ID NO: 1376 - DNA, 929 bp, Zea mays
  Clone ID: 700151629_FLI
aagtatgctcttgaggaaagcaagttattcataaacgacaaataacttgagcaaatcgcttacaaatgataatcagataagtagagtcaacaagacaaaactgtatctggcaacgcacatcgcctcaccccagccgactacaccattattcttcagcaaaagcaaacagctccttccctcccccctcagctcaagcgataaccataagaaaacctgctacgcgactgcgtatatgataatgcatatgcatgcaaaagataactgacaggccagtgtagcgaacttcatagcacacaacggcccgagtgagctgcaagccgtgtgcctagtaccggtagtgggcaggcttgtagggaccctcgatcggcacgctgatgtagtcggcctgagacttggtgagcttggtcagcttggcaccaagcttgcccaagtggagagcagcaaccttctcatcaaggtgcttggggagcacatacaccttcttctcatacttgccagagctcttctccttccacagttcaagttgggcaatgacctggttagtgaatgagcaggacatgacaaagctaggatggccagtagcacacccaaggttcatcaggcgaccctcagcaaggacaatgatgccagtgttggtctcggggaacacccagcggtcagtctggggcttgatggtgatgcgcttgacgccagggtaggtctcaaggccgagcatatcaatttcattgtcaaagtggccaatgttgcagacaatggcattgttcttcatcttcctcatgtggtcaaccatgatgatatccttgtgaccgagatcgaccccatctgtgccctccaggctctgatggagggtcttcaggtccttcccttggaggacgttgtctctgaagctgacatcttcgtgaccaccactggcaaccatgatgatatcc

SEQ ID NO: 1377 - DNA, 1004 bp, Zea mays
  Clone ID: 700151630_FLI
gcagagtccagagtccagacgccagacgccctctacttctcttctctctagttatacatttcaaactcttggccgccgcagcggtctctgttcgccgcgccccgccgcagaaatggcgctgccgaatcagcaggttgtggattaccccagcttcaagctcgtcatcgttggcgacggtggaactggcaaaaccacatttgtgaagaggcatcttactggcgagtttgagaagaaatatgagcccaccattggtgttgaagttcaccctctggattttagcactaactgtggcaaaattcgcttctattgctgggacactgctgggcaagaaaagttcggtggcctcagggatggctactacattcatggtcagtgtgccatcattatgtttgatgtcacttcgaggctgacatacaagaatgttccaacatggcacagggacctgtgcagggtgtgtgagaacatccccatcgttctctgcggaaacaaggttgatgtaaagaacaggcaggtcaaagccaagcaagttacattccacaggaagaagaacttgcagtactatgagatttctgccaagagcaattacaactttgagaagcccttcctttacctcgcaaggaagctggcaggggatcagaaccttcactttgtcgaagccgttgctctgaagccaccggaagtgcagattgatatggccatgcagcagcagcatgaagctgagcttgcagctgccgctgcgcaacccctccctgatgacgatgatgacctgatcgaatagatgttccatggcccttgttgatgcgagggggagagcttttattacaaatccgtggtggttcagttcttgtcaggcctagccgtacgtgatttttctgttatgtaacctgctgttgacgagggtttttggtgatccttgattttggtaatacatcgctattgtcaggcagcatgtttcagagcttgattgtgcatgtttattggtttaattgctatcgattgatttg

SEQ ID NO: 1378 - DNA, 928 bp, Zea mays
  Clone ID: 700151641_FLI
acatttggggatattcttgcttctagagcaataagggcagcacattgcttaacttccattcagttctcacctacatccgaacacatacttttggcatatggtcgtcgtcatagctcgctgcttaggagcatagtcgtggagggagaaaatgggattcctgtatatactattttggaggtatatagagtttcagatatggagcttgtgagagtgcttcctagtgccgaagatgaagtcaatgttgcatgctttcatcctttaccaggaggtggccttgtttatgggactaaggaagggaagctcaggatccttcaacacaatggcgcaaacatgataaacatggggtcgggttgcttcattgaggaaaatatggttgagatccagaggtatgcattggaatgctgaataagcttgaccacatcatgtgaattttaggcttacttccatgaaagacttctctgcaggcttcatctgtgtgatccgtccaagggaaaacattagatccatctccaactacattagaacagataattctcaatgggctctttcaagtgccttggggactggtctttgcaggggcggcaggagatgtaaatctacatggccaccgtcgtggctgccatcacgatgctgtaattataccttttgtacatgtattccaatcagcttaactcgattgctgttgtatttcagaacgttgacggtgctaatacttctgaagtctttttgttgtatacttcacctatcctaacaagcggtcgatgatgcaagaaattacaaaggcgaatgggattctctgggtttgattttacacgtgataatcatgtatttttttcctgttctcgtctgggttgattaatcattaaacgtttggagtttctatatctgtatgaaatagcatctgttgcaacataagaatatggttgac

SEQ ID NO: 1379 - DNA, 1078 bp, Zea mays
  Clone ID: 700151656_FLI
atgtgatccccatcttcaacggcgagtgcggggcgtgcgcctactgcgagtccgatcggacaaacctgtgcgggacctaccgcgtggacgcttccaagagcaccatggtctctgacggcggcaccaggttctccgtagcggaccgcgtgtccggccgcaccgtgccggtctaccacttcctcaacacctccacctttgccgagtacaccgtgctggacgcggcctgcgccgtcaaggtcaaccccgaggcaccactgcaaaagatgtgcctcctcagctgtggcatctccacaggagttggggctgtatggaacacagccaacgtttccgcgggctccaccgttgcgattttcggccttggcgctgtcgggctcgcggttgctgagggtgccaggctacgaggggcagctcggatcatcggtgttgacataaaccctgaaaagttcaccaaagggagagagatgggcgtcactgactttgtcgactccagggcctctgacaaaccggtgcacgaggtgatcagggagatgacccatggaggtgtcgactacagctttgagtgtaccgggatcaacggcgtgctgcgagaggccttcgtgtccacgcatgacggttggggcctgacggtggtgctggggatccatgcgacgcccaagatgctgccgctgcacccgatggagctcttcgacggccgtcggatcaccgcctgcgtcttcggtgacgtcaaggggaagtcccagctgccggccatcgtcgacaagtgcgtcaacggggacctggatataaaccttgacgggttcataacacacaggatgcccttctcggacatcaacaaagccatccagttgctggaggaaggcaagtcccttagatgcgtgctcaacctctgatggacatggaccgaccaccacacatgcatgcgtgggagattattgtccttggttagtttggttactacagaaataatcaaataaatatagaatccgcagtgtgtgtcgagttgtacaattcacgtgtgcaccagtgctactttattgtaaaggagggtgtgattgaagccaactagtagcagcagggc

SEQ ID NO: 1380 - DNA, 2248 bp, Zea mays
  Clone ID: 700151670_FLI
aaactcccatttcgccgtccgtgacgcgagagacctcttcgcatcccgaggcggcgcttttggggtcggaagcgacacgggcgcccggcgggtccgcgggtggtggtgctactgctagcaagcagcagcaggcgacgctaggcgagagccccagtcggagcaggccaccatgtgcagcatcctcgctgtcctcggcgtcgctgaggtctccctcgccaagcgctcccgcatcattgagctctcgcgcaggttacggcaccgagggcctgattggagtggtttgcactgtcatgaggattgttaccttgcacaccagcggttggctattatcgatcctacatctggagaccagcctttgtacaatgaggataaaacagttgttgtaacggtgaacggagagatctataaccatgaagaattgaaagctaagttgaaaactcatgagttccaaactggcagtgattgtgaagttatagcccatctttacgaagaatatggcgaagaatttgtggatatgttggatggaatgttctcctttgttcttcttgatacacgtgataaaagcttcatcgcagctcgtgatgctattggcatctgccctttatacatgggatggggtcttgatggatcagtctggttttcttcagagatgaaggcattgagtgatgattgtgaacgcttcataacattccccccagggcatctctactccagcaagacaggtggtctaaggagatggtacaacccaccatggttttcagagactgtcccttcaaccccttacaatgctctcttcctccgggagatgtttgagaaggctgttattaagaggctgatgactgatgtgccatttggtgtgcttttatctggtggactcgactcttctttggttgcatctgttgcttcacggcacttaaacgaaacaaaggttgacaggcagtggggaaataaattgcatactttctgtataggcttgaagggttctcctgatcttaaagctgctagagaagttgctgattacctcagcactgtacatcatgagttccacttcacagtgcaggaggggattgatgccttggaagaagtcatctaccatattgagacatatgatgttacaacaatcagagcaagtaccccaatgtttttgatgtcacgcaaaatcaaatctttgggtgtgaagatggttatttctggcgaaggttcagatgaaatttttggtggttacctttattttcacaaggcaccaaacaagaaagaattccatgaggaaacatgtcggaagataaaagcactacatctgtatgactgcttgagagctaacaaagcaacttctgcctggggtgttgaggctcgtgttccattccttgacaaaagtttcatcagtgtagcaatggacattgatcctgaatggaagatgataaaacgtgacctcggccgaattgagaaatgggttatccgtaatgcatttgatgatgaggagaggccctatttacctaagcacattctctacaggcaaaaggaacagttcagtgatggtgttgggtatagttggatcgatggattgaaggaccatgccagccaacatgtctccgattccatgatgatgaatgctggctttgtttaccccgagaacacacccacaacaaaagaagggtactactacagaatgatattcgagaaattctttcccaagcctgcagcaaggtcaactgttcctggaggtcctagtgtggcctgcagcactgccaaagctgttgaatgggacgcatcctggtccaagaaccttgatccttctgggcgtgctgctttgggtgttcacgatgctgcgtatgaagacactgcagggaaaactcctgcctctgctgatcctgtctcagacaagggccttcgtccagctattggcgaaagcctagggacacccgttgcttcagccacagctgtctaactttatgtttatcacccagcaatgcttgaaacagcaaaggttgtccattgcttgtttcagtttccttccgatcatgtttttagttccatcaatcaagcaatggagacatgcttgtgcttcatgcttggcagcatcgtgtttgggttttcactgagcagtactgtttaatttttatggactgaaaagactcagttttgtaaatattcgtcactgtgaccattcctgtggtggtttatgtgatttgcagattgcagtggttagtgtatcttcccaattttcaatcctttaacacttgtggttgtt

SEQ ID NO: 1381 - DNA, 599 bp, Zea mays
  Clone ID: 700151703_FLI
aactcgaaaaaaaacaaatcttattcataaacaaaatgggttcacagatatttctccatacgtacatgctcattgtggtagacgcagctgaccacctagagctgcatacttacttattcagactgatccagcatgtggcaacatcggaagttcacatgcttacagacgacaaattttcataacaatagcctggcttggctgcttcacagaataaccaaacgacaaccacgaaattgcgacgatataaaataaacaactcagaagcaaatcgacaccagaagcccgtcttactcatcaagcactcccgccttctcctccatggcatccgcttcctcctcccagcagagaagattagctagtttgtagtccttcttcataggaggaggagcactctccacgttctcgccgtcaaagcagtggaaaacagatttggtctatgactgcaacaacatggtggagcaggagctgcctggaggcgggctcctcgtataccagagcttctgcgctgctgaagacgctgttgctacctcgcccaaatctgttttccactgctttgacggcgagaacgtggagagtccttcttcataggaggaggagca

SEQ ID NO: 1382 - DNA, 1437 bp, Zea mays
  Clone ID: 700151727_FLI
cgtgcaacgcgttcctcggctcctgcaggcggcgacctcggaaaggcgggggcgtctcgtcgcgaggcatttgaggccaggattttttggtgctctcattgttagctgactggtgagggtctggatctagcaatggcggaaaacacccacggtagtggtcgccacgtgcttggggacttgacaaatgttatttgcaagcgagcagccacatcagatctggagaagagtacaggtgggataaagatcagacggattgaaaagactgggactaggaaagagtacgatgcaaatgcaaaagctagcagtattgggaaaggaattgtatttggccatttgtttgatgatgttgccagagagaaatttcaaagccattctatctttcagaatagtagggttcaacacatagctgccgaagcagctggactcttatccaaggaagccaatgactcgaagaaccactatgcatcaatcggtccattagatctcagtgataaggagcaggattcttcacttgaatctgaagacgactatgatgatgaagataatgatgagacgaatggtgaattgctgcaccattttttcagctcagagctagctaataaaatgtcaacaaatgatggtgagtgcttgactcaggaggagatagttgggtcatctggaaatcagaaacctctgtcttcattggatgctacgacaggtggtgacttgccaatttctagtgctcagcatgcttctgtgagaactggtggtttggaagaagctgttgccccaaaatcttgtgcttgttctttctgtctcaaggctgcttttatgtggatggatctccattatcaggatgcaagaagccggctttctgtattgaagaaaagcatcaagtttgccaggtcattggaggaaaaatgtagaggaaatgaatatgcggccaatgtagctggatatgaatcaaagcgagctgtgggagtggagtttgaactatctcaacaacagagatcactctttctttatacagaaaatgcccttgtccgtgagtcaacgcagcttcattctgcttttgtgaaactgaaagaattgagagagaactgcaagacagatcttgagacgctcagcaattcttcaatgagaaaatgagtgctgcatgttgcgttgctgaactgttagtttcctgagacttagtatgatcagctggcttgtcttgaagcaagatgtgctgagattgaaccacaacttaggaattatggtgcttaccatcaatttgggacttcaatttggctgtagtgattattcctatcataaagcgttggtctagtatgcttgtagctgatgtaaaaataaccatggtaaggtaggaactgtatgtttgtctcgttgaggcatcgtcatcttcacttgtaccttgcagtgagcttccttcatatgaacattctttccacgttctcc

SEQ ID NO: 1383 - DNA, 2059 bp, Zea mays
  Clone ID: 700151728_FLI
cagaggagcgagccatcatccccccccgagccgtgccaaccaagagccatccacccaccaccaccaccccggccgcttccttgtccctgcccctccgttggtctcctttgcccatctcatcctctctctctctctccctctctctctctctctggcggtcggcgtggctccgggggcgcgaagcgcgggctcggcggggcgactcgccggcggcgacctgcaggtttgggtatgagaggggtcacccacgcggcgcccaccacaagcgccccccgcccccgcggacgcctcatggacggcctcctcatcttcgtcttctacctctcgctgcccacccgtgccggccgcgaccactcgtcaatcgccgcctctaattgttagccgccgccggcacgccattgctcggcacgcctcccgagaagctcgatctgcggcctagccagccagcctcacgcgggatcaggatcgatggaccagccaccgaatggattcgccgccggaggtttttttcacgcacatcgatgggcaaaaccgttctcccccttctataattgtcattgggggagggatttcaggcatcgcagctgcacgtgctttgtcgactgcttcatttaatgtcacactcttggagtccagggaccgacttggtggccgtgtgcacactgactattctttcggttgcccaattgacatgggagcatcatggttgcatggtgtttgcaatgagaattctttggcaccactgattaggatgcttgggcttaggttatatcgcacaagcggtgataactctgttctgtatgaccatgatttggaaagttatgctctttttgataagcatggtcagcaagttccccaggagatagtaagcaaagttggagagacatttgagagaattcttaaggagactgtcatagtaagagatgagcatgcaaatgacatgcctctttttcaagccatagggatcgtgcttgacaggaatccgcatatgaagctgcagggcctggaatatgaagtactgcagtggtgcatatgtaggctggaggcatggttcgctactgacatggacaatatatctctgaaaacttgggatcaggaacatgtgcttaccggcggacatggtcttatggtgaatggctacgaccctgtcatcagagctctcgctcaaggtctagatattcacctgaaccacagggtcacaaagatcatacaacgctataacaaggttattgtctgtgtggaagatggggcgagttttgtcgcagacgctgctatagtaaccgtccctctcggggtactcaaggcaaacatcatcaagtttgagcctcagctaccgaaagagaagctctcggcgatcgccgaccttggcgtcggtatcgagaacaagatagctctcaagttcgacactgtgttttggcccgacgttgaagtgataggtagggtggccccgacgtcaaacgcctgtggctactttctcaaccttaacaaagccacaggaaacccggtcctggtgtgcatggtggccggaaggttcgcgtacgagatcgagaagctgtcggacgaagagtccgtgaacttcgtgatgtcccagctcaggaacatgctgccgcaggcaactgacccggttcagtatctggtctcgcgctggggtagtgaccccaactcacttggctcctactcgtgcgatctggtggggaaaccagctgacctgtatgaaaggttctgcgctccggtgggcagcctgttcttcgccggggaggctgcctgcattgaccactccggatcggtgcacggagcttactcgtcaggcatcgctgccgcagaggactgccgaaggcgtctgtcggcgcagctaggcatctcggccggcctgttccaggtcgggaaggctgccatgagggaggagatgacggctgaagccatggtccccttccagatatccaggctgtaagagagaatctattcgacaccgtctttgtgtcaccggtttgttgcttgctgtaattgtaaaatggtgtaagaccttgtttgttggaatattcgatggtggatgctgttg

SEQ ID NO: 1384 - DNA, 1422 bp, Zea mays
  Clone ID: 700151791_FLI
ccatatcctcgatcacaagagcagctactagctgcctctagctcgatcggttagtttgtcgtgttgcttacgtacgtcagcagaggccatcgtcgagtgtatccagtggtcgagaagagggaagaaatgtctgcgaacgacggcgccggcgacacgaagatgagggcgatcgtcgtcgtagaggaaggggagatgagcgcgccggcggcgacgccgaagcagggcaagtgctgcgagtacacgctggacggctccgtcgacatgaagggccggccggcggtcaaggggaaatcaggagggtggcttgccggtgctctaatcctcgtgaaccagggcctggcgacgctggctttcttcggcgtgaacgtgaacctggtgctgttcctgacccgggtgctggggcagagcaatggcgacgccgccaacaacgtcagcaagtggacgggcaccgtgtacatgttctccctcatcggcgccttcctcagcgactcctattggggacgctacaagacctgcgccatcttccaggccatctttgtcctcggcctcgcgctgctgtcggtgtcgtcgcacctctacctaatcaggccggacgggtgcggcatggagcacgcgccctgcggcccgcactccggcaaggagctggggatcttctacatcgcgctgtacatgatcgccttcggcaacggcgggtaccagcccaacatcgccaccctgggcgccgaccagttcgacgaggaggaccccgccgaggcgcactccaaggtctccttcttcagctacttctacctcgccctcaacctcggctcgctcttctccaacaccttcctcagctacctcgaggacaagggcagctgggcgctcggcttctgggcctccaccgccgccgccgccacagcgctcctgcttttcctcagcggcacgctccggtaccgctatttccagcccggagggaacccgatcggaaggattggccaggtcgccatcgccgcgtgcaggaactggaaggcgggcgtgtcgaccgaagtggtaagcctgtacgagggcgacgagaaggcggatgccggtggcaggaagcttctgcacacgcaagggttcagtttcttggaccgcgcggcgcacgcggacactgactccaagctcggcgcgcgcgatccctggaagctgtgctcggtgacgcaggtggaggaggtcaagagcatcctgaggctcctccccatctggctctgcaccatcctctactccgttgtcttcacccagatggcctcgctctttgtcgtgcagggcgccgcgatgcgccgcaccaccccgttctccggcttctccgtcccgccctccagcatgtcggccttcgacattctcacagtcgccgccacgattttcctgtaccgccgcactatctgcccgttcctagcgcggctc

SEQ ID NO: 1385 - DNA, 791 bp, Zea mays
  Clone ID: 700151851_FLI
gtgcgtcttgaaaggggagagagagagagagaagagagagagaagagagagagagagagaggagtgggagacccgcgagaggctgccgtgtagggaccgtagactcagcgactgcgaaggagggataaggggatggccgggatcggaccgatcaggcaggactgggagccggtcgttgtgcggaagaaggcacccaccgccgccgccaagaaggatgagaaggccgtcaacgccgcgcgccgcgccggtgcggagatcgataccatgaagaagtacaacgctggtacgaacaaggcggcatccagcggtacatccctcaacaccaagcgcctcgacgacgacaccgaaaacctcgcccatgagcgagttccaagtgatctgaagaagaatctcatgcaagcaaggctcgataagaagctgacacaggcacaacttgctcagatgataaatgagaagccacaggtgattcaggagtatgaatcaggcaaggcaatccccaaccagcagatcattagcaagctcgagagggccctgggaaccaagttgcgtggcaagaaatagctttcctacgagtttgtgtcccggagcatcataatagggggaagacaaggcaagctgtctgcttatttgtctatgtttggtatctcaagtcctgcggactgtttctgttggcacaagagggaataaatgtgttcacggacctgtaatgcttgctccttgtcatatgaccttgctctaaacatttgtgatgaagctgtcaaggtaatatattttctctaaatatttagcct

SEQ ID NO: 1386 - DNA, 1056 bp, Zea mays
  Clone ID: 700151880_FLI
ggagaggcaagaagaaagggatgccggccaagaacctcatggcggagcgccggcgtcgcaagaagctcaatgaccgcctctacatgctgcgctcggtggtgccgaagatcagcaagatggatagggcttctatccttggcgacgcaattgagtatctgaagtagctcctgcagaggatcagcgatcttcacaatgaacttgagtcagctccgagctcttcgcttgttggaccaacatcagctagcttcaacccatcaacaccgacattgcagacatttcctggccaggtcaaggaagaactttgcccgggctcattcccaagccctactggacaacaagccacagtcgaagtcaggatgagggaagggcatgcagtcaatatccacatgttctgtgcgcgtaggccaggcatcctgctgtcgacaatgacggccctcgacagcctaggcctcgacatcgagcaggcggtcatcagctgcttcaatggctttgcgatggacgtgttccgagctgagtgcgcggatggtcctggaatggtgcctgaagaaattaaggccgtgctgatgcacaccgccggcctccacaacgcaatgtagccggtccgaaaacgggccaccgccaggatgacgacgatcctcctcctttctactaagggcttcggttcggaagcggcataagattaagctgtggtggccattggttttctggggcaagtgatgaattttaagatgatgaggctcgccatctcgggcatgaggcatgagtgatgatgtaactatgggattcttttttttcttctcattagcctaatgtcggattttctcctctctgatacacttgtggtgtaatagaatctatgctgcgtgttgaacaatatatggtggtgaatggtgatgcggtagctagcatcaaactcagtgcctgttggtcagagatcgatgatgcaaagagagacgagttcattcatcagcgtccagcaatgattttgactggctatgggtccgtccgtccttgattcgaatcaaatgaattgaatcctctggcttcttgttattt

SEQ ID NO: 1387 - DNA, 1115 bp, Zea mays
  Clone ID: 700151883_FLI
gtgaccctccctcagccgcgtcgcgtcgcatcctacgatccaaagctctctctgctcgcagccatggcgaagaactacccgaccgtgagcgccgagtacagcgaggctgtggagaaggccaggcgcaagctccgagccctcatcgccgagaagagctgcgccccgctcatgctccgcctcgcgtggcactccgcggggacgttcgacgtgtcgtcgaggaccggcggtccattcggcacgatgaagcatcagtcggaattggctcacggcgctaacgcggggctggacatcgcggtgcggctgctcgagcccatcaaggaggagttcccaatcctctcttacgccgatttctaccagctcgcgggagttgtggccgtggaggtcaccggtgggcctgagattcccttccaccccggtagggaggacaagcctcaacccccacctgagggccgccttcctgacgccactaagggttctgaccacctgaggcaagtttttggcaagcagatgggcttgagcgatcaggacattgttgccctctctggtggccacaccttgggaaggtgccacaaagagcggtctggtttcgagggggcctggactacaaaccctttggtctttgacaactcttacttcaaggaacttctgagtggtgataaggagggccttcttcagctcccaagtgacaaagccctgctgagcgaccctgttttccgccctcttgtcgagaaatatgctgcggatgagaaggctttctttgatgactacaaagaggcccacctcaagctctccgaactggggtttgctgatgcttaaatagaccctatcttggagtgatacattctgctgcctgtatggaatcatgtggtcttttgcatctggagtcaatgtgaacaagcagattgtcgtattgtctttctcgtaataaatttgtcgatgttgagcccttaggctgttgttggtacattggtacttcgtcgatgcttgaattgggaccctttgtccgttttcctagactctgatgctgtatgcaactgaaacaagtaaatctatgatcttaaggctgcagtatgttcttgttactctgcttttatctagtttccattggttgtgct

SEQ ID NO: 1388 - DNA, 455 bp, Zea mays
  Clone ID: 700151887_FLI
tgatgagatcaaggctgcggtcaaggccgaggcagaaggtagcctcaagggcatcctgggttacgttgaggaggaccttgtttccaccgatttccagggtgacagcaggtctagcatctttgatgctaaggctggcattgccttgaacggcaacttcgtgaagctcgtgtcctggtacgacaacgagtggggatacagcacccgcgtggtcgacctgatccgccacatgaacagcaccaactaagattatgaagaactcaaggtctggtgatacgagcgagttgtcttcttcccccccggagaaaagtgcttccgagaataaattttttccatcggaatgtctgaaactatgttgggtgtatcctagtggttggttgagcattaatggctcatattttgtcaggtctatgtgtcgccgtgaaacttttaatcaaatcagttcactcttttgcctc

SEQ ID NO: 1389 - DNA, 887 bp, Zea mays
  Clone ID: 700151903_FLI
ggaagctgttatgttggaccttcttagaatagttgggcatcacaaagcaaggcttgctacccaaattcgaacagttcagaaatcatatggcaatgcagacttcgataacattccttttggagaggacatgtatagtcgagtccgtggccggccacttctgattgatacatctgcaaggatcagtgatgacaaacccaggcctcgacctgtatcatcacgtgaggagcagaaagtcaagacaaatggctcggtagatattaagtccagttcccctgaaaatgctagttcaagcaactctgaaaagcaggagccgaaaaaaatggtgcctgaagatactcgggtgaagaacattaagggtgataatgtgatgccagtaacaccatctttagatcctgctacgtcaacttctaaggctggtaaagggaagacacgggaaccagagcccactgagcggcaaggagatgggccagtctcggtagctaatccaaagaaagaatctagaccagtttttgaggataacattgttctgggcgtagcccttgagggttccaggaggacactgccaattgaagaaggaaatcctcatctatcactatctgagactgaggtcgacaccgaagaggcggcttcatcgccgaaggataagataggccaaagcccaaaactttgaggtccagaaaaaagccgttcagaggaatctcgataggtcatccgagttcaaactgtatccttgtgaagatttgtcaccaagcctaccttttttgtgcgcttgtgcaaatacaatgccaccacacatcagtgttgtatgcttaaggggtaaattcacactgacgattattcagggaacattacctgttgaaatataaatatatcagtcgtattgctac

SEQ ID NO: 1390 - DNA, 1339 bp, Zea mays
  Clone ID: 700151920_FLI
cgccattcgccaccctctccgttccattccaatccgttcagcggtcagcggaacatgatacgcctgcttgccgcgcttgcattgaggggagttcggggagcggccggtgcggaaggaatcgacacagagttcagttcacatggctgctgaatcagagaacggcaactgcaaagcttgggcagcgagagatccttctggagttctctcaccacacagttttaaccgcagagcagtgcaaagcggcgatgtttcgctgaagatcatatactgtggagtctgttatgcagacgttgcttggacgcggaataagctcaatgattcaaaatatcctttggttcctgggcatgagatagctggagttgtaactcaggttggtgcagatgtcaaaggctttaaagtgggtgaccatgtaggtgttggaacatatgtgaactcttgccgtgattgtgagaactgcaatatctctctagacaaccattgcccaaaagcagtttatactttcaatggcattgatacagatggaactgtcacaaaggggggttactccactcacattgtagtccatgaaaggtattgcttcaaaatacccgatggctaccctttggcgaaggcagcacctcttctgtgtgctggaataaccgtgtatactccaatgatgcgacacaacatgaaccaacctggaaagtcacttggggtcattggtcttggtggtctgggtcacatggctgtgaaatttggtaaagcatttggtcttaaggtcacagttttcagtacaagtgaatcaaagagagatgaagccatcaacctccttggagcagataattttgttatatcatcagacacacagcaaatggagtccctgaagaactccctgcacttcataattgacactgcttccggtgaccatccatttgatccgtatttctctctccttaaggttggtggtgtgatgacattggtaggttttccaagtgagatcaaaatgcatcctgcaagccttatacttggtgcgcggaccttgtctggcagtgttgttggaggtataaaagacatccaagaaatggttaacttctgtgcagccaacaatatctatccggagattgagatcattaagatagattatatcaacgaggctctcgcgaggcttgttaatcgagatgtgaaataccgctttgtaatcgacatcgagaactccttcaagtagcgtgctagtgcacatgctctcgtctttctgttagtgttcaacagttcaagagctattacaaatgtgagtcatgccaaataaacttgatgtaaacaaccataattgaacagcaaggggaaacaggtatattgtgat

SEQ ID NO: 1391 - DNA, 630 bp, Zea mays
  Clone ID: 700151981_FLI
tgccatctgtgagtccctcgtcatcgtcgagtacgtcgacgagaccttcgacgggccgtccctcctcccggccgacccccacgaccgtgccacggcccgtttctgggcagacttcatggacaggaagctcctgaagccgttctggctggcgcactggacagagggcgacgcgcagaaggctcaggtggaagaggccaagcagaagctggcgctcatggaggcgcagctcgacgggaggaggttcttcgggggcgacaccgtcggctacgtcgacatcgcagcctgcgtgctagctccttggctcagcgtcgtagaggaggtgactggagtggccgtggttgacgaaggtgagttccctgctctgcgccgttggtccagagagtacagctcctgcgaagctctcaagcagtgcgtcccggacagggaccagctcgtcgccttctatactgaaaggaaggaggcgtacaaagtgttcgctaatgcatggttgcagcagtagtttggttttgtgtgtggaataataatgtatggatcacagattgtctgtgctgaaataacagtaatgagcctagctagataagtaaataaccatatgcatgtctcagaaaagtttagatgagttgaccatcg

SEQ ID NO: 1392 - DNA, 809 bp, Zea mays
  Clone ID: 700152006_FLI
gtcgtctcctgcgccgacatcgtcgcgctcgccgcacgtgaatccgtcgccctgggtggcggcccggcgtacaagttgccactgggcaggcgcgacgggctggcgccggcatcgaacgccgccgtcctagcggcgctcccaccgccgacgtccaaggtgccgacgctgctgtccttcctggcgaagatcaacctggacgtgacggacctggtggcgctgtcgggcgggcacacggtgggcatcgcgcactgcggctccttcgacaaccggctgttcccgacgcaggacccgacgctgaacaagttcttcgcggggcagctgtaccggacctgcccgaccaacgcgacggtgaacacgacggccaacgacgtccgcacgcccaacgccttcgacaacaagtactacgtggacctgctcaaccgggagggcctcttcacgtcggaccaggacctgctgaccaacgctaccacgcgccccatcgtcacgcgcttcgccgtcgaccaggacgccttcttccaccagttcgtctactcctacgtcaagatggggcaggtcaacgtgctcacgggctcccagggacaggtccgcgccaactgctccgcgcgcaacggcgccgctgctggtgacagtgacctgccgtggtcgtccgtcgtcatcgagaccgtcgcggacgccgccggtagcctcgtgctctagataataagcaaataagcagtttgaagcttgcttcgcatgcatgttgcaacaaataagcagctagtagcgatcgatcgattggaaataaagcagctagtagcgatcgttattac

SEQ ID NO: 1393 - DNA, 1524 bp, Zea mays
  Clone ID: 700152013_FLI
gtacgtgtgaatgtgcatcaaacgaataaattatatttcgtttgtttaaggctacatggcatactttgcagatttgtggccattgtgtttggtattcattataaactgccatctttatttgtgtcgtgatcataggaatgtggatagcaagaataatgacagggtattatgtactattaaatttccatattccatgcctttgcgtcagttgtctttgccccttgtatgagtatctttgttgttgaacaggttgttctacctgaagggtcaaaggatatcgaagtttcagctccctttccaacacagcagcagcaagaggttaagtattcacaccttgacattgtcggaagaccagttgttgtcttggagaaacctgatgttattccagagcataatttgtatttccaggtttgtcgccagattcatttttgggtaatttgtttggataacggttttatgaaaagggtaacttgtgcttctattgttggtcggaccaaataatcagttgatgaagtattggttcccaacacacataacagcactaaaagctgcagtatgaaatgcttacttgagctacttctagtgagttaaattgtttgtttatagatagataccaactggagaaaacttatttgatgaatcatttgcaatatgcaggtttgtttatagatacataccaactggagcaaacttatttgatgaatcatttgcaatatgcaggtttactacagattcaacaacatatccttgctcagagagccgttgatgctgattactggtttcttcctcctgtttgtggcctgtattgtttacatgcgtactgatatgtcaatatccaagagctctccttcctacttggccaagctgcaatgggatgaggtgcaagcaactgttcagaaaatccagggtatctttgagcaatgcttagcagttcatgataaactggaggcctcattgcgggatttgtctaggacaggagacattcagtcttgcaaggcagctcgtaaagctgctgacacgcagtttaaggagctatcgaaagatctgaagccactgttggcgactctacagtcatctccccagtcttatcagatattgccaaaggtagaggacttgatcgtaaaggagagagagatgcaggagaagctcatgacaaggcattccaccgttgtcgacagctttgagaagaagctgcgcgggcaagatgtagagaacaggattgctttgcagcagcagaaaattgctgccctgaggcaggaggttgaatctcttttagagtacattagtgagatttgagcaaatgagtgctgctgtggcgtgatacatctttagcgattagactgcctttgtttggtttagggtttaccccaatattgaaatctactactctgagattgtgtcggtaaccatctagtttcccagttgagagacctggaagttgcaatgaccttgtaacatgataatcagtgtaattctggagctgactaaatttttgcatttaatatcaatatcacaggaaccgtc

SEQ ID NO: 1394 - DNA, 1748 bp, Zea mays
  Clone ID: 700152054_FLI
ctcctcgcgctcgtggccgcggaagggggcgaagaggggccccgcgggcgccggctgctcgtcctcctggacgacctggccgtgcggtcgtcgcactcggccttcttcggctcgctccaggcgcgtgggttcgatctcgacttccgcctcgctgacgatccaaagctctcgctccaccgctacggccagtacctctacgacggcctcgtgctcttcgccccctccacaccacgttttggtggatcagtggaccagaacgcagtcctcgaatttattgatgctgggcatgacatgatcctggcggcagattcctctgcctctgatctcattcgtggcattgcaacagagtgtggggttgattttgatgaggatccagaggcaatggttattgaccatatgaactatgccgtcacagatgttgaaggtgatcacaccttgattgctggtgacgatcttatccattcggatgtgatactagggtctgaaaagattgaggctcctgtattgtttcgaggaattggacacatggctaatccatcaaacagtttggttctgaaggttctatcagcctctccatcagcatattcagctaatccaaagactaagttagcgtctcctccatcgctcactgggtcagctatatcattggtttcggttatgcaggcaagaaataatgctcgggtgctgttatctggatcactcgatctgtttagcaaccggttcctgaagtctggtgttcaaaaggctgatagcaaaacaagatatgagagagctggaaacgagcaatttgtggcagagataagcaaatgggttttccatgagaggggacatctaaaggctgttaatgttaggcatcacaaggttggggagaccaatgaaccaggcatgtaccgcattaatgatgacctggaatactctgttgagatctatgaatggtccggaacaagctggaagccgtatgttgctgatgatgtgcagcttcaatttttcatgatgagcccttacgttctgaaaactatgtcgactgacaacaagggtttgtattcaacaaccttcaaagttccagatgtttatggagttttccagttcaaagttgagtaccaaagactgggatatactggtctgtcttttacaaagcagattccagtacgtccttacagacataatgagtatgagagattcataacatcagcgtacccatactacaccgcctcattttcaacaatgggtgctttcttcgtattctcgtttgtgtacctgtaccacaaataaaggactcatgggagcgcacaagtctctggaggctgacgtgaccaagatctgtgggcactgaatgttgtgctataagccaagagttacccggcgccaattttatggaaccatgtttttgtactgccaacttagataacatttgacgaccgtgaccgcactcatgggaaatttactcgtgctaggatgttcgatctgcccccacggagcgcacaagtctctggaggctgacgtgaccaagatctgtgggcactgaatgttgtgctataagccaagagttacccggcgccaattttatggaaccatgtttttgtactgccaacttagataacatttgacgaccgtgaccgcactcatgggaaatttactcgtgctaggatgttcgatctgcccccacttcttttttttctttcttggaccctttctgatcagcacttgtcagaacgtttacagtctatagcactgaaacgtgattttgg

SEQ ID NO: 1395 - DNA, 756 bp, Zea mays
  Clone ID: 700152089_FLI
cattcactcacacagcaaatacccacagtccacagcaagaaccgaagatgttcggaaacatcggaaagatcccgatcatcggcgacctgacgggcagcaacaagaatgcgcacctcaagggcaacctggtgctcatgcgcaagaccgtgctcggcttcgacgtcaccagcatcgccggctccctcatggacggcctcggcgagttcctcggccgcggcgtcacctgccaactcgtcagctccaccgtcgtcgaccccaacaacgggaaccgcgggaaggtgggtcaggaggcgagcctggagcagtggctgctgcacccgccgccgcttctggccggcgaggaccagttccgcgtcaccttcgactgggaggtggagaagcacggcgtcccgggcgccatcatcgtgaagaacaaccacgcctccgagttcttcctcaagaccatcaccatcgacgacgtccccggccacggccccatcgtcttcgtcgccaactcatgggtgtacccgcagtacaagtaccgctacaaccgcgtcttcttctccaacgacacgtacctccccagccagatgccggcggcgctgaagccttaccgcgacgacgagctccgcaacctgaggggcgacgaccagcagggcccgtaccaggagcacgaccgcgtctaccgctacgacgtctacaacgacctcggcaaccccgacgccaaaaacccgcgccccgtcctcggcggctccaagcaccacccctacccgcgcc

SEQ ID NO: 1396 - DNA, 555 bp, Zea mays
  Clone ID: 700152090_FLI
cctataataaacgggcgccacgcacgccacagccgcggcctgcgagcgaggcatacacatccacgggccacgcccaccggcatctcacggcggaagcagccaagcagccggccgggcgcctcccgtgccgccgctgagcatggccgctgctcccgtgggcgctcagaatcgctgcgtcttcgttggcaacataccatacgatgcgacagaggagcagctcgtgcagatttgcgaagaggttggcccagtcgtatccttcaggttggtgattgacaaagagactggcaagccaaaaggttatggcttttgcgagtacaaggacgaggaaactgctctaagtgcacggcggaaccttcagggttacgagatcaatggtcgtcagttacgggttgattttgctgaaaatgggaggaacactgacagaaatagagaaaaggtcgacgatcctcaaatttttactgtagaagagcctttcctaccacctttggagttctctgttaatctgagaagttgtattgtcttcgttctgtgaatgataatagttgcgccttctcc

SEQ ID NO: 1397 - DNA, 1224 bp, Zea mays
  Clone ID: 700152131_FLI
gcgagaacgttgaggagaaccgccgtgccctccgtgagctcctattctgctgccctggtgctctccagtacatcagcggtgtgatcctcttcgaggagaccctgtaccagaagaccaaggatggcaagccttttgttgatgtcctcaaggagggaggcgtcctccctggcatcaaggttgacaagggcaccattgaggttgttggcactgataaggagaccaccacccaaggccatgacgaccttggcaagcgttgcgccaagtactacgaggcaggtgcccgctttgccaagtggcgcgctgttctcaagattggccctaatgagccatcacagcttgccatcgacctgaacgctcagggtctggctcgctatgccatcatctgccaggagaatggtctggtgccaattgttgagcctgagatccttgttgatggccctcatgacattgatcgctgcgcttacgtcactgagaccgtccttgctgcctgctacaaggcgctcaacgagcaccatgtcctcctggagggtaccctcctgaagcccaacatggtgactccaggctccgactccaagaaggtgacccctgaggtgattgctgagtacaccgtccgtaccctccagaggaccgtccctgctgctgtgcctgctgttgtcttcctctctggtggacagagcgaggaggaggccacccgcaacctcaatgccatgaacaagctcagcaccaagaagccgtggtccctgtctttctccttcggccgtgccctccaggcgagcaccctcaaggcctgggctggcaaggtggagaacctggagaaggctagagctgccttcctcgccaggtgcaaggccaactctgaggctaccctcggcacctacaagggtgatgctgccgccgacaccgagagcctccacgtcaaggactacaagtactgagttgcttctctttgcgtgcccgttttggaactcctgcctacgagctaggttgcggagtgtggtttgctcgttagagcttattttcggacatccaaaaaacatgcttcctatgtgggatgatggttatctttatatttgtatgttaattagtctctttgctgttaaatttcgtgtaagttggtcctgccgatggagaatcgagcagctccctttttttgttctatcaactatgctgtaattctggctatgtatcggcaaaaacaattctatatgctgagttggagtcggc

SEQ ID NO: 1398 - DNA, 887 bp, Zea mays
  Clone ID: 700152141_FLI
cgaaatcccattccccttccccctcttcgtctccgtcggcggcgtcggaccgaacccgagcccggagccctaactaaccctaggaggcaggcggcggcggggatggtgtactacgcgctgttggtgggcgcggagctggatggcctcaccaacctgcagccccgccacggctgcgacgaccccaacttcccctactacctcaagctcaagtgcgagaactgcggggaggtcaccgccaagtccacctacgtcaccctcagcgagcaagtcgacctgcccaaaggacacggcgccgctcacctcgtccagaagtgcaagctttgtgggagagatggaacaattgtgatgattcctggtcaggggacaccacttactattgagcagagccagaaagaggagaagacttgtttgatggtgtttgactgcagaggctatgaacctgttgagttttcctttggcactggctggaaggctgaatctgtgcatgggactccttttgaaattgactgctctgaaggtgaattttctgagtatgatgagaagggagaatgccccgttgagctaggcaagctgcagtcaacattcaaagtggtgaagaagcatgagaggggtgggaagactagatttgtctagatcgagtgacttggaatctgacagatattggagttggcggtgtataaatggtagatttgggctgaaggtcatgcgtgatccgacctcctttttcttctatctgttgattctgtggatgccgtgaaccatgcgaagctttcggtgatagtgtccacaggagcattaccctgtaccgaaactgatctttataacttaccaccaatgctcgaacatgttgctggttgctggtatttttagcactgttctctctggct

SEQ ID NO: 1399 - DNA, 1698 bp, Zea mays
  Clone ID: 700152154_FLI
gttcgcttctccgttctcccccaaccccaattcgccttcacctcgccgcttcctccattgaccgccaccgttgacgtcgtcttccggcgaggtagctcgccggaagacctcacctggactttcccgaagcaccctccacacactctttaaccctccggaatggccgcctgcttctagctcgtcgacgccccaatctccgcttgcttcctcgacagccccatccgcctcttctcgctctcgctacggctcctctgcctgttcgccatggcgatccgcatcaccgtctcctactccggctacgtggcgcagaacctcgccgcgtcgctcggccaccgcttctcctccgcctccgcctcgggcagccgcctcctccatgacggcgcctggcgccccttctgcatcttcacctccacccgccagcccgagaagcaccgcagtagcggcagcgaccgccatgacggaggcgactacaaccacccgaagccccaggccatcgccgccggagctcactcgttgctgctcacgcgtgcgtgcttatcgtccaagtcgccgccgccgtctcttgccgtggggctgctctcggtgctcgcgcagaggacgggaccgacgcctggaaccaccggatcggcggcatctctctcaggctcgtcgccgatttccctcggtttcaaccccacctccttcctcccgttcctgcagacagcgaggtggctcccgtgcagcgaccttgccacctcgtcgtcttcggcaccctcttcccctccccgctcgcttgcgccttcggctccccccaagaaggcgttgattggtgctgctactggttctaccggaattgcgacgagcagtggtgctggtgcagcgatgagcaggagcaactggctgtcgaggtgggtcagctcctgctccgatgacgccaagacggcgtttgcggctgtgaccgtgccacttctctacggctcgtccctggccgagccgaagtccatcccgtccaagtccatgtacccgaccttcgatgtcggtgatcggattcttgctgagaaggtctcatacatattccgggatccagaaatttcggacatcgtgatcttccgggctcccccaggacttcaggtttatggctacagctcaggtgatgtgttcatcaagagagttgttgccaagggaggagactatgtcgaagtgcgtgatggcaagctgtttgttaatggagtagttcaggatgaggattttgtgctggagccacacaactacgagatggaaccagtgcttgtgccggaaggttatgtgttcgtgctgggagacaaccgcaacaacagctttgattcccacaactggggtccacttccagtgaggaacattgtcgggagatctatcctccggtattggccgccatcgaagatcaatgatacaatttatgagcctgatgtgtcccgcctcgcggtgccgtcctcgtagtagtcgttgcagtgatgctggatatccagtgtgtgtgtacaatgaccttattacttcgtggagcctcatttgatgagctgagctccagttccaattctctcagaatattttgtctcctgagtgttccctgtaaattctctttgcctgacagatttgttttccctgccgcttggcagatgcttgttcaaagcacgggaaagtgtagtaccttgcatcttgcaatataaactaattaaaccggtt

SEQ ID NO: 1400 - DNA, 3263 bp, Zea mays
  Clone ID: 700152157_FLI
gccgccgccgccgccgcctcatctcatccccatcacccactcccggcggatcgtcgatggcggcgccggcgatatggcagccacaggagcaggggctccacgagatctgcaccctcctggaggcgcacatctcccccaactccgaccaggcccgcatctggcagcagctccagcactacagccagttccccgacttcaataattacctaaccttcatcctggcccgcggagaggggaaatcaattgaagttagacaggcagctggtctactactgaaaaacaatctgcgaacgactttcatctctatgcaaccttcgtcccagcattatgttaagtctgagctgttaccatgtataggggcaaccaatagggctattagatccacagttggaacagtgatcagtgtacttttccaaattgtacgagtcgctggatggattgagttgtttcaggcactccataagtgtttggagagtaatgacctggatcacatggaaggtgctatggatgcgatatacaagatctgtgaggatgtccctgaagagctcgatgttgatgttcctggtttgtctgaacgaccgatcaatgtgtttatgccaaaaatactgcagttcttccagtcaccacatgcaagtttgagaaaactatcgttgggttgtataaatcagtacatagtagtgatgccatcggcactctacatgtctatggatcagtatattcagggattattcaaccttgcaaaggacccttcagcagatgttcggaaactggtttgttcagcctgggttcagctcattgaagttcgcccatctattttggagtcacatcttaaaaatgttactgaattgattctgcaagctaataaagatccagatgatgaagtcgctctggaagcttgcgagttctggtctgcatactgtgatgtgagcatgcctcctgaaggtttacgggagttcttgccacgcttaatcccgactttgttgtcgaacatggtatatgctgatgatgatgagtcccttgatgatgctgaggaagatgaatcctttccggacagggaccaggatttgaagccccgctttcatgcctctcgattgcatggatcacaaactggagatgatgatgatgatgatgatgctgtaaatgtctggaacctgcggaagtgtagtgctgctgggttggatgttctctctaatgtgtttggtgacagcatccttccaactttaatgccattgattgagcaaaacttggctcgaacagatgacaattcttggaaggagagggaaactgctgttttgtgtctaggcgctatagcagaggggtgcattggtggtctatacccacaccttcctcagattgttgccttcctaatcccacttcttgatgataaatttcctcttatacggagtattacgtgttggacgctctctcgatatagcaaattcattgttcagagccttgatcatccaaatggacgtgaacaatttgataagattctcatgggattgctaagaaggatattggatactaacaaaagagtgcaagaggctgcttgttcagcgtttgcaactcttgaagaggaagcttctgaagaattagtaccccacttggaagtaattttgcagcacctcatgtgtgcctatggaaaataccagagacgaaatcttcggatactctatgatgcccttggtaccctggctgatgctgttggagcagaattaaatcaggcaaaatatctagatatatttatgccgcctttgatcacgaagtggcagcaactttccaattctgacaaagatctatttccactccttgaatgctttacatctattgcacaggcattgggaccaggatttgctcagtttgcggaaccagtgtttcaaaggtgcatcaatcttatccaatcgcaacagttggcaaagattgatcctactgcagctggtgcggtgtatgatagagaattcattgtttgttcgttggacctactgtctggacttgcagaaggtcttggcgctggtattgaaagtcttgttgcacagagcagtttgagagatctgcttttgcaatgctgcatggatgaagcagctgatgttcgacaaagtgcccttgcccttcttggagacctttctagggtttgcccaatacatttgcatccacgtcttcaagaatttcttactgttgcagcaaagcaactgaaccctcagtctgtgaaggatgcggtatcagtagctaacaatgcctgttgggctattggagaattagcaatcaagattggcaaagaaatagcacctgtggtgatcaccgttgtttcgtgcttgattaccatcctaaaatccccagagggtttgaacaagtcacttgttgaaaatagtgcgatcactcttgggaggcttagctgggtctgtccagacatcgtggcccctcatatggagcatttcatgcaagcatggtgcagtgccttgtgcacgatcagagatgattttgagaaagaggacgcgtttcatggactgtgtgcaatggtggcagcaaaccctacaggagccgctggttcattagcttacatctgccaggcctgtgcaagttggactgagataaaaagcgaaggtcttcacaatgaggtgtgccagattctgaatggctacaagcagctgcttggaaacaacggtgggtgggaacaatgcatggccgccctgaaaccagacgttgtgcagaaattagctagatacggagtatgatgagaagcaagctcgtgtggtttattcacctcatacaccgaccatcatctttatggcggagacaagagaggagcagaaaggggtgggggtcgtcgagagtgtctctgctgctgatgcatcatctttacatgtgtggcacttgagagtcgattcggttcgttggtacgccattgtccgttcgttcattgttatactggttggtgcacagcatttccagagcgagagtaggatgtcttggtaaaccccccatgtgtattggttggttgggccagtggacttggttttggtttttttgtcattcctactggcaaacacaacaaggccaccaccctcttgctcgccccaccccggcaacattgagaaaacagaaaggttttgtagcgtgtaattctctctcttttcttggtttcttattattattaggtgtaggattgttttcgagtcttgtttggcaggaagggtttgtacgagaaatcaattgattgctcactcaccacaaaataataaaaaagatcgatcgatggggcttgt

SEQ ID NO: 1401 - DNA, 3526 bp, Zea mays
  Clone ID: 700152164_FLI
tgagttggatttgaccaactcatcttcagctccaacggttccactggcagttagtacagagaatgccgacagcacagcagtaaccactgctgatgttcctgggacagatacaagctcaagaagaccatcttctgagggtactggtgagcctggagtggaaagcttcactgtttctgctgttgaatgtgacgaaagcaagaggactcacaaagttgtgaaagatcctagcaaggataatatttcttctgatgctaccaaacatgaattgcctaaggaatgtgcagtggactctactgaacaagcatcagcagtgacttctaacactgatgattcatatgcagcacctctagtaactaatcaggagcagttgctgaaagggtctgcttctgagaaacaagctgtgatgaataactcatccaagaattccgatacttcagcacatttttttgatggcaatgatgtgggcgtgacaacttctggaacttcagagcctactgctcaaacttccaatgatgaaggtgactcagatattagtccagaaacagacctagctgtttataatgtccctctaggttcatctgagctacaactgaaatctgagagtagggcaaatgatcaacagcctgctgcaccaacagtatcagttcgaccggtatccagggaaaagcctagtacaaagtccacagctgggaagaagaagaagaaaaaggaaatgcttgctaaggctgatgctgctgggtcttcagatctttataatgcatacaaaggaccagaagagaagtctgaagttgttggtaccgtggagggtgctgataattcttcaacagttgatacaactcatgtactgtctgacgaattagaaaaggatcctagtacatctgcagatgattgtaagaaaaaagttgagcttgatgattgggaagatgctgcagacatgtctactccaaagcagccatcagattctgggaatcaggctagcatcacccaagtgttggattcagacgtaactgaagcaaatagcaggaagaaatactcacgggattttctgttaactttgcaacatcactataccggtcttccttttggatttcagatgaatgaagctgtcaatgctataatgaataatttggcaggaaagtcttatgttgctgaccgggaacctcaccctagtcctggaaggggtttggaccgcccaacttctcgtgaccgccgtggtgctgccatggctgacgacaggtggactagggcgggtgttcctctcagtcctggtcgtgatgttcacatggacctgccaaatggaccatcagttatcaactaccgtggcggcccaggaggtaatcatggtgttttaaggaatccacgcagtcaatcatcaaatcagtatggtggtgggcttcttgcaggacccatgcagtccgttggaccgcaggtacctcgcagcggctctgatgctgatagatggcagcaaaagggtctcatgccttctcctggcacacctgtacaagcaatgcacaaagcagagaggaagtatgttattgggaaagtttctgatgaggaagaggcgaaacagaggcagttgaaagctattcttaacaaactgactccacagaacttcgaaaaactttttgaacaagttaaggaagtcaacattgacagtgtagcaacacttactggggtcatttcacagatatttgacaaagctttgatggaaccaactttctgtgaaatgtatgctaatttttgcttccatctggctggtgccttgcctgacttcagtgaagacaatgaaaaaatcacattcaaaagattacttttgaataaatgccaagaggagtttgagaggggtgaaagagaagaagctgaagctgataaaacagaagaggaaggcgagattaaacagaccaaagaagaaagggaggaaaagaggatccgtgctcgaaggcgcatgctgggaaacattaggttaattggagagttgtacaaaaagaggatgttgacggaaaggattatgcatgaatgcattaaaaaattgtttggaaatcatgatgatcctgatgaggagaacattgaagcattatgcaaattgatgagtacaattggtgatatgattgatcatgtaaaggcaaaggagcacatggatgcctattttagtatgatgcagataatgtcaacaaatcagaagttgtcttctcgtgtaaggtttatgttgagagattcaatcgacctgaggagaaataaatggcagcaaaggcgtaaagtcgaaggtcccaagaagattgaggaggttcacagagatgcagcacaagaaagacatgcccagtcgagtaggttgggacgtggtccagctgttagttctgttccaagaagagcacatcctatggattatggccctcgtggaccatctgcatcagcatcctcaagttcccaacaagggagcattcgaggaatgcctccacattcgcgtggttcacaagacatccgacatgacgaaaggcaccagtttgacaatagaactgttcttccccagcgggtagtcaaagatgaagccatcactcttgggccacaaggtggccttgctaggggtatgtctataagagggcagccaccagtatcaaatactgaaattccttctgttattgaccaccggaggatagtatctagttctaatggctataactctgcggctgattggacatcatcatctggaagagaagattctaattcaagacttccagatcgaacctctggccgaattcctgcttctagtcaatctgctgtaacttcgcagaggcctgccagccaggaaggccgttcaagaagtaaatcatattctgaggatgagttgagagaaaaatctgttttgaccattcgagaatattacagtgcaaaagatgaaaaggaggttgttttgtgtattgaggagctgaatgctccaaatttctatccatttcttgtgtcactttgggtaaatgattcctttgagagaaaagacatggaaagagagttgttggctaaacttctcgtcagcctttgcagtggtcgacataatttgttgagcaagcaacaactcagtgatggcctttcaaatgttcttgcctcattagaagataatctaagtgatgctccaagagccactgagtaccttggacgacttcttgcaaggtttgtggaggaaagcatattgctcttgcaagaggtaggtaaattgattcaagaaagtggagaagaaccagggtacctaatacaaggcggtattgcggctgacatcctaggtgcagtcctggattccataaaatcagacaaagggaattcattcttggatgagatcaagacaacttcaagtttaaagttggttgatttcagaccacaacatcttaagcgatcaaagttggacgccttcatgtaggcacataagttattgttacctggtaagtctgttctagtccaggtgtaaatattgttcttgggtagttatttgttctgaagacatacacttgatttaaatactctgaactattctgatgac

SEQ ID NO: 1402 - DNA, 1070 bp, Zea mays
  Clone ID: 700152168_FLI
aaaccttcttgtggacggatgcgaaatctcaggccacggccacaccacacccctctcccctccctccaccttctccctcccacgccggtccttcttgagcgccgtgagtcgctcgcccgtgtccgccgcacactattccatgtcagccggcgtccgccctctccaccgagcgctgcatcaacgctggccacgccgcggggcagaagcagcagggcagccacagccctgacgccttgcgtcgaccttggaccctcttttggcgccaacaataggaggaggagcggagccacgttccccgcgccgccgctcctgtcccggatgctgtcacccaccacgcggccggcagctcggactgacgagagatctggcaccagcccggagaagcccctgttgcgccggtgggtactgcgggcgccgtcgagaggatctacgtggttagggttgcagtccccaagtgcgatgagatccagaacgccatctccgacgaccttgtgcaccgggtccggaacgatgtcggcgggaggtgaagcagagatgaaggagctgcccgaggagcttgcctgcctcgcatgcgaaacatcggcccaagtggtggcggcgggacctgccgcgtcggcaccgcttatgtgtcgcatgaagaagggcgagcccatcaagctcgtcttcaccggcaagaagaagggaatcactcccgtcgcctccttcagcgccctcgacaaggagggcgaggaccccaccccgtctgccgcagccgagccgaagcccagcaacgatccagccgaggacgacataagcactttatagaaaataattctcacaggtggaagcttgttgcagtctacagaattaggcgacactcttactggttgccttttgatttaactaccattcaaattagcaactcttgagcagatttattagatccaattgctgtcaaaggataagatgacctttatatagatttttcagttgccatttcaacgatttattgtgattgtaatgctcgcccctatatcaggaaggtgggcatatcagtatcttggatgacgactctactgaatgatgtccat

SEQ ID NO: 1403 - DNA, 2349 bp, Zea mays
  Clone ID: 700152172_FLI
ccgtcctcctcctcgtcctcctggctgcccatgtcgtctccacctccgcccatgccgagcctcctcttccgagcccttacaacacctccgcccatggcgagcctcctcttccgagcacttacaacccatccatgtgctcggaatcgttccggtgtggcggcgtcgagatccgctacccgttctatcttgccaacgcaaccgccgactacagcgggaactactactcctgcggctacaccgacttgagcgtttcctgcgaactcgaggtcgaggggccgtcgacgacctggacccctaccatccgtctcggcggcgacaactacaccgtcaagaacatctactatgactatcataccatctcactggcggacagagatgtgctcggaggcggcggctgcccgtcgtccgccacaacgtcagcttcgacgagacgtggctgcacaacgccagcgccttcgacaacctcaccttcttcttcggatgccactgggggccacgcgatacactgcctgaatttgccggcaacaacatcagctgcgccgggttcagtactccaactgtcagtggaggctccttcgtgttcaagcctgaagatcttgacgaacaagaggagcaggagttggcttcacactgcgacgaggttttctccgtgccagtgggaagcgatgctctgcgggcgaccgacaccttcagcctcacagggtacgggtacggcgacctgcttaggcaggggttcgagttggaatggaatcggacatcggaggatcagtgtggccagtgcgagggatcgggctcgggctcgggctcgggctcgggcggatggtgcgcctacagccagaagagagaattcctgggctgcttgtgcagcggagggaaggtgggcaacccgttctgcaaaccatcgaagtcaaaaaggaaagcaagaattcttgctggtgccctgggtggtggtgctgctgcgctgcttgttggtgctgccatatttttgttcgtcatcatgcgcaagaggaagcagaagaagaaagtgatcaactcgtcttcgaagctcctcaagtacagcggctctggtgggaccccgcgttcgcgggttggtgacatggagtccggcagcatcgaggacccgccaacgcaccacttcacctacgaggagctcgaggaggcgaccaaccgcttcgacgaaagcagagaactcggcgatggcggcttcggcaccgtctacaaagggtacctcagggacgggcgcgtggtggcggtgaagcggctgtacaacaacgggtaccggcgcgtggagcagttccagaacgaggcggccatcctgtcggggctgcgccaccccaacctcgtcatgttctacggctgcacgtccagccacagccgcgagctccttctggtgtacgagttcgtggccaacggcacggtcgccgaccacctgcacgggcagcgggcccccgagcgcgccctctcgtggccgctccgcctcagcgtcgccgtggagtccgccgcggcgctcacctacctgcacgccatcgagccgcccgtcgtgcaccgcgacgtcaagaccaccaacatcctcctggacgccgactaccacgtcaaggtcgccgacttcggcctctcccgcctcttccccctcgacgtcacgcacgtctccaccgctccgcagggcacgccagggtatgttgatccagagtaccaccagtgctaccagctgacggacaagagcgacgtgtacagcttcggggtggtcctggtggagctcatctcgtccaagccggccgtcgacatcacccggcaccgcagcgagatcaacctggccagcatggccatcagcaagatccagaagtgccagctggaggagctcgtcgacctcggcctgggctacgacaccgacccggccaccaggaagatgatgacgatggtcgcggagctggccttccgctgcctgcagcagaacggcgagatgcgcccgccgatcaaggaggtgctcgaggtgctcaggaacatccagggcgagtgtctgacgtcggggaaggatggggacaagagcaaggacgggcccttctctcccaccacggttcacgctccgtgggacagcaggtccacgacgcccaacaccagcagggactaggatagttagtgcttgaggactgagaccggccgaggtttaattcgtgtctgtattgctgctgtgtgactgctaggcatgccatctgttttcaggcttcgtagttagttcctggtgatgtaaatatttgttttgttggtgctgtcaggacagagggaatgcacatacatgtgtaagagtggcgaatggtattatacatatatatacacgggtacttactgaat

SEQ ID NO: 1404 - DNA, 711 bp, Zea mays
  Clone ID: 700152189_FLI
gtcgtgtacctgtgcccggagccgtacccagagacgaacacggagttcctcgagaagaacgggatcaggctccaccagttcggaatcgaggggcgaaaggaaccatttgtcaatatacccgatgacaaaataagggaggcgctcaaagttgtcttagacccaagaaaccaacctctgcttattcattgtaagagaggcaagcaccgaactggttgtttggtcgggtgcttgaggaagctgcagaaatggtgcttgtcttcagtcttcgacgagtaccatcgctttgccgctgcgaaagcgcgaatcactgaccagagattcatggagctgttcgacgtctcaagcttgaagcacctgacaccctcacattgttaaccccaaggcgcgtgatcgcttgatcccccccaacttctagtacatctccaaggctatcttcctgcagctactgaaccgattcagccgtgaataattttggaaccccctagagtccatgaggtagtgatgaaaccattgcagaacattcgtgcttgagaggtttagtttcccccctgcttagcgcactggagagcctgagaaccagactgctgcggtcgatttgcgaggggttctcttttttggtagctctcgcgaggaattcgccattgtttttgggtactgaagcagcatgtactcgagcagcttctgaggaggaatgaactactctctaagtgc

SEQ ID NO: 1405 - DNA, 1440 bp, Zea mays
  Clone ID: 700152248_FLI
tcccacaccacatcctcccctcattcctccttgggttcccagcccgtgcgccccgcctgtcgcagtcgcaccgcagccgccggccatggcctgcctcaccgacctcgtcaacctcaacctctcggacaccacagagaagatcatcgccgagtacatatggatcggtggatctggcatggatctcaggagcaaagccaggaccctcccgggcccggtaaccgatcccagcaagctgcccaagtggaactacgacggctccagcaccggccaggcccccggcgaggacagcgaggtcatcctgtacccgcaggccatcttcaaggacccattcaggaggggcaacaacatccttgtcatgtgcgattgctacaccccagctggcgagccaattcccaccaacaagaggtacagcgccgccaagatcttcagcagccctgaggtcgctgccgaggagccctggtatggtatcgagcaggagtacaccctccttcagaaggacaccaactggcccctcgggtggcctattggcggcttccctggccctcagggtccttactactgtggaatcggcgcggagaaatcgttcgggcgtgacatagtcgacgcccactacaaggcctgcctgtacgcaggcatcaacatcagtggcatcaacggggaggtcatgccggggcagtgggagttccaggtcggaccgtccgtcggcatctcttcgggcgatcaggtgtgggttgctcgctacattcttgagaggatcaccgagatcgccggcgtggtggtgacgttcgacccgaagccgatcccgggcgactggaacggcgcgggcgcccacaccaactacagcaccgagtccatgaggaaggagggcgggtacgaggtgatcaaggcggccatcgagaagctgaagctgcggcacaaggagcacatcgcggcctacggcgagggcaacgagcgccggctcaccggcaggcacgagaccgccgacatcaacaccttcagctggggagtcgccaaccgtggcgcgtcggtgcgcgtgggccgcgagacggagcagaacggcaagggctacttcgaggaccgccggccggcgtccaacatggacccctacgtggtcacctccatgatcgccgagaccaccatcgtctggaagccctgaggcaccccgtggccgtgtcgtgtcggtttgctccgcgtacggcgctggccgttgcatcgcagggcccagcggttgcgcaactattttcccttccccgttctgtttgcttgtactactactctaccgctagtcctgcatagcattttagctagaacacaacaacagccaaaaaaaaatattgttgcttgcttcgacgcttgccaccacttccattccatgccgtccgtccgcttccttcctgtgtaatcctcctccaataatagacgtgccatgttgcatcctct

SEQ ID NO: 1406 - DNA, 1052 bp, Zea mays
  Clone ID: 700152275_FLI
agagaggaaggtcagccagccaaacgccaccgccgccgtgctcgcgccgcacgcaactctcagctctctgacgcctcctcctccgtcgattccgacgagagagacgcaaaccaacgaggtaggaaggagcgcgaagatgggagcgggggacggtgaggtcgctgcgagcaaagacaaggccagcggcggcggcgccgagcggacgtcgctggacggcgtgcgggataagaacgtgatgcagcttaagaagcttaatacggcgctattccctgtccgctacaatgaaaaatactaccaggacgccatcgcctccaaggatttctccaaactagcatactttagcgatatttgtgttggtgcgatagcttgtcgcctggagaagaaggaaggaggagcagtccgagtttatatcatgaccttgggtgtactggcaccgtatcggggtcttggtattgggacaaagctgctgaatcatgtgttcgatctctcagcaaagcaaaacatctccgagatatacttgcatgttcagaccaacaacgatgatgcaattgctttctacaagaagtttgggttcgagataacacagacaatacataactactacatgaacataacgccaccggattgctacgttcttatgaaattcattggccaggctgctacaaagaaatgagaagcagcccgcgcagctttgagagaccactgccactcaagttatgatggagatagttgcgatccggtcacagtttgtgctgtgctttcatttttgtgatcttgaacgctgtagactcctgagtagcctttgctatcatttacattgggagtcatcttgcttcagggcatggattcgtgcctgaacaatttcttgagttgctgcttttgtgggacagctgtgatcttgtaggtctgtatgcccattcgggcttgtatcttgatggatcacgatgtcaggatgttctgcatgctcattttggttgaggtgtgacgattcagttattcatgcctaccattcttgtgcgtagacatgataagataatccccgagcttgaaat

SEQ ID NO: 1407 - DNA, 1225 bp, Zea mays
  Clone ID: 700152286_FLI
ctcggagccaccagggatccaaacctggtgaagaggatcggcgccgcgaccgcgcttgaagtgagagccaccggcatccagtacgcgttcgcgccatgcattgcggtgtgccgtgatccgaggtggggccggtgctacgagagctacagcgaggaccaccgtatcgtgcaggccatgactgagctcatcccgggcctgcagggcgacgtcccgcagaacttcaccagcggcatgcccttcgccgccggaaaggacaaggtcgcggcgtgcgccaagcacttcgtcggcgacggtggcacgcagaacggcatcaacgagaacaacaccatcatcgaccagcagggcctgatgagcatccacatgccggcctacctggacgcgctccgcaagggcgtctccaccgtcatgatctcctactccagctggaacgggctcaagatgcacgccaaccacgacctcatcacaggcttcctcaagggcaggctcaacttccagggcttcacgatctcggattgggagggcatcgacaggatcaccagccctccaggggcgaactactcctactctgtgcaggcttcgattcttgctggcattgacatgatcatggtgcccaacaactaccaaaacttcatcaccatcctgacgggtcacgtcaacagcggcctgatcccgatgagcaggatcgacgacgccgtgactcggattctgcgcgtcaagttcaccatgggcctgttcgagaaccccatgccggaccccagcctcgcggaccagctggggaagcaggagcacagggacctggcgcgggaggcggtgcgcaagtcgctggtgctcctcaagaacggcaagccgggcgacgcgccgctgctgcccctgcccaagaaggccgccaggatcctggtcgcagggagccacgccgacaacctggggtaccagtgcggcgggtggacgatcgagtggcagggcgacacggggcgcaccaccgtcggcaccacggtcctggacgccgtgaaggcggccgtggacccgtcgacggaggtggtgttcgcggagagccccgacgccgagttcgtcaggagcggcggcttctcgtacgcgatcgtggccgtgggcgagcacccgtacacggagaccaagggcgacagcatgaacctgacgatcccggaccccgggccgagcaccgtacagacggtgtgcgccgccgtgcggtgcgtgaccgtgctcatca

SEQ ID NO: 1408 - DNA, 1370 bp, Zea mays
  Clone ID: 700152288_FLI
caagttcgtggttagtgattacgaccagcaagtcacaagtgagggcgggagaggttgaggttgaggaagagcagaggaatccattccaggagtgtttaatggcgggaggcaaggaagcgcacgggtgggcagccagggatgtctctggtcacctctccccttaccacttctcacggagggttcagagagacgacgacgtcaccatcaaggtgctcttctgcgggctttgccacactgacctccacgtcatcaagaacgagtttggcaacgccaagtaccccgtcgttcccgggcacgagatcgtcggcgtcgtcaccgacgtcggctccggcgtcacaagcttcaagcccggcgacacggtgggcgtgggctacttcgtcgactcctgccgcagctgcgacagctgcagcaaggggtacgagagctactgcccgcagctcgtggagacgtccaacggcgtgagcctggacgacgatgacggcggcgccaccaccaagggcggcttctccgacgccctcgtcgtccaccagcgctacgtggtgcgggtcccggccagcctgccgcccgccggggccgcgccgctgctgtgcgccggcgtcaccgtgttcagccccatggtgcagtacggcctgaacgcgccggggaagcacctgggcgtcgtcggcctcggcggcctcggccacctggccgtccgcttcggcaaggcgttcgggatgaaggtcaccgtcatcagcacgtcgctgggcaagcgggacgaggccctcggccgcctcggtgccgacgcgttcctggtcagccgcgaccccgagcagatgagggcggcggcgggcaccttggacggcgtcatcgacacggtgtcggccgaccaccctgtcgtgccgctgctggacctgctcaagccgatgggccagatggtcgtcgtcggcctgcccaccaagccgctccaggtgcctgccttcagcctcgtcgccggcgggaagcgcgtggccgggagtgccggcggcggcgtcggggagtgccaggccatgctcgactttgccggcgagcacgggatcaccgcggatgtggaggtcgtcgggatggactacgtcaataccgccatccagcgcctagagaggaacgatgtcaggtaccgcttcgttgtcgacgtcgcgggcagcaagattggaggctaggcatcaccattcctagtgttctgtcgatcgacgtgtgatttgcttcttcctcgagcgtgtcttattgttctggttggagcacgtatgcggccatcacacgcaggcgtggacaataaacaaggtagagtttcgggttgtgtcgtttctggatgtatggtgccggtggataataaacaagcttaattggcgtggtcg

SEQ ID NO: 1409 - DNA, 1680 bp, Zea mays
  Clone ID: 700152291_FLI
aaatggaactagaccctttcctgggcgtcgtgctcgccaccgccgtcctcctcgtcgccgtcctccgccggaagcgcggctccagccgcaagtacaagatgccacccgggcctaggccgtggccggtgatcggcaacctcaacctgatcggcgcgctcccgcaccgctccatccacgcgctctccgcgcggcacggcgcgttcatgtcgctccgcttcggctccgtccccgtcgtcgtcggctcctccgtggaaacggccaggttcttcctcaggaccagcgacacgtcgttcatcgaccgccccaggatggcggccgggaagtacaccgcctacgactactccgacatcgtctggtcgccctgcggggcgtactggcgccaggcgcgcaagctctggaaggcccatctgttcagcgacaggcagctcaggtcgcaggagcacgtccgcagcgaggagctgcgcgtccttctgcacgctctgtcgtcgtcctcctccgcgggggtggccgggcgcggccggcgcgccatcgcgctcaaggagcacctgctcatgtacagcctcaacgtgatctcgcgcatggcgctgggcgggaagtacgtcggcgagggcggcaccacgggctcgccgatctcgccggccgagttcagctggatggtcgacgagctcttcctcctcaacggcgtgttctgcgtcggggacttcatcccgtggctcggctggctggacctccagggctacgtcgggaggatgaagaggctgggcaagatgttcgatcgcttcctggagcacgtggtggacgagcacgaccagcggcggcggcgggagggcggcgggttcgtccccgcggacatggtggacctgctgctggagctcgccgacgaccccaaactcgaggtccccatcgaacgggatggcgtcaagggattcgcgctggacctgatcgctggcggcacggactcgtcggcggtgaccatcgagtgggccatgtcggagctcctgcggaagcccgaggtcctcgccaaggtcaccgaggagctggacggcgtcatcgggcacggccgcctggtcaccgagcaggacatcccggacctgccgtacctggaggccgtcgtgaaggagaccctccgcctgcacccggtgacgccgctgctggcgccgcggctgtgccgcgaggacgcgtgcacgggcacctacgacatcccgcggggcacgctggtgttcgtcaacgtctgggccatcggccgcgaccccgccgtgtggggccacgacgcggaggagttccgcccggagaggttcgtcggcagcgccgtggacgtgaagggccacgacctggagctgctcccgttcgggtccggccgccggatgtgcccgggctacgtcctcgggctcaagatggtgcaggtcaccctggccaacctgctgcacgccttctcgtggaggctgcctgatagcgtggcgccggagaagctgaacatgcaggagaagttcgggctcgccgtgccgcgcttggtcccgctcgaggccgtcgccgtgcccaggctgccaccacacctgtatgccgggccatgatgcatgtctatgtttgttttgtaggtgcatatacaactgtctcgtaataaaagatacatatcttttctctgtacatatacacctaataaagagacaaacagtatcgtct

SEQ ID NO: 1410 - DNA, 543 bp, Zea mays
  Clone ID: 700152342_FLI
ctgtgctgcgtccaccagcctcgtcgttaggacgtaaggtaagacagccaggggtcagccagtgagtactgactgagtagcccgaagctcagagcaagcgggtgccaactgccaaggggggtgatggcgctgtctcgacgcatggcggctcccgtcctcgtcctcctgctcctcctcgtcgccacagagctggggacgaccaaggtggcggaggcgaggcactgcctgtcgcagagccaccggttcaagggcctgtgcatgagcagcaacaactgcgccaacgtgtgccagaccgagaacttccccggcggcgagtgcaaggcggagggcgccacgcgcaagtgcttctgcaagaagatatgctagtagtagcctaggctttgcttgctggcacaagcaggtcgtcggcacgcaacgcaattcaagcatatcggtcctcctcccgcgttgctgtctactcgatcccgttttctctttcgatcgatttcgttgtttcatgttgctttcttctgttcccgccaataataagctccatgggatctc

SEQ ID NO: 1411 - DNA, 1556 bp, Zea mays
  Clone ID: 700152365_FLI
ctcctcgcgctcgtggccgcggaagggggcgaagaggggccccgcgggcgccggctgctcgtcctcctggacgacctggccgtgcggtcgtcgcactcggccttcttcggctcgctccaggcgcgtgggttcgatctcgacttccgcctcgctgacgatccaaagctctcgctccaccgctacggccagtacctctacgacggcctcgtgctcttcgccccctccacaccacgttttggtggatcagtggaccagaacgcagtcctcgaatttattgatgctgggcatgacatgatcctggcggcagattcctctgcctctgatctcattcgtggcattgcaacagagtgtggggttgattttgatgaggatccagaggcaatggttattgaccatatgaactatgccgtcacagatgttgaaggtgatcacaccttgattgctggtgacgatcttatccattcggatgtgatactagggtctgaaaagattgaggctcctgtattgtttcgaggaattggacacatggctaatccatcaaacagtttggttctgaaggttctatcagcctctccatcagcatattcagctaatccaaagactaagttagcgtctcctccatcgctcactgggtcagctatatcattggtttcggttatgcaggcaagaaataatgctcgggtgctgttatctggatcactcgatctgtttagcaaccggttcctgaagtctggtgttcaaaaggctgatagcaaaacaagatatgagagagctggaaacgagcaatttgtggcagagataagcaaatgggttttccatgagaggggacatctaaaggctgttaatgttaggcatcacaaggttggggagaccaatgaaccaggcatgtaccgcattaatgatgacctggaatactctgttgagatctatgaatggtccggaacaagctggaagccgtatgttgctgatgatgtgcagcttcaatttttcatgatgagcccttacgttctgaaaactatgtcgactgacaacaagggtttgtattcaacaaccttcaaagttccagatgtttatggagttttccagttcaaagttgagtaccaaagactgggatatactggtctgtcttttacaaagcagattccagtacgtccttacagacataatgagtatgagagattcataacatcagcgtacccatactacaccgcctcattttcaacaatgggtgctttcttcgtattctcgtttgtgtacctgtaccacaaataaaggactcatgggagcgcacaagtctctggaggctgacgtgaccaagatctgtgggcactgaatgttgtgctataagccaagagttacccggcgccaattttatggaaccatgtttttgtactgccaacttagataacatttgacgaccgtgaccgcactcatgggaaatttactcgtgctaggatgttcgatctgcccccacttcttttttttctttcttggaccctttctgatcagcacttgtcagaacgtttacagtctatagcactgaaacgtgattttgg

SEQ ID NO: 1412 - DNA, 1433 bp, Zea mays
  Clone ID: 700152375_FLI
gcttcattcttctgaacggagaagccaagtaaggtagatcaagctacggtgtccatggagcaaggcggcaagatggcccatgggtgggctgccagggatgcctccggcctcctctccccttacagcttctcaagaagggttcagggggacgacgacgtgacgatcaaggtgctcttctgcggcatctgccacaccgacctccacatcatcaagaacgagtggggcaatgccatgtaccctgtcgtccccgggcacgaggtcgtcggcgtcgtcacggacgtcggccatggcgtcagcaagttcaaggccggggacacggtgggcgtgggctacttcgtcgactcctgccgctcctgcgagagctgcagcacggggcacgagaactactgccccgacctcgtactctcctccaacggcgtggaccaccaccaccacgacggcggcgcgagcgcgagcgcgaccaccaaggggggcttctccgacgtgctggtcgtcagccaggacttcgtggtccgggtgccagagagcctgcctccggacggcgccgcgccgctgctctgcgccggagtcacggtgtacagcccgatggtgcagtacgcgctcaacgggccgggcaagcacctcggcgtcgtcggcctcgggggcctaggccatctggccgtcaagtttgggaaggcgttcggcatgacggtcaccgtcatcagctcgtcgcctgccaagcgcgaggaggcgctcggacgccttggcgccgacgcgttcttggtgagccacgacgcctcgcaaatgaaggctgcagccgccacgatggacggcatcatcgacacggtctcggcggggcaccagatcgtgccgctgctggcgctgctgaagcccatggggcagatggtggtggtcggcgcgccgagcacgccgctggagctgccggcgtacgccatcatcacgggcgggaagcgggtggccgggaacggcgtcgggagtgtcgcggactgccaggcgatgctggacttcgcggcggagcatggcgtcaccgctgacaccgaggtcgtgccgatggactacgtcaacaccgccatcgagcggctggagaagaacgatgtcaggtaccgcttcgtcgtcgacgtcgcgggcagccagatggataccgttgcttagaagcctggatgcgtagttcgatcgagtcatgtagcagccgtcgttgtgcgtggtgtgaaattgtttgctcgtgccgtctatttgttggtgggtgtgggtcaataaactaggcagaacaattgggccgtatgcatgcatggtctgcacttcctgccattcgttgaatccttatgtacctttgaattttaaatttgactgagaaagtggatgctgaaacaccgtaggtgtatacacttgtttgtacgagcgcttccgacaatctaagccttttgagattgatc

SEQ ID NO: 1413 - DNA, 1385 bp, Zea mays
  Clone ID: 700152392_FLI
ctcgctggctgcaacacggatccagaggccagagcacaccagctgagctcgagcgagctctagtcgttttagcaccggctccggtgtcacccatggccatgaggggagcggcgcagcaggtggcacggttcgccatggggccacacgtccctcacgttattgcgcccgctgagaggagccttcatgcgtccgccgggagcaagaagatcgtgggcgtgttctacaagggcggcgagtacgccgacaggaaccccagcttcgtcggctgcgccgagcacgccctcggcatccgcggctggctcgagtcgcagggccaccagtacgtcgtcaccgacgacaaggacggccccaactgcgagctggagaagcacatcgcggacgcgcacgtgctcatcaccacgccgttccacccggcgtacgtgaccgcggaccgcatcgcgcgggccaagaacctggagctgctcctcacggcggggatcggctccgaccacgtggacctggccgccgccgccgccgcggggctcaccgtcgccgaggtcacgggcagcaacacggtgtcggtggcggaggaccagctcatgcgcgtcctcgtcctcacgcgcaacttcctgccgggccaccgccaggccgtcggcgtggggtgggacgtggccgccgtcgcgcaccgggcgtacgacctggagggcaagacggtgggcaccgtcggcgccggccggatcggccgcctggtgctgcagcgcctcaagcccttcaactgcaggctgctctaccacgacaggctccgcatagacccggcgctggaagcggagatcggcgcccagttcgaggcggacctcgacgccatgctgcccaagtgcgacgtcgtcgtgatcaacatgccgctcaccgagaaaacaagaggcatgttcgacaaggagaggatcgcgaggatgaagaaaggcgtgatcatcgtgaacaacgctcgaggcgcgatcatggacacgcaagccgtggcggacgcttgcgccaccggccacatcgctggatacggcggcgatgtgtggcaccctcagcctgcgcccaaggaccacccgtggcgctacatgcccaacaacgccatgactcctcacatctccggcaccaccattgatggccagttgaggtatgcggccggggtgaaggacatgctagagaggtacttcaagggccaggatttcccggtgcagaattacatcgtcaaggaaggcaagctcgcgtgccagtaccagtgagcatacatgaagatgcagctgcattgagcgaagcttgctgctggctcagcagtcctcagcgactatacatatgtcaatcacctttacttcaaaaacacaatcccaatcaccataaataaaagtcgcgacctttac

SEQ ID NO: 1414 - DNA, 957 bp, Zea mays
  Clone ID: 700152411_FLI
cgaaatgaaccgacctgttgcgtacagacatttcgtcgaaatggttcttcttacgctgagcctgtgtaaatccaggttcgggattgagcaggagtacacccttctccagaaggacaccaagtggcctctcggttggccgctgggcggctaccctggccctcagggaccttactactgcgccgtcggagcggacaagtcctacgggcgggacatcgtggacgcgcactacaaggcctgcctctacgccggcatcgacatcagtggcatcaacggggaggtcatgccggggcagtgggagttccaggtcggccctgccgtcggcgtctcggccggcgaccagctctgggtggctcgctacattcttgagaggatcaccgagatcgccggcgtggttgtctccttcgaccccaagccaattccgggggactggaatggcgctggtgcacacaccaactacagcaccaagtcgatgaggagtgacggcgggtacgaggtgatcaagaaggcgatcggcaagctgggcctccggcaccgggagcacatcgccgcgtacggggacggcaacgagcgccgcctcaccggccgccacgagaccgccgacatcaacaccttcgtctggggcgtcgcgaaccgcggggcgtcggtgcgggtgggccgcgacaccgagaaggaaggcaaaggctacttcgaggaccggaggccggcgtccaacatggacccgtacgtggtgacctcgctgatcgcggagacaaccatgctgtgggagcccagccactccaacggcgacggcaagggcgccgcggctccttgatttgattctgcggagactgagctctgtgtgtgagccggcctgcgtagatggcaaatgggactgaccctgtcagaaacttgagatgaccataataatagctgcagtgtgctcgttctggggttggataagacccaagaacttttttt

SEQ ID NO: 1415 - DNA, 1195 bp, Zea mays
  Clone ID: 700152416_FLI
gcgcttccgcctcgaggcctccgacaggaccgagaccttcctctgcacggtgcccatgttccacgtctacggcctcgtcgccttcgccacggggctgctcggctgcggcgccaccatcgtcgtgctctccaagtacgagctccccgagatgctgcgcgccatcaacgaatacggggtcacctacctcccactcgtgccgcccatcctcgtcgccatgctggcgcaccccaaccgcctgccgctcgggggcctgcgcaaggtgctctccggcggagcgccgctcagcaaggagctgatcgaggggtttaaggagaaatacccgcaggtggagatccttcaggggtacgggctgacggagagcacggctatcggcgcgtccacggactctgccgaggagagcagccggtacggcacggctgggctgctgtcgccaagcaccgaggctaagatcgtcgacccagagaccggcgaggcgctgccggtgaaccgcaccggcgagctctggatccgggggccatacgtcatgaaagggtatttcaagaacgtggaggcaacacaatcaacattgacacctgatggatggctcaagactggggatctctgctacatagatgaggatggttatctcttcgttgtggatcgtctgaaggagttgatcaaatacaaagggtaccaggtgcctccggcagagttggaagctcttttgctgacacatccagaaatcgaagatgtcgccgttataccgtttcccgaccgtgaggtcggccagttcccaatggcctacgtagtgaggaagaaagggagcaatttgtcagagcgcgaggtgatggagttcgttgcgaaacaggtagcgccttacaagaaggttaggaaggtggcgtttgtggcggagattcccaagaacgcctccggcaagattctgaggaaggatctcatcaagctcgccacatccaaatccaaactatgaaaattgtttttcgtgtttacagtgctggaatacgcttgtcgtccacgagcggcgagccattctctacgctgccccggtagtttggttgtagaatgcttgtataactgaagatcccgtcggctatgtgcttgcttgtgtacagtgctctgttctcgtacaatacaatattgggagggaatactaggcgtctgtacgtaggcttggatggaaataatatccggtaatttc

SEQ ID NO: 1416 - DNA, 1097 bp, Zea mays
  Clone ID: 700152422_FLI
gtaatcacgtctcctccgccgcccttgctaagcaaacgcaacctgcaactgcaaacccctcctccgattcctcccccgcacgcggaagccccccgcagctcttcgtccccggaggaccaagaccaccaccggagatgtcgtacgcctacctcttcaagtacatcatcatcggcgacacaggcgtcggtaagtcgtgcctgctgctgcagttcaccgacaagcgcttccagcccgtccacgacctcaccatcggcgtcgagttcggggcccggatgatcaacatcgacaacaagcccatcaagctccagatttgggatacggctggtcaagagtcattcagatccataactagatcatactacagaggagctgctggtgctcttttggtctatgatatcactaggagggagactttcaatcaccttgcaagctggctggaggatgcaaggcagcacgcgaatgctaacatgacgataatgcttgttgggaataagtgtgatctgtctcacaggcgtgcagtgagctatgaggaaggcgagcagttcgcaaaggaacatggtcttatcttcatggaggcctctgcaaagaccgcgcagaatgtcgaggaggcatttgttaagactgctggagcaatctacaagaaaatccaagatggcgttttcgatgtatctaatgagtcttatgggatcaaagttggatatgtagtccctggccaatctggaggtgctggtagctcttctcaaggtggtggctgctgcagctaatctgctaacgcccttatgtacaaaggcatatctgcggtgtagctgcgttatctctatgttgctgagcgtaaaatagttactgctccagggtgctttgttatttgatgcaccaacgggtggcagtgcctgaacgatttgagacattcagttttatttatgtcaggtgttcataaacattctgtaaatcactagattcttcaccgtcattcgtcattaagcgctcacaaattctgtccgtttgcgcgtgtaaataagatacctcgatgcatcgtttggtgcgatgttagtttgtcttttttgaatatgttggaacttggaactccatgttttgac

SEQ ID NO: 1417 - DNA, 1264 bp, Zea mays
  Clone ID: 700152456_FLI
acaaaaggtggaggcaaaacagaaactactaaagatggggatgattcagatgattcagatggcatggatgatgatgctatgttccgtattgatccttacattgcaaggatattcaaggagcgcaatcttcctggtagtgatactaagcaatcccaacttatgcgattcaagcttcgtgtgctgacgttacttgatatatatcttcagaggaatccagggaaagttctggtgctggaggtgtattctttcttaatgcaagcttttgtaaaatcacatggtgctgatggtactgaacagttcaggcaacgtatttccggcatactgcagaggagggtattcaaagggaacgagtatccaaaaggcgatgccgtcgaatttggtaaactcgagagcttgttggagaaagctctgaggttgacatcgcgctcaagatacaacacggttgcttccgtagcacagaacgccacattttggatcctgaagatcatcaactcgaagcactgttctgagcaggagctcgcacgcgtggttgatctgttccgttcaatcttgagcgattacgacaggaagaaatcgcggctgaagcttggctttgtgaagcaggttgctaagaggaacccttggatagggcagaagctcttcggttttgtcctgcagagggccgaaaacacgaaggcgcagtatcggagaaaccagctgctggagttggcagagttcatactgaaatcatgggccgatggcacgtcagagatgttcttgaaccatctgtctcagctgtgcgggttgatacaagcagccctttcagccgttgccgaaaacaagtcgcgccgcaaggaagtgcgcaacttctgcactgggatcctgcagacggtgctgaagcttggtctcaaagaccagttccagaaagcgttgagtcctgaaacttattccctctgcgaggccaagctaggggctgcgtttaccgccttcaaaaagtgatcatgtgggacaccgattaaattcatttcacacagaccgtggatccttggaagttttataagaagaattagtgtatcttctagtttttgagctcggtgagagtaggatcaatcaaattaatgtgtgcttgtgctagacttttagccgcagggagggatgcatgtacaagttgcttgggcccttattggatacaaaatgtttttatgttgttgttgcgtctcgatgctacatattaaagtacgtaaatttgagcaaatatttttttattgaaagagcgtatttggat

SEQ ID NO: 1418 - DNA, 1798 bp, Zea mays
  Clone ID: 700152511_FLI
gccggacggtggtggcatcgccaattcaactccgcatctgaatcggcactcggcagcgcgccagctccatagtgtaggaggaggagatggcgctcacaagaatcggtcttgctggccttgcggtcatggggcagaaccttgccctcaacattgcagagaaagggttccccatctctgtgtacaacaggacaacctccaaggtggacgagaccgtgcagcgtgccaaggcagaaggaaaccttcccgtctacggcttccatgaccccgcgtcctttgtgaactccattcagaagccacgggtggtgatcatgctcgtcaaggccggcgcgccagttgaccagaccatcgcgacgctcgcagctcacttggagcagggcgactgcatcatcgatggggggaacgagtggtacgagaacacggagaggagggagaaggccatggaggagcgcggcctcttgtatcttggcatgggtgtctctggaggagaggagggtgcccgcaacggcccgtccttgatgcccggaggctcgttcgacgcttacaagtacgtcgaagacattgttctcaaggtggctgctcaggtccctgacagtggcccgtgtgtcacgtacattggcaaaggtggatcgggcaactttgtcaagatggttcacaacggaatcgagtatggcgatatgcagctgatttccgaggcttacgacgttctcaagtcggtcggtaagctcaccaacagtgagctgcaccaggtgttctccgagtggaacaagggcgagctcctgagcttcttgatcgagatcacggccgacatctttggcatcaaggacgagcatggcgatggctacctagtggacaaggtccttgacaagaccgggatgaaagggacagggaagtggacggtgcagcaggccgccgagctgtcggtggccgctcctacgatcgaggcgtccttggactcgaggttcctgagcgggctgaaggacgagcgggtggaggcctccaagatcttccagggtgactactactccaccggctcgccggtggacaaggcgcagctggtggaggacgtgaggcaggccctgtacgcgtccaagatctgcagctacgcgcagggcatgaacatcatcaaggccaagagcgcggagaaaggctgggggctcaacctcggcgagctggccaggatctggaagggcgggtgcatcatccgcgccatcttcctggaccgcatcaagaaggcctacgacaggaacccgggcctcgccagcctgctcgtagaccccgagttcgcgcaggagatcatggacaggcaggcggcgtggcgcagggtggtgtgcctcgccatcaacaacggcgtcagcaccccgggaatgtccgctagcctggcctacttcgactcctaccgcagggacaggctgcctgccaacctggtgcaggcccagagggactacttcggggctcacacctacgagagggtcgacatgcctggctctttccacaccgagtggttcaagattgcgcgcaacatctccaacaactgatgagctgctcaacggatggcatgcccggtgttgactactccagtcggtaatgagatttcctgcaggaacttgtctattgatctttgtaagttaattatttatatgaataaaataagagcaaacatgcttgtgtttgggcaccctctgttttctcctccctgttaatcaatgcaccatgctccaaaggtgatgtacataattcagacaagtctcgatgatgtacatgttacagaactagcgaaagagttcagcttggtcgccgc

SEQ ID NO: 1419 - DNA, 1091 bp, Zea mays
  Clone ID: 700152516_FLI
cagcttctgcttgctctggggggaaggagagagagagagcgagagagatctagtagagaggctagctaggtggtcctcgaacgaagatgttggcggtgttcagcgggcaggtggtggaggtgccggcggagctggtggcggcgggcagccggacgccgtcgcccaagacgaaggcgtcgcagctggtggggcgcttcctggccgcctccgagccggccgtgtccgtgcagctcggcgaccacggccacctcgcctactcccacaccaaccaggcgctcctccgccccaggtcgttcgcggcgaaggacgaggtgttctgcctgttcgagggggtgctggacaacctgggtcgtctgagccagcagcacgggctgtcaagcaagggcgccaacgaggtgctcctcgtcatcgaggcctacaagacgctgcgcgaccgcgcgccctacccggccagcttcatgctcgcccagctcaccggctcctacgccttcgtcctcttcgacaagtccaccaactccctgctcgtcgcatccgaccccgagggcagggtgccgctcttctgggggatcaccgccgacggctgcgtcgccttctccgacgacatcgacatgctcaaaggctcatgcggcaagtcgctcgcgccgttcccgcaaggctgcttctactccaacgccctcggagggctcaagtgctacgagaaccccaagcacaaggtcaccgctgtccccgccgacgaagaagagatctgcggtgccactttcaaggtggtggaagggtctactgtcctgacggcgctgcactgatctatcatcatcaggcggaggcgatgcgatgatgatgcagaactttgtacatgcgttggtggatggtggtgtaacatagtggctgccaacaagtcatgctcatgcaaaccgatgaatctatctctgtatcatcgatctcggttgcttgctagtccagactccagacatggctatatatatatagctggtgctaataaataggagtataatcgtcatatcgatcggttgcgtgtggaatgccaatcatgtgtgtaatctgttggcaaataacaaacctctgttcctccc

SEQ ID NO: 1420 - DNA, 2329 bp, Zea mays
  Clone ID: 700152520_FLI
ggttctgtcaaatctccgttgtctggactgcacacagccacacacataagaatggtgacgatactgtatggagtacatactaacagctagtacaaaggtttcccgctggcacgtcgtcgttgtcgttgtcgtgacaaagaaatctgatggcataccaggaattttctcaagaaggggccaattccctgtatgccactggaaaatatactcattccttgtatgccactggccccacatgtcatagacaccaaaaaatatacctatatgccactcagtggcacacaagggatgagtataaaatctgatggcataccaggaattttctcaagaagaagctgggttggtgccgtgcgtgggcttggctgcttgatctgctgtgtgctgtgcgctcctaggcgggcaatgaatgaagccccagccatacgcccgtccaggaggggaaggcgaaggaggcggacttgaaaagcgtcacctcaacctcgtgaccgcgcagcagcagcagcggcggcggcaggcccatggagcctgctcactgctgccaaagcgcctggcgcggcatcgcgtactttccatgtagctgccatgtttggcgcgcgggctaagctgtggtggcgttcttggagtcggatgtgatttttgactcctggccacaagcaagcaccccaacgcactaacggtccgtaggagtggctcctcctgttacagtattactgtgccaaatactcctcgtgtttgttgtttgcttcaatggaggcctaaaggtgctgccgtcttcacagatactcaggcagtaaaagtccccttctctctccctctccaggaggagtcaatgccctccggtttaacattggcgcgcgaggaggcgtcacatttgcgtcctgtggccgtcacatggatgaagccccgccatttacttcctcgtatttaccttgggctgtagatttgagattctgctttatttaaccgctcgctgctacaccgtccgtggtacccgttgtcaactcactgtcactggcttttgtcctggcgctccctcccttcgccatgcccatgcacgtcccagcgttttcagattttcggtcagactaaaatattctccttgtttcaccgtcatccaggcctagacttcggaggaggcccgagcgagcaggctttcctgctgtccaggaccaagcggccgttcactccgtcgcagtggatggagctggagcaccaggctctcatatacaagtatctcaatgccaaggcccccataccttccagcctgctcgtttccatcagcaagagcttcaggtcatccaacagaggtatgcatgcatgttctcaaccacaagactaaaaaggaggttctctacttcaaagctgttatgctagcacctgcaataaataaaccaaacgagaagagagagaaagtacatatattattttgcacaaatgaataaagaataaccaaaccattatatatgccataaagattgaccactgtattgcctttttgagtataaatgtaatcagagcttgacagactctctaacgcagtgagctggaggcctctttaccaaggctacgcaaacgcagactccgacccagaacctgggaggtgccggcggacagacggaaagaagtggcggtgctccaaggaggcgatgcctgatcacaagtactgcgagcgccacatcaataggaaccgccaccgttcaagaaagcctgtggaaaaccaacctagaaaggccaccaaggaggtgactaccgctgctgctggctcgttgccgtgtgccgggccacaaggtagcttgaagaaggcaaaagttaatgactccaagccaggcactggcagctattggacagatagcttaaacaggtaaataccaccagagtcatctccttgttttagcatcatatctgaataataaaatcccaacttaatacttgtgaatcctattataagagcatcgacgatgcttcattttcaagtactaatctggaacagtattagtatgttatggttctaaataatgttagttgccacttagcattcataataataattctcatttcgaaaacattgtacatattttcaggacaatgctgagcagagagaaggcaaacaaaccgacggacgacgagtctttgctgcttagttcgacgaagaacagtcagcccaccttgtccctgctcactcaactgaagcagcagaacaaaccagataagttaggtcccacaccggaaaatgagccgaactcggacacgatgttgaaagcctggggtggcagccaccacaagagcatttcctccacacagcgccatgacgctgaatccctccaatcag

SEQ ID NO: 1421 - DNA, 1333 bp, Zea mays
  Clone ID: 700152522_FLI
gctctttagatccattgacggcggtgctgcttttggcttccccgagactcctgatgaagctgcaagagctgggcttgtgagtggaaaggatcaaatcatcgaccggagtatccaggatgcatacataaatgccatacggagggcgaagaacttcatctacattgagaatcagtacttccttggaagctcatatgactggaagccggaaggcatcaagccagaagatatcgattgtcttcacttgattccgaaggagctctcattgaagattgtcagcaagattgaggctggggagcggttcactgtttatgttgtggtgccaatgtggcctgagggtgttccagaaagtgcttccgttcaggcaatccttgactggcaaaggagaacaatggatatgatgtacactgacatcacacaagctctcgaagccaatggaatccaaacaaaccccaaggactatctcactttcttctgcttaggtaaccgtgaggtgaagcaggagggagaatatcaacctgaggaacacccagaacctggcactgattacatccgggctcaagaggctaggaggtttatgatctatgttcatgccaaaatgatgatagtggacgatgaatacatcatcattgggtccgccaacatcaaccagaggtccatggacggtgccagggactctgagatcgccatgggcgcgtaccagccgtaccacctggcgactaggcagcctgcccgtggccagatccatggcttccggatgtctctttggtacgaacacctggggatgctggacgacgtcttccagcgccccgagagcgtagagtgcgtgcagaaggtgaacaagatcgccgagaagtactgggacctgtactcgagtgatgacctggagcaggacctcccgggccacctcctcagctacccgatcggtgtcactgccgacggcaccgttactgagctgcccgggatggagaacttccctgacacccgtgcccgcgtcctcggcaacaagtcggactacctcccgcccatcctcaccacataggctgcaggctgcaggcagcgccatggcttctctcctgtctggcctcagcttggtgcccctctgtttgtgtttgagatactgaaagttcagatagcagtgtttttattatagttattgagtgataataagtgcattgtgcatggtgggacgataggagttagagttgttcataactacaccagatgacgagattgtgttgccccttgtctggtgtagcttgtgtagctttctgcgttgcagtgctgtttgtaaaggcgacttcagagttcagaattaaaacatggttgctttttc

SEQ ID NO: 1422 - DNA, 599 bp, Zea mays
  Clone ID: 700152532_FLI
gctagctaggagcaggccgcctacgccatcggccgtccacagcaacatgtgctccggctcctggttctggagcagcggcggcggcggcggcagcgagaagcgcccgtctcttgtcgtcgtcaacctcgagcggcagctaaagaagacgctggccgtcaggagaaggaggaggaggttgaggctgaggaggttgcgagccggaggagcagaggccatggagatggtgaacctgaagctgtacctggagaaccggtgcatcatcgcggagaacgagaggctccgggagagggccagcgcgctccgccgcgagaacctcgcgctgctccagaacctgtcgtccaggacagcggccgtgccagagccaggagcgggagctgcgtgagtctgctgcttcgatcctctgccttcctgtctgcctgctgaacatgaagtagcgagctcgcgtcaccctcgttggtgcttgtgctacttgtgtggagtgtggacaggagacacaggccagtggactcctagccctaggtatcatccatctgcttggctgctccgccatgtctgtgatctgtgctcaactgctcatacataaaccgccaggttcctgg

SEQ ID NO: 1423 - DNA, 916 bp, Zea mays
  Clone ID: 700152533_FLI
ctcgtacgacgcttgaagctccaccggccgtccccatccccctacgaccccgatccggccgcggcccccgtccccgccaccgccggcgacggcgagctgttccggccgcggagagctgccgtgcttgtctgcctcttccggggagacggcggcgagctccgcgtcatcctcactaagcgctcgtcctccctctccacccactccggtgaagtttcattgccaggaggaaaagtcgaggagggtgatgctgatgatgtagcaacagcgttaagagagtcaaaagaggagattggacttgatccagctctggtaactgtggttgcctctcttgaacacttcttgtccaagcatcttctggtagttgttcctgttgttggcatactgttagacagacaagcatttaaacctgctcttaatattgctgaggtagacgaaatatttgatgtacccctggagatgttcctcaaggatgagaacaggacatcggaggagcgagaaaagatgggccagacattcacagttcattacttcacttatgagaacggaatccagaagtacttaatctggggtctgaccgcccgcatcttgatccatgctgcttcagttgtatacgagcgaccgccagactttacagagcgaagagcacattttaaattgccaatgttcacaaaggactgctcttcaatgctagcaggacctgctaaacattagtgcacactgcctacgctgctatctcagctacatgctatttggagtacgggatgttgcaccaacatagtttatagaatcgaagaggcgtccaaatcacttgatgtcatatgaatttagattctttcgacaaaacactatagtggcatttatgttcagaacaatgttcgtatatgatgcaccacaaatcatccatgttgatgctgtt

SEQ ID NO: 1424 - DNA, 1697 bp, Zea mays
  Clone ID: 700152577_FLI
ctggttttctctgcgcggggaagaatggcgtcgtggttggagcagctgcagcgcgagctcgccgcccgcggcctcacagtcgcctccatccccggcaagggaaggggtctcatcgctacttgcaccttcttcccaggggatgtcattctcaatcaggaaccttacgcttctacacctaacaagattttagttggatcgagctgtgaccactgtttcacctctggcaacctgaggaagtgctctatgtgtcgagttatgtggtactgcagcagcaactgtcagaaagaagaatggaaactacatcagcttgagtgtagagcaatggcagcacttacagaggatagaaagaagatgcttactcctacaattcggttgatggttcggctggcactcaaaaggaaattacaaaatgagaaggtcattccatcctcaagtatagataactacaatctggttgatggcttggagtctcatatatcgaaggttgatgaaaatcaacttgtgctctatgctcagatggccaatcttgtgagcctgattcttccttttattgagcttgaccttaaggaaattgcacaaactttttctaagtttgcctgcaatgcgcataccatatgtgaccctgaacttaggcctcttgggactggactgtaccctgtcatatccattattaaccacagttgtgtaccaaatgcagttttgatatttgatggtaggacagcatatgttcgtgcattgcaaccgataaataaagatgaagaggtatctataagctacattgagactgcggcagtcaccaagaagagaaacaatgatctgaaacagtacttcttcacctgcacatgtccacgctgtgtaaagggttttgatgaggatgcactacttgaggggttcaggtgcaagaaccaagcatgtgatggctttctgctgcccaactcaggtaaaaaggcttatacatgccaaaaatgtggtgcttctagagatgtggaagagataaaaaatatgagaagcgaaatactacagttatcggataaagcatcttcatttctttcatcaggaaataaggctgaagcaggttctatctacaagataatcgaacagttagagagaaatctgtaccatgctttctcaactactttgctgcacacgtgcgaaacactattgaagatatatctggaattacaagattggtggactgcgttgacatactgtagattgacaattcctgtttatgaaagagtttatccaccttttcatccgatgattggattacaattctatacttgtggaaagcttgaatggttgcttgagttcacagaggatgcactaaaatctttaaccagagcagcagatatacttaaagtaacacatggcgtaaaatcccagttcatgaaagagctctttggcaagttagaggaagcaagagctgaagtttcgtttagactatcctccagacatggacatgatgagtaattttcataactgcaggccagttatgatggacaataatatattgaaattatgcttctactgttgggatcatatttcaaggtacaataaaaaatgtggagactttgtaggcaaagaattagcactgttgtaaaacgattatgtgccgacacaaaataggccctaatttgttgtataaaaaatacaatttggaatttaatggtatatcatgtggtaggttgaactcc

SEQ ID NO: 1425 - DNA, 2433 bp, Zea mays
  Clone ID: 700152584_FLI
gcggagatgtcgtcggcgatggtggagcgggcaaccagcgatatgctcatcggcccggactgggcgatgaacttggagatctgtgacatcctcaaccgcgaacccggacaagcaaaagatgtggtaaagtccctcaagaaacgcattgcacacaagaacccaaaagtccaacttcttgctctcacgttgctggagacgatgataaaaaattgtggggacgttgtgcatatggttgttgctgagagagacatacttcatgagatggtcaagatagtaaagaaaaggcatgattatcatgttaaagagaagattctcacgctgatagatacttggcaagaagtttttggtggtgcacgtgcaagatatccacaatattatgcagcatatgaggagctcttgcgtgctggagtggtatttcctcaaagattgaatggttctgtgccaatcatcactcctccacagactcagcctctccaaaactatccctcatctttacacatttcacagcaggaggaacttgaattaccagtttcagatttccctgcattaagccttacagaaattcagaacgcacgtggcatcatggatgttctttcagagatgctggatgctttagatccaggtaacagagaggtactttcctgatgcacctgtggctattgtgccatcataaaattaattatgccttataataaggaagaattgctggtaaccatcttcatcatttcatgaaattttgtttcaaaacaatctacttgcagtgcaatatttctaaattgtacttgcagtgcaagatttcaaatcaatctacttaccgtgccagatttcaggggcttagacaggatatcattgcagaccttgtggatcaatgccgttcttacaagcaaagagtagtgcagcttgtcaacagtacctcgaacgaggagttgctcaaccagggtctttctttgaatgatgatatgcagcgtgttctggcaaaacatgatgctattgatgcaggtctagcagttcgagtggagaagccgaaatctctgcagtcccaaattggaagttcttcaacaagaaagccagataccatggaagaaacaattcagaggccttcagcaagtacaactgccaccagtcagtctccctttgggattttagcacttcctgcacctccatccagtagttcaaaagcacctgcaatacctgcttctagtatcgacctacttagtggagatgattatgtcaaacccgaacctgcaaactccctagcacttgttcctgtcactgaatattcagctgcagacaagaatgtcttagcttttgctgatatgtttgaacaaaatacagccaacaatagcaaccataaccttccatattcttttctatcttcgacttcaaattctactatctctacatcacaaacatatcatgcaccggtgcgacctgtattgcctcagcattcagctgcttatccaaatggggccagatccaatgccattgtaccttatgatcagcaggcccaatcgaactctacaggttcgcggaatgggcaaacagcctatggaggaaatcaccaaaagcaagcactaaattatggcacaggtgatcaaaatggagacattccaccagcaccatggggaactaagagatccactaacccatttgacgacgatcagcttggtggaatggcagtgcaaccaaaaggcatgcaaccccaaccagtgcaacccagtcagcatgggaacaaattcatgtcagcaccaccaatgccgaggggacagccaggaagaatgcagttgcaacaggtgcctggtgctcagcttggcgctctacaaccaacacaggctacactgaacatgcagtacaggggcatgcatccatcgatgcaaatgaatcatggaatgggcatgtattcccaaccaacgttcggaggatattatggaatgaaccaaacacagctttacggcgttcatatgtctggttatggatatggtcagcaatctgggggctactatattccgaatgctgcatatgcctatactagtgcaaacgaacttgcccagaggatgaatgacctttcagttcaaaacggtgatccaaatggagccgcagcaaataagcagagcagacctgaggatgcactctttggtgatctcttgagcatcgccaagatgaagcaaaacaaacctgcagctggcaaggttggcggctaagtttgagtaaagaaggtacataattttatcttaattgccagcagcagaaacctttcctgacagcgcatataattattttgccacgttctatgcaatgccagatggcttctcgatgtaagctcatttggtagaaattcatattgggaactggagattaggatgcttgtggggagcctcatagcaaatatgtctataactctactatatatgaaattcttgagttctcagtagc

SEQ ID NO: 1426 - DNA, 1828 bp, Zea mays
  Clone ID: 700152587_FLI
ccaccattgaaacactctctgaccctcactcgctccctgtcacacacactacactcgcaattcatccgcagtcacaagctcggctgctgctcccgctaacggttgaggcgttgctggtgcacacaggaagggaagggaagggagagctgcacacagctttgctctggctcttggctcccctgtccagctgtcctgtccgtccatcatggaggaaacgcccagcccgcagctctagccgccgtcaatctcgtctcgtatcggagtcgaaggaagtaagaggcgggatggcatgaagcgacctaccaagaatgagaggctgggcaacccccggcacaagtaggaggaagaacccgagcaaccgagccacagggaggaggaggagatgggcaactgcggcacacgggaggagaatgccgtcgtcgctgcgcacgcgcaagttcagcaactccacttgttacaacagccttccaagaacgccaatgcagataggaagcacacctgcatgtcatcagatataagtgacccttccacacctaggaaagttgaagatgccaagaacatttccatatacaacgatgtgattgccttcacattgtttgagctagagacaatcacaaagagcttccgtgttgattatgttcttggcgaaggaggatttgggaccgtttacaagggttacatagatgaaaatgtcagggttgggctgaagtcactgcctgttgcagtcaaggtgctcaacaaagatggacatcaagggcacagagaatggcttaccgaggttaactgcctggggcagttgaggcatccaaatttggtgaagttgatcggatattgctgcgaagatgaccatcggctgcttgtctacgagttcatgtttcgaggaagtctagaaaaccacttattccgaactgttactaactacatttgaagaaaaaggcaaaataactggaatgctttccgatgctagcatagacagctacgccattgccctggggtactaggatgtcaatcgcgctgggagccgctaaagggctcgcttgcctccacaacgctcaaaggcccgtcatctacagagatttcaagacatcaaacattctgctggactccgattatactgccaaactgtctgactttggcctcgcaaaagatggccctgaaggtgatcagacgcatgtgtcgacacgggtgatgggaacctacggttatgctgcccctgaatatgtgatgaccggtcacttgactgctcggagtgacgtgtacagcttcggcgtggtcctgctggagctcctgacggggcgcaagtcgatcgacaagtcgcggcccagcagggagcagagcctggtggactgggcgctcccgaagctcaacgacaagaggaggctcctccagatcatcgacccgaggctggaggggcagtactcggccagagccgctcacaagtcctgcagcctcgcgttctactgcctgagccagaaccccaaggccaggccgctcatgagcgacgtcgtcgagaccctcgcgccgttgcagcagggcggcggcggcggcagcgacgcgtcctccggccttcctgactgcagaggccgccgcaggctgaccggcaacagcgtcgtccacttcagggccatccccaaccccaagtgcacgcctgttgtcccggcttgcagagtgcggtgatgttgctgcgcttcggttgaagctgctgggataggttcaggtgtgtactgtgaccatgggtggtggtgcgttttgatgatctgcatgttggattaatgtgggcttggcccaaattaatattcaataatagtcaatgctaatggcccacttt

SEQ ID NO: 1427 - DNA, 2401 bp, Zea mays
  Clone ID: 700152625_FLI
ggtgtaccaaaattcttgcgccgtattgacaccgctctgaaaaatattgggatcaatgaacgtctcccttacaatgctcctctcattcagttctcttcctggatgggtggtgatcgtgatggaaatccaagagtaacaccagaggttacacgggatgtatgcttgttggcgagaatgatggctgctaacttgtacttctctcagattgaagatttaatgtttgagctgtctatgtggcgctgcagtgatgaacttcggatccgtgcagatgaactacatcgctcttcaagaaaagctgcaaagcactatatagaattctggaagcaagttccgccaaatgaaccatatcgtgtcatacttggtgatgtcagggataaattgtactacacacgtgaacgttctcgtcacctattgacatctggaatttctgagattctagaggaggcaacttttactaatgttgaacagtttctggaacctcttgagctctgttatagatcattatgtgcttgtggtgacaaacctatagctgatggaagtcttcttgatttcttgcgtcaagtatcaacttttgggcttgcccttgtgaagctcgacatcaggcaggaatctgatcgacacactgatgtccttgattcgataacgacacatcttggaattggctcctatgctgaatggtctgaggagaaacgccaggattggctgttgtctgaactgaggggcaaacgtccattgtttggttcagatcttcctcagactgaagagactgctgatgttttaggcacatttcatgtccttgcagagcttcctgcagattgctttggcgcgtatatcatctctatggcaactgccccatccgatgtgcttgcggtcgagcttttgcagcgtgagtgccatgtaaaacatccactgagagttgttccactttttgagaaacttgcagatcttgaagcagctccagcagctgtagcacggctcttttcaattgactggtacatggataggattaatggcaagcaggaggtcatgattggatattcagactctggcaaagatgccgggcgtctctctgcagcatggcaaatgtataaagcacaagaagagctcatcaaagtggcaaagcattatggagtcaagttgacaatgtttcatgggaggggtggaacagttggcagaggaggtggtccaactcatctggccatattatctcagccaccagacacgatacatggatcacttcgtgtaacagttcaaggcgaagttattgagcactcctttggagaggagctcttgtgcttcagaactttgcaacgctacactgcagctactcttgagcatggcatgcatcctccgatttcccctaagccagaatggcgtgctctgatggatgaaatggctgttgtagcaactaaagaatatcgatcaattgtcttccaagaaccacgcttcgttgaatacttcagatcggctacacctgagactgaatatggtaggatgaatattggcagccgtccatcaaagaggaagcctagtgggggaatagaatcactccgtgcaattccatggatctttgcttggacacaaacaaggttccatctgcctgtctggcttggatttggtgcagcgataaagcacatcatgcagaaggacatcaggaacatccatatactgagagaaatgtacaatgagtggccattcttcagggtcacccttgatttgcttgagatggttttcgcgaagggagacccgggaatcgcagctgtgtacgacaaattgctagtggctgatgatttgcaatccttcggcgagcaactgaggaagaactatgaggagacaaaagagctactccttcaggttgctggtcacaaggacgtccttgaaggtgatccttatctgaagcagcgtctgcggctgcgtgagtcctacatcaccactctgaacgtgtgccaggcctacaccctgaagcggatacgcgacccgagcttccaggtgagcccgcagccgcccctgtccaaggagttcaccgacgagagtcagccggcggagctggtgcagctgaaccagcagagcgagtacgctccaggcctggaggacaccctcatcctgaccatgaagggcatcgccgccggcatgcagaacaccggctaggccaagatcttcggtgtgcaaataacctgtctcccatgagacggtggacgatatgtgtaggcctgtgagcagttagtacaccggcgccagtgtgttctggaggatttttcatgtcagagcctttctcttgtgtgcttgctgtagatgccaaggggagcttattggctgttgaagcctgatgcaaaataaagtacgaaactatgttttttgtttaactaataactagcaaacatgcttccgttgcattgaaact

SEQ ID NO: 1428 - DNA, 978 bp, Zea mays
  Clone ID: 700152672_FLI
gcgaggggatctacaaggaggctgcttcggcggcgcccgggcgcggagaggcggctccggtcggaaatgacgagcagtggacgctgagtggggaccacgaggataaggatccctttgccgagtccgtgctcggggaggggatcgaggggattcaaggcgagtgtgatgggctagatgacctcggtgctggggaggaccccgaggttgagctgaagcggcagcggaacaaggagagggagaaggagttgatggagatactcaaaggacaagttggagctatccgcttagggataagcagggccttggagaattgggaaccaggatggcgtccatatctcaaagcagctggatatttgacgagagattcacgtgtggtcgaaaggaaaaagcctggaaaagcgaaagcaagaaagagcttccagtgggtcaagcggtaacagagctatctgcatggctacgtattttgttgtggcgggtctctgccctttgactttgatgtgggttttctactcaacacagatcacttgatctgctgttattttttccgaaggtcctgtccttttcagcttctccaacctgtgtcgatacgaggaccatgctacactttggattccgtttccgaaacgttgtgacagcaaaattgatgtagaaaataccatttgacctaatcaagaccgagaagttgctttgcaatgagctgccaataaaacaggctgtgccaatgagactacatgttcgtctcatcagaaggaagacccttctcgacccttatgatttaatggctgggaaacgggtttcggatgccaactgatgattatgataatttgcttcgttattttcttcctctccgtgtatgtcttgcgcagtactggtaaaggaatgataagcgttcgttttgtgcctgaaataatagaaccaggcaaactgctttctgcgggtttgaatcatgcagtttcgaattgttgtgtcatctgcttg

SEQ ID NO: 1429 - DNA, 1361 bp, Zea mays
  Clone ID: 700152704_FLI
ggtttctctcgtctttctcctccctctcctgacttttcttctagacatctcgcgggtcttatcgactccaacaagaacacactacacaccagccagcgagatagcgaacgctaggaacccagtggccatctttggagcggccatgacgctggatcagaaccatgccatgccgatgcagcccccggccctgcagcccggaagagcatatggagcagagggcagtgctgtggtgcatggttccatcagaacagtaggaagaagcgacctcgcagatcacgagatgggcctacgtcagtggcagctgtcatccagcggtgggctgagcgcaacaagcatttggagtatgaggaatctgaggaggcaaagcgaccaagaaaagcacctgcaaagggttcaaagaagggctgtatgaagggaaaaggggggcctgacaatactcaatgtggataccgtggagtgaggcagcgtacttgggggaagtgggttgctgaaataagagagccaaatcgtgtcgacagactctggctgggtaccttcccaaccgcggaggatgcagctagggcctatgatgaggcagccagagcgatgtatggagacttggcacggactaacttccccggacaggatgcaacaacctctgcccaagctgctctatcatcgacctctgcccaggctgctccaacagctgttgaagctcttcagactggcacgtcatgcgagtcgacaacgacatcaaatcactcggacatcgcatccacctcacacaagcttgaagccgacatctcgagctacctaaaggaaaaatgtccagctggatcatgtggtatccaagacggcacacccattgtagctgacaaggaggtctttgggccgttggagcctatcacaaatcttccagatggtggtgatggttttgatatcggtgagatgctgaggatgatggaaagcgatccacataatgcaggtggagccgacgctggcatgggacagccctggtatcttgatgagctggattcgagtgtcttagagagcatgctccagccggagccggagccagagccagagccattcctgatgtctgaagaaccggacatgtttcttgctggcttcgaaagcgctggtttcgtcgagggtctggagcggctaaactgaatttctgatgtttgaccgttgatcctcatcccacttcatgtctgagcttgtgaattcggaggcaaacattggcagaacttataagctctagcaattctaggctttacattcctctgtgatagttctctatgcatgggaactgggtttgcttcacaatttttgtaagaccagaagtgatgtaaatagttcccaccttgtggaaggacaag

SEQ ID NO: 1430 - DNA, 2409 bp, Zea mays
  Clone ID: 700152760_FLI
ggccgaagcgccaccgcgcccaccctgatctgcccgcccacctaacgtcggccgtcaatcggccgccgccgcgatggggtttgacgggctggtcgtggtgtcagatccttacctgcagcgccgcttcacgcaggccgaacttcgcgcgctccaggcccagtatgcggcgctgcgggacgcgtcgcctaacgggaggctgcggatgcgggacctccccgccgccatctctggcgtccgcggtgcggccaagagcagggacgccgagaaggagaatagcgcgccggagccaggcccctgccatggcctcactgacgaggagtgggcctccgtgcttaaggccgtcgcgcgtgctgacgagaagccgcaccaggacgcgagcttcgagctcttcctccgcgtctacgctgagatgcagctgcgactcaaggcagtaagcgtctgctccggccgcgccggaggaatcgtgcgctcctcctcctcctctgctgttgccttcctcacggcggccaccaccacactgcttcacaccatcagcgagtccgagaaggcgtcctatgttggccacatcaacgcttatctcgcggatgatccgtccctgaagagcgccctccccatcgatccggcgaccgatcacatcttccatatcaccaaggacggcgtgctcctatgcaaactcatcaacttggctgtaccgggcaccatcgatgagcgagccatcaataccaagagggtccttaatctttgggagaagaacgagaaccacacgctttgcctcaattctgccaaagcgatcggctgcactgtcgtcaacatcggcacacaagacctcgccgaagggaggcctcatctggtcctgggcttaatatctcaaataatcaagatacaactgttggcaaatgttaatctgaaaagcacacctcaattagttgaattggttgaggacagtaaggagatggaggagcttatgagtttatctcctgaaaagattctactaaggtggatgaactttcaactgaagaaagcaggtttccagaaaagagtaacaaatttttcatcagatataaaagatagtgaagcctatgcttgtctattgaatgtcctagcacctgaatgcagtgcaaaaccatctgcgatgtctgtaaaagatctacttcatagagcaaggttaattcttgagcatgcagataggatgggctgcaaaaggtacctgactccaaaagacatagttgatggtttacccaatctaaatcttgccttcgtggctcatattttccaaaaaagaaatgggttgtccaaacaaatgaaacaagtttcctttgtggatggactctctgatgatgctcaagtttccagggaagaaaggtcattccggctgtggattaacagccttggaatttcaacttacatcaacaatgtgtttgaagaccttagaaatggatgggttctccttgaggtgattgacaagattgctccaggctcagttaattggaagatggcaaatcgcccaccaatcaaattaccattcaggaaagttgaaaactgcaatcaagttttgaagattggaaaagaactaaaattttctttggtgaatattgctggaaatgatattgttcaagggaacaaaaaactgatattagcttttctatggcaattgatgcggtacaacattctacaactgctgaagaatcttagatttcactcaaatggaaaagagatcacagataatgacatattggcatgggccaataagaaagtaaaagattctggaaagcaccactcttatatgcaaagtttcaaggataaaagcctttcaagtggcacctttttccttgacttactaagtgctgtggagcctcgagttgtgaattggagccttgtgaccaaaggggaaaaagacgaagagaagcaaatgaatgcttcatacatcatttctgtggctaggaagcttggttgctccatttttttgttaccagaagatatattggaggtgaaccagaagatgatgctaactctgacagcaagcattatgtactggtatttgaaaaggccaacatcacaatcattggactctgaaaacgggagttcatgtgaaacaacctccatcacaacttcagatgattctgcatctgaatcatcgattgatgacaatacaactagataaaagagcagggtcatgaaaataattgatatgacctgtcattttgaaaacttgggattgattgtttgctgtaattttaagggcaaatacattcaagaccgaggcaagggaaatggttaagggctttgggtgtttttttgaggtttaatagtgtgattgggtgaaagatgtttgacatcctgtaaatatatctataactagtgacaataggttgtccaaaatccactatttgagttagaacaatttgagtt

SEQ ID NO: 1431 - DNA, 1277 bp, Zea mays
  Clone ID: 700152776_FLI
aaggaacagtttttgtggaggtgactcctcgcctgtgtcgtcaaatcctccacaccctggactggagtggctgctgctcgtggccggcgatgagcggcggcgggcccggaggtgcgtgcgggccggactcccgcgtggagaccatctcccggctggcgcagtggcgcatcgataccttcggcccctgctcctaccgccggtcggacccctttaagctcggcatctggaactggtacctgtcggtggagaagagccgctccatcgttgtgcgcctcttcccggagcccggccgggtggccaaggagcagccccctctcgcgcgcttcctgctccgcgtctcctgggccggcccgccgcgacgctcctgcgtctcccctgtgcacgagcatcttctgcgtaccagcgatgattttgtatggcaagtcgatgcgatgtcccatgggcgttttacgattgatgttgagtttctagacctgaggatagccacgaacaatgctacggaatcgtcatcggtgtggccaaacgaaggcatggtgcagaagatcgcgagcaagagcgccctgggctgcctgtcgcgcatgctggcggactccatccacgcggacgtgaccatcaacacgacggacggggtgctgaaggcgcacaaggcggtgctggcggcgtgctcccccgtgttcaagagcatgttcgtgcacgacctgagggagaaggagtcgtcgacggtggacatcggcgacatgtgcgtggagtcgtgctcggcgctgctgggcttcgtgtacgggacgatcgagcagggacagttctggaagcaccggctgccgctgctggcggcggcggacaagtacgggatcggcgacatcaaggactgctgcgaggagagcctgctggaggacataggctcgggcaacgtgctggagcggctccacgtggcgtggctgtaccggctggagcggctgaagaaagggtgcctcacctacctgttcgtgttcgggaagatctatgacgtgagggacgagatgcacggcttcttccaccacgcggaccgcgagctcatgcacgacatgttccaggaggtgctcagcgtgtggaagcccatgtgaattgaagtgtccctttccacgcgagctgtgtgtgtgtgtgtgtgtgtgtgtgtgtgtgtgtgtgtgtgtgtgtgtgtgtgtggtgcttgttcagtcagcagtgtgtggagagcatgctggttatgcatatttgaaacgaaaaggatgttcagaatttgaatggaagctaaattatgc

SEQ ID NO: 1432 - DNA, 841 bp, Zea mays
  Clone ID: 700152819_FLI
cacggcaacctgacggccagcaacgtgctcctggacgagcagcacagccccaggatctccgacttcgggctgtcgcggctgatgacgacggcggcaaactcgaacgtgctggcggcggcgggcgcgctggggtaccgcgcgccggagctgtcgaagctgaagaaggcgagcggcaagacggacgtgtacagcctaggcgtcatcatcctggagctgctgacgggcaagtcccccgcggacagcaccaacggcatggacctgccgcagtgggtggcgtccatcgtgaaggaggagtggaccagcgaggtgttcgacctggagctggtgcgcgacgccgccgcggggacggccgcggacgagcagctcatggacacgctgaagctcgcgctgcactgcgtcgacccggcgcctgcggtcaggccggaggcgcacgaggtgctgcggcagctcgagcagatcaggcctggtggcagcgagggcggcgctgggccaagcgaagaaggtggtggtggcgccgccgcccatgtgccggcggcttctgcttctgcgggagacgacgacgagtagcaagcaagcagcgccagacaggaatttaccagaaagaaaaaagaagcaatggagaaattaagagagagataatatatgtaggaattctttcatttgtttgtttcactggacggatcggattgatcattttcttgcgttcctaggtaatttccagtttgtataggcaaatattatttgctctagaatcatcgctgtgtagtgtagcaacccctacgacggatggaagagaggagaatactcctagtattaataatgcattattattattttttct

SEQ ID NO: 1433 - DNA, 1526 bp, Zea mays
  Clone ID: 700152834_FLI
gccccagtgtactacagactcgacaggtacggtgagcataaaagaggagagccgataagcacaatggcgcctgaggaaaggatgaagcagacagagggcagtcacaaggtggtaacagcagcagcagcaggtggcaagatggcggtgctccactctccggtcggagtgaggagcatcgtgacctccctggtggctttcttcatcctagccagctccgtggtgttcctcctcctcgacagagaagccgggctccaagaagaaccggcgataagagccggcggcggcggcgggcgacgaggagtgcagctggtctcgggggcgctgggtgtacgacaacgtgtcccggccgctgtacgacgggctcaagtgcgccttcatcttccccgaggtggcctgtgacaagtatggcaggaaggatgtcatgtaccagcactggagatggcagcctcatggtcatggatgcgacctcccaagattcgatggcatcaagctgcttgaggagctgaggaacaagagactggtgtttgtgggcgactcggtgaacaggaaccaatgggtctctctcgtgtgcatggtggaggcctcgatacctgacgacaggctcaagaggcgcatcttcaatggctcgctcatctccttcaaggcactggagtacaacgcgacgatagatttctactggtcgccgctgctggtggagtctaacagcgacaaccccatcatccaccgggtggagtacaggatcataagggcagacaggatcgagaagcacgccagcgtgtggagggacgccgacgtcatcgtcttcaactcttacctgtggtggaggaagcagaaggatgacatgaggatgaaggtcatgtacggttcatttgaagatggtgatgcaaagctagacgagatggaaatggcggatggtttcgagatagctatcaagaaactgacggaatggcttgcagagaacattgacaagaacaagactaggatatttttcgcaggatcatcaccaacacattcctgggctagcaactggggcggacaagacaagaacaagtgcctgaacgaaacggagccgatcagctacagacccggcggcgggtacaaggctgcaaccacggactacagcctgatggccatggccaggtcctacttccggcggacgctggagccgagaggcatacgcgtccagatactcaacatcacggagctgtccgactaccgcaaggacgggcatcccacggtgttcaggaggcagttcgttcccctgaccaaggagcagatcgcggacccggccagctacgcggactgcacgcactggtgcctcccaggcgtccccgacgtctggaacgagttcctgtatggctacctggtgcacgtttagattattagggatggacctgctgttacatgtagagagagacagacaggagatctgtcttgcccaacattaattctagtatctgtaaatcttgttcttcttgtccaacattaattctaggatctgctgctaaccatttttttttggattt

SEQ ID NO: 1434 - DNA, 2819 bp, Zea mays
  Clone ID: 700152959_FLI
gtctacctccgcagcttatatgccaactgcataatgtgactatgcatgctgatgctgagacagatgaggtgtatgcacagatgacactgcagccactcagtccacaagagctcaaggacccatttttgcctgctgagttaggcactgccagcaaccagccaacaaattatttttgtaaaacactaactgcaagtgatacgagtacacatggtgggttctctgttccacgccgagcagctgagaaggtgtttcctccactggatttcaatcagcaacctcccgcacaggagttgattgcaaaagatcttcatggcaacgactggaaatttcgccatatttttcgaggtcagccaaagcggcatcttctgacaacaggttggagtgtctttgttagtgcaaagagactggttgctggcgactctgtcctttttatctggaatgacaacaaccagctgcttctgggaattcgacgggcaaacagaccacaaaccgtcatgccatcatcagtactttctagtgatagcatgcatattggcctgctcgctgctgcagctcatgctgcatcaacaaatagtcggtttactatcttctataatccaagagcaagcccttgtgaatttgtcatacccatggctaagtatgtgaaagctgtgtaccatacccgtatatctgtgggcatgcgtttccggatgctttttgagacggaggaatctagtgtaaggcgttatatggggacaattacaggaataagtgatcttgatcctgttcgctggccaaactcgcactggcgctcagtaaaggttggatgggacgagtcaactgctggagagaagcagccaagggtatctctttgggagattgaaccgttgacaacttttccaatgtatccatctccttttgctcttggattaaagcgcccatggcctgcaggcctgccttctttatacggtggaaggggtgatggcttgacctcttctcttatgtggcttcgagacagggcaaacccgggtttccagtcactgaatttcagcgggcttggtatgagtccctggatgcagcctaggctggataattccttacttggtctccaatctgacatgtaccagaccatagcagcagcagcagcatttcaaagcactacgaagcaagttccaccttcagcaatgcagttccaacagcctcagaacattgctgatagatctgctcttctatcaagtcagattctgcagcaagtacaacctcggtttcagcaaatttaccctcaaaatctcaacgaaaacaaaattcaaggccatacacaacctgagtacctccaagtccaacagcagcttcaacgctgccaatcatttaatgagcagaagcctccgatgcatccacagcaacaacagcaggaaccacagaagcagcaatgcgtccaaacaccacaggatcaacaaatgcaagaacagaagcatctgcacaacttccactccttgccagatgcattatcggccttttctcagctttccccagccactcactccccaccttccgcattgcagacagttccagcattctcgcatcaacaaaacttcccagatacaaacattagctctctctcaccatctactggcccttcaatgcatggcatgttggggagattaccttccgaagcagcttcgagcctcccatgtgtggcaatgaacgcccctgtatcggtatctgacccatggtcatccaagagagttgcagtggagtctgttaacccttgtcgacctcatgtttcaccacatatagaacatttggatatggcgacgtgtaacatgccgcagagctctgcactagcaccattacctggacgagaatgcctagtggatgaagatgggtgctctgatcctcaaaatcacctcttgtttggtgttcacatagactcacattcacttctgatgcaagggggcattccagcccttcagaatgataacagttcaggcactattccatactcaacctccaatttcctgagcccttctgataacgatttccccttgaatcaaccgctacgcagcgctggctgcttagatgagtcggattatcttccatgtgcagagaatgccgaacaggcaaatcaacagtttgcaacctttgtgaaggtttacaaatccgggaccgtcggaaggttgctcgacatcactagattcagcagctacgacgagctccgtagcgaggtggggcgtctgtttggcctcgagggccagctggaagaccctttgagatcaggctggcagcttgtatttgttgacagggaggacgatgtccttctggttggcgatgacccatggcaggaattcgtgaacagtgtgtcctgtataaagatactttcaccggaggaggtccagcggatgggcaagccgggcatccagctcctgagctcggctccttcaagaaggctgggcaatggctgcgacagctacgcgagcatgcaggagccgagaggcctggacgctgggatggcgccggtgggttcggtcgagttctgaagacggcggaggggagcccatggccctcggctcgaggattactctccctcctgtatgtttctgcagcacttgctagctctgcgacttggaacaaagcacgtagatcaaatggagctctgtgctgctccccgtctgatgatgtcttatggtatagactcgtagcagtaactactacatgttgtatacatgccgggcacttcagttcttatcgagtagcaataccgctagtttagtccatccaatcaactacgttcttgttcctatgatcctgttgttgcgatgcagtaaaactttttttttcat

SEQ ID NO: 1435 - DNA, 882 bp, Zea mays
  Clone ID: 700152962_FLI
cagagaggagagggagggtttcctcaaagagacccaaacccaagcagagaacactagcgttccctcaccagggcgtccatcccagcagccatggcgatggcgtacaagatggcgacggaggggatgaacgtgaaggaggagtgccagcgctggttcatggagatgaagtggaagaaggtgcaccgcttcgtggtgtacaagatcgacgagcggtcgcgcgccgtgctggtggacaaggtgggcggccccggggaagggtacgaggagctcgtggccgcgctgcccggcgacgactgccgctacgccgtcttcgacttcgacttcgtcaccgtcgacaactgccagaagagcaagatcttcttcatcgcctggtcaccggcggcgtcgaggatcagggccaagatcctgtacgcgacatcgaagcaaggcctgcggcggctgctggacggggtccactacgaggtgcaggccaccgacccctccgagatgggcttcgacgtcatcagaggccgcgcgcaatgaggcccccgctgcgctctgctcctatttacgtacttacctgtgcgtgggcgtgttctcctactactcactgctcagtagtcagtagtcatctgcgttcgtgtgtgtgtgtgtgtgatcggccggatgctaattggcgttggtgtgctcccgtagcgatcgatgctgccaatctgacgaggcttcgcgtgtgtttgctttgctattttcggttctcgggagagatggtgcaggcgtggtgtgttgatgttgatgggtggagtagaagctcaggggagtggcagcggactaatgaaacgtccacctctgcgacgtagaattccactgaaaaaaaatgctccagtgtaccataagctgcttcag

SEQ ID NO: 1436 - DNA, 1029 bp, Zea mays
  Clone ID: 700152967_FLI
atcatatgaatttgttcaacacaaatatttcatccaacagataataatataacttcaaaacatatagatgcaaatcctttaacttaaaatccaaatataatccaataacttcaactcaaagtattaaacagtaagcataattgaaaataatcctataactacaaatccagagctattgtaactagctactaaagtagtcataaggttgcaggtcctattggggtcaagcggagttaagatggaaaaacttggcctcgattgaagcttaatagttgatgaagaatattgttatttcctttcattgacctcttcatactatcaatggtgtcctgagatgctccagtctctaaggtttccacttcttcatgaagtccatctttttcttgttgctcgacctctagttgatcctaaagttgttgaacctttgcagaaactgtcattgcggagcttttcttggaggcggtatgaagaccagattgcataggaacacactggagctcgatagcacattagaaacaacttttgtaggagattttggttgttgtccatcctgaactggtgctgccacaatttcttccaagtcaaccttcgcaccttaagttcacatatccatgtgtgttgtaatccttatcaataatatcatctcacaagttcctagctgatagttgtcttgtggaggtttttagaacaacacattttcctttccttgtgagtttaaatcaatgttagcaccatcctcctcagcttaatcctcagtgttcatttccaagattattgcaaagcccgatgctggactcctcggtgttgatggtgtaaaggacgccctcatacccgatctcgctcttcaaagtcaagctaatgcagctcccgatgtacaactatgcggatctgaccaccccaccgctggaggcagaggtagccgcgaggtcgaggaggaggacgttgaagccgacggtggtgcttcggccgccatggctgtcataggatcacggtgatgtgaggtggtgctggccgagagggagaggggga

SEQ ID NO: 1437 - DNA, 1532 bp, Zea mays
  Clone ID: 700153035_FLI
gcgagccgagccgggagaatgggaatccagctcagatttcgcttctctccctccgccgtggtgagccccccgcgggcgacgtgtgtcccgttgcctttccttcgcttcgacggccaggccacctgttggcctcgcatggctctggcgctctgcctcctgccaagcatccaagctccctctcgcccggcggcccagcgccgcggcgtctatatagagccagatccgcgcgatccccgccaatcggcaatcgctgcaccctgcctcaaattctctagctcacccgcatccctgctcggcactgccttgtgccttctcctcgcacttcccttcttcttgtatatagccccccttcatcacaatccaccggcagcggcgcgccgtcgtctcagattgatgcagggggcggtgacgagctagaggcagcaactgcatatcttgcaagaaaattggttttcgaaccataccgataattttcttgcaagttgtgcagttgttgtctcaagcttgctgcctccctttgccaaaactatgaagaaacaggttatgttatcaatgaacacattggcacagatttttaactgatatatgttggtaagacatgacgtttagttggaatcttgcagcatgatacacaattacacaaagcagctcttaggtacttcattcattccaaattataagatgttttaggtattataaggtgctttgggttttctagatacattggttttgctacgcatctagacatggtatatatctaagtgcatggcaaaaattaatgtctagaaaagccaaaatatcttataacttggaatgaaaagagtacaaaactaagagggaacaatatttattactagaactagaaattgcaatctgacttgtccaattttgcaacgtggaggctattttaatgtgccttcgtttactttctggataaacaagcagtacggtatgatattacagcgggtactgttgtgttaggatgttgcaagcagacttcatgaagtcataacaaggcgagtggaaattcttacaagaacatgtcagtataagtaaatgatctcctgattttatgatttgaagggtgccgagtgccttttgttcttctaccgttacgtgttcagagtgttcagtatctattctacgacaacctttgatgttagtagagcttgcacctgttccaacttaatttcaccgctacgtatattttagagcacaatcaaccggctggattggcatacacagttttattctacgttctttttttttttgcaaggttgtagaagacgactggtatatttgagggcagcttctggcatgtaaactatacggcctgcggcctggtacttcggagttcatgggatgttctgcaacagcactagaattctgacaatccagtgtcatgtgacgcaactgaagtggcaaaaagaattcctaacatttactggataaagcatctgctgacatattgttttcgtgatgcactatgagttccagataacatacagcagtagaattcaagttcgtaagac

SEQ ID NO: 1438 - DNA, 1325 bp, Zea mays
  Clone ID: 700153041_FLI
caccccggcagtgccatccgactccctgcacctgccatggctgccgctctcgtgtctgtgcctcgcatcaagttgggctcgcaggggctggaggtctccgcgcagggcctcggctgcatgggcatgtccgccttctacggcccgccaaaacccgagtctgagatgatcaagcttatcgaccacgccgtcgacgccggggtcaccttcctcgacacctccgacgtctacggcccgcacaccaacgaggtcctcctgggcaaggcgctgcaaggcggggtgcgggagaaggtcgagttggccaccaaattcggcgtctccttcgccgatggcaagcgggagatccacggcgacccagcctacgtgcgggcagcgtgcgagggcagcttcaagcggctcggtgttgactgcatcgacctctattaccagcaccgcatcgacaagagggtgcccatcgaggtcacgatcggtgaactcaagaagctagtggaggaaggaaagataaaatacattgggttatccgaagcatctgcatcaacaatccgaagagctcatgcagtccatcctatcaccgcggtacagcttgaatggtcgctatggtctagagatgcagaagaagatataatccccacttgcagagaacttggaattggaatcgtggcttacagtccactaggcagaggtttcttctctagtggagcaaaactagttgactcactatctgagcaggacttccgcaagcatatgcctagatttcagccagagaatctcgacaagaacgctcagatattcgagcgcgtgagcgcgatggcagcacggaaaggatgcacgccatcacagctcgcgttggcctgggttcaccaccaaggaaacgacgtttgccccatacctggcacaacaaaaatcgacaacttcaaccagaacgtgggggcactgtctgtgaagcttacaccagatgagatggctgaactcgagtcgtacgccgcggctgatgaagtcttgggtgaccggtatggcgatcaattggccaacacttggaaggactccgagaccccaccgttatcttcatggaaattttgagtagccagtatctggtattttcaactgcgtcctctgttcgttgacgtatctccgagttgccgggatgcagaagatctccatgtgcactttgcaaaagcatccatatatatgatgttgtgagttatgatgtttggtacagactacagagtgcgtattgtattgcatacctcattttgtttttgtttgtatatgcttaaatgttaaaacctctgatgggatgaatagaataaccatgtgtgcattgtatc

SEQ ID NO: 1439 - DNA, 737 bp, Zea mays
  Clone ID: 700153072_FLI
cgcaagcttctcgattgggatgttttgcatgccggcatcatccatcatcccgctccacaaccatcctggaatgaccgtgctcggcaaggttttgtacggcgcggcgcacgtcagatcgtaccgctggattgaatcagccggatcgtccattaacctgtcgaaagcgaggccagccaaggttgtaagggacggcgagatgtccgcgccgtgcggagcgatggttcttcgtccggaggaaggcggcgacgtccacgccttgagagccatcactccctgcgccgtcctccacatcctgacgcccccgtactcctcgcaggacgggaggcactgctcctacttccggagacgcccaagatcacacccatcgggcgttttattgaaccgaacaggggggtctgagttcgtgtggctggaagaataccagccacgtcacaacttcatcattagaagggacctgtacacaggacccgctttaaagttatgatgacatcatgacaaacaggggggataattatatatatatacgcttcccctttggcttcttattaagttatatcgatggacaagcacttagctatatgtgcttggcacttttttatttatatggtagtattaaaaagacagttgattatcctacgtacagggccgcctgctgtatgtattattctaagataatgttattgtacatctgatgatgtcacccactgacagaatgttatttatataataattatatg

SEQ ID NO: 1440 - DNA, 1148 bp, Zea mays
  Clone ID: 700153125_FLI
gtcacagacccctgtccctttccctttccttcccctccggctccgcctcctcgaccactccgacaaccccaagcgcctccggcgagctccacctctccaccggctgcggcgagaagcggcgggggctaactaagtctgtaggcggcggcggaggtgatccgggagccggagccgagtctagggcgatggggcagcagtcgctgatctacgcgttcgtggcgcgtggcaccgtggtgctggctgagtacaccgagttcaccggcaacttcaccaccatcgccgcccagtgcctgcagaagctccccgccagcaacaacaagttcacctacaactgcgacggccacaccttcaactacctcgtcgaggacggattcacgtattgtgtagttgctgttgaatcagttgggcgacaaatccccatagctttcctggacagagttaaggaagacttcaccaaaaagtatggaggcgggaaagcagctactgctgcagcgaacagcttgaacagggagtttggatcaaagcttaaagagcacatgcagtactgtgtggaccaccctgaggaggttagcaagcttgccaaggtgaaggcccaagtctccgaagtcaaaggagttatgatggaaaacattgagaaggttcttgaccgtggcgagaagattgaactgcttgtcgacaaaactgaaaatctgcgttctcaggcacaagatttcaggcagcagggcaccaaggtgcggcggaagatgtggctccaaaacatgaaaatcaagctgatcgtcctgggcatcatcatcgcgctcatcctcatcatcatcctgtcggtgtgccatggcttcaagtgcggcagcaagtgaggagggggacttacagatggccgtgccctgccctgccctgccctggcacctgcgagaaggaggagactacatgtggagtttttttttttttgcttctttagtcgtcgtgttaagtcgtcctgcgccgataattcttggtggtcaccagataagagtcattcctgatgtcggtgttgattgctgttgggttggtcgggaaatgactgggtgaaccggggggcgaagtgggaggggggttgtgtcgtgtaattttggatgccactattgtgcatgtatagccccgtgtgctgtgct

SEQ ID NO: 1441 - DNA, 750 bp, Zea mays
  Clone ID: 700153138_FLI
gtgacctaccaggccgggctggcgccgccgggcggggcgtggcagtccaacgacggcacccacaccgcgggcgaccctgtgatgcacgactaccggagggcccggtaccttgccttcttctacagcaactccacctccttcgtggcgtccgtggtcgtcgtcgtgcttctgctgccggagtcgctgcacaagaagtggtggtggctcggggtcatgaacgcgacgatcgtgctggacctgctgggcctcttgatcgcctatgccgccgggtccagcaggacgtggaagacttctgtggttgtttccgctctcgttctcgctgtgctcgcctatttcgccatacatgtgctgctgtcaagctgcgtcaggagagggaagaagacagcccccgactctccgtctccgccccaggaccaggagaacagagaggaaaacgaagcggcaacgaaagaggtcgagctccagggtccagcttgctgaaactggagtgtacagtgcggagctgaatgtgtgtgcagtccagtacttgtagatttttttttcacgaccgtgttgtcgcatttttttttgtcaagaggtgtagtgtttttgttgatccacgtagcgggcgggaacgattgatgtgcaatcaagtgttagatgtaagtgtacaaacaagtctgcgtgcaagcgaggcttctctgtctttttagatcatgtagtcttcgcgtgggtcataaatgacttcacgggtttggaacagtcttactg

SEQ ID NO: 1442 - DNA, 1088 bp, Zea mays
  Clone ID: 700153269_FLI
tcggatcctgaccacgcccgcctaccagaccaccaccaccaccaccaccaccacccacaaatccccaatggcgaggcgcatcgccgtggcggcagcgttcctggcgctggccgtggtggctcccgccgcgctggcgcaggctcccgggcccgcggcgacgccgagcgggccgccgaacgtgacggcgatcctggagaagggcgggcagttcaccatgttcatgcggctgatgaaggagacgcagcaggacacgcagctgaacagccagctgaacagctcgtacgccagcagcggcggcgggtacacggtgttcgcgcccaccgacaacgccttcaacaacctcaagcccggcacgctcaactcgctgacgcagcagcagcaggtggcgctggtgcagggccacgtcctgccccagttctacagcatggactccttccagaccgccagcaaccccgtccgcacccaggcctccggccgcgacgggccctacacgctcaacatcaccgccaccgccaacaaccaggtcaacgtctcctcgggcgtcgccgaggtcaccatcaacaacgcgctcagcgccgtcaagcccctcgccgtctactccgtcgacaaggtgctcctgcccctggagctgttcggggccaaggcgcccgccgccgcgcccgccgcgtcccaggggaagcccaagaagggcgggtcctcggacgctccctccgggtcggccggctccgacgacgccgcgccaacgggcgccgccggcgccagggccgtcggctggagcttcgccggcctcgccgccgtccttggctgcctgttgtgagagtgagaccgtgcgtcgtttctagggacggacggacggacgacaagctagttgaagatgagaatgccatgaccgaggccgggcatgggcgccttcttccatttccatctttgtctgagattgtcagtggccgtgttcccttgcccttctttctctctgtttatttatttaaacttctttcatctcgctagtttctttaatttgtactattggtggtttgtaagattggcttatgtgattcaatttatgcgcctgccgctgttgatactgc

SEQ ID NO: 1443 - DNA, 598 bp, Zea mays
  Clone ID: 700153304_FLI
agaaaaacaggcagttgcatgatgagctttcaaaggttaaggcctcattagctggcacagcccggcgtcttgagttgttgcagaaggataacgagttgcagaagaggcagactgaatcgctgaggcagcaatgcaattgcactctccattgaaagttatgcaagattaaggacatggaaggagtttttcagcttctttggcggattagctatttttttccaacaccaagggaggaaaaccagattgagttctaggaatgagaactggcatatgaaaatgattgagaacatatatagtgtatagaccatagtgttcgtcctttataccaatggtgagctgcacagttcatccaaagtgatcggtgggaacttcattggtgacaatgcaaagcgcagaagtcaaaacgtaaaagatggcgccatatggttataagctcctaatttctgagtgattttgcagtggcagtttgcatgagtacctgactatctgtagatatacattgtacccggggtgcaaaaagatggtgacaagtttgaaatctgggaccgtgccaatacttattggcaggaaacttaataatccatattgtattatcgat

SEQ ID NO: 1444 - DNA, 763 bp, Zea mays
  Clone ID: 700153319_FLI
agcccagccgctgtcgccctcgttccgtagtacggcgccgccagatcgtcagtcaccatgatcatctccaagaagaaccgccgcgagatctgcaaatacctcttccatgagggggtcttgtacgccaagaaggactacaacctggccaagcaccccaagcttgatgtgcccaacttggaggtgattaagctcatgcagagcttcaagtcgaaggagtatgtgagggaaaccttctcatggcagtactactactggtacctcaccaacgatggcattgagcacctccgcagcttcctcaacctgccatcagaggttgtgcctaataccctcaagaagtcttccaagcccccgtctcgccccttcggctctggcccacctggtgaccgccccaggggccctcctcgttatgaaggtgacaggcctaggtttggtgatagggatggttacagaggaggtccacgtggcgctccaggtgactttggtggtgataagggtggtgctcctgcagatttccaaccatcttttaggggtagcagacctggctttggccgcggtggcggcggtgctttcggtgctggtggatcttccatggagtgatgtgtcaacatgagctagcataacattcgtctttgaactatgagaacaatgagattttgttttgttttaccgagctgttgccgtgggttgacatggttttgtgatcgtttttgtttagatgaaattattgaaatcaagcagcgagttatcagtctatcgcgtgctg

SEQ ID NO: 1445 - DNA, 1403 bp, Zea mays
  Clone ID: 700153393_FLI
cttccaaagctccaactacgacgagaaccgccactcctcgaaatctccaaggattttctgcggcgaacccgtacgtttcctatcgctgttctcgcttgttcgcgggggaatcaaaccaaatcatccccttccccccatccgccccttggatttgcagcttcgtgacgtgacccaatgggagaggcctcgccgtcgatcgccaaggacgtcaccgagttgatcgggaacacgccgctggtgtacctcaacaaggtgaccgatgggtgcgtcggccgcgtcgccgccaagctcgagtccatggagccctgctccagcgtcaaggataggattggctacagcatgatcacggacgcagaggagaaagggctgattactccaggcgtgagtgttctgattgaaccaactagcggcaacacaggcattggactggcctttatggctgctgccaagggctacaaacttacactcacaatgcctgcctccatgagcatggagaggaggatcatattgaaggcttttggtgctgaacttgtccttactgacccactcctgggaatgaaaggagctgtcaagaaagcggaagagatacaagcaaagacacccaactcgtacatccttcaacaatttgaaaatccagctaacccaaagattcactatgagactactgggcctgaaatctggaaagctacagcaggaaaaattgctggccttgtatctggtatcgggacaggaggtaccatcaccggtactgggcgatacctcagagagcaaaatcctaatgtcaagctctatggtgtggagccagtggagagtgctgttttgaatggtggaaaacctggaccacacaagattcaaggaattggagctggttttatccctggagtcttggatgttgatctccttgatgagactctacaggtttcaagtgatgaagctattgagactgccaaggctcttgctctgaaagaagggttgttggttggaatctcttctggtgcagctgcagctgcggcagttaggcttgctaagaggccagaaaacgccggaaagctatttgttgtcgtgttcccgagcttcggcgagcgctacctctcatcggtgctgttccagtccatcaagaaggaagcggaaagcatggtggtcgagccctagagcacacagttctgggcttctggcaaactatttcctgagacgttcatcatttccatcacagaaaaataaagctcgggtgccttctgttgatttcgacgtacatttccctgccgatggtgtccagcccactgttgtcgctggagaacacgtcgtttttagacttgtgatgttttactactgttttgacactcgttgtatttctgtatatcgcgtcagactgtgaaataaaagcagtacagtgtgtttcttgc

SEQ ID NO: 1446 - DNA, 1140 bp, Zea mays
  Clone ID: 700153421_FLI
ctcccgtttgcgacgactgggtgggctacgccgccgccgccgccgctgccgctgctctacggtgctgagtcctttgccgatttcttcccggcgaagagcgccaccagccttttgcataaatcatcgggtatacatccatcttcatttagtagatccgcccctgctgaaaacgcactcgatggcgtccgcgacggggggttcctcctcggagatggcggtggaccacgcgacggggctgggcaccgtggagaagccgcggtttgatgctctgatgccgagtgagatgagcggcgggaggacccagttccggaaagtgaccgtgccgcagcaccggttcgcgccgctcaagcgatgctggatggaaatctacacacccgtttacgagcacatgaagatcgacatacgcatgaatctcaaggcgaggagggtggagctaaagacaaggcaagacacaccagatgtcagcaaccttcagaaatgtgctgactttgtgcatgcttttatgctcgggttcgacattgctgatgccgtcgccttgctgcgtcttgatgatctgtatgtggattcctttgagatcaaggacgtgaagaccttgcgaggggagcatctgtcgcgcgctattggccgcttatcagggaaaggaggcaagaccaagtacgccattgagaactcaaccaggacccgcattgtcatcgctgatacaaagatccacatacttggatccttcgttaacatcaaggtcgcacgggattcactttgcagtctcatcttgggttctcctgctggcaaagtgtattctaaactaagggctgtatcagctaggttggcggaaaggtattaaattaaatggggtttgcccgcaccgtataagggcatgttcggttcccgctcaattcatatggattggaggggtttgagtgggattaattccatatcaagtcaaaatccttcataatttttttcaatgctttccaatcccatgaggtataggaataactgaacaaggcctaattgttgcagttttggtcacattcacacagtgtgttatagtagcagtttgtgtgctcgggacactggggaagtttaatgtatccttaccttatgaatagcggactatgatgaagggagatttaaattgat

SEQ ID NO: 1447 - DNA, 1323 bp, Zea mays
  Clone ID: 700153476_FLI
aaactctctacctgctccgctgcccacacggcacacgagctgtcagctatatactctatcgcacgtccaaactcagggaaacactgatcaaagataccgacgagcacgccagagcgaacgaacggaagccatggccagcgacgacagcaaccaaggagcagcagccaagccgaagccaccaccgctaccgctgtccgtgcgcctccagctggccgggcttacggcggccatcgacgccgtggagcgccgcgacgggacggtgaaccgctgcctgtacggcgtgatcgaccggctcctgagcgcgcgcgccagcccgcgcccggacgcctccggggtgcgctcctacgacgtgaccatggacgcgtcccgcggcatctgggcgcgcgtcttcgccccggccgcggcggaccgcccgctccccgtggtcgtgtacttccacggcggcggcttcgcgctcttctccccggccatcgggcccttcaacggcgtgtgccgccgcctctgcgccgcgctcggcgccgtcgtggtgtccgtcaactaccgcctggccccggagcaccgctggcccgccgcctacgacgacggcgtcgacgcgctgcgcttcctcgacgcccgcggcggcgtcccgggcctggacgacggcgtgcccgtcgacctcggcagctgcttcctggccggggagagcgcgggcggaaacatcgtgcaccacgtcgccaaccgctgggcggcggcgtggcagccgtccgcgcgggccctccgcgtcgcgggcgtcttccccgtgcagccctacttcggcggcgtggagcgcacgccgtcggagctggagctagagggcgtggcgcccgtggtcaacctcaggcgctccgacttctcgtggaccgcgttcctgcccgacggcgccacccgcgaccacccggccgcgcacgtcaccgacgacaacgccgacctcgccgacgacttcccgcccgccatggtcattatcggcggcttcgacccgctcatggactggcagcgacgctacgccgacgtgctgcgccggaaggggaaggaggtgctggtggccgagtacccaggcatgttccacggcttctacggcttcccggagctccccgaggctaccaaggtgctgcaggatatgaaggccttcgtcgacagccacatacccacgcccaagctcgccgacgcgtgatgcacgaacaccatcccattccattctagtgtcatgactcatgattgttgcttggttcatctatctgctgtcaaaatatatactttctatatattaaagcagggcgcaaagcttccatctggtgcgcccacgtc

SEQ ID NO: 1448 - DNA, 1569 bp, Zea mays
  Clone ID: 700153481_FLI
caagtcaaccgaacagacattcgctggaagctctgctcggagtgaggtcgctgcgcatctaccacacgatgccgccgcctctccgctgtctccttctcgccttcgtcgtcgtcctctccggcttcccccgtctcgcccaccccttcacggctctcgagtctgaccagatcgcccgcttccaggaatacctccgcatccgaactgcgcacccatcccccgactacgccggcgccagcgccttcctcctacactacgccgcttcgctcggtctccacaccaccacgctccacttcaccccgtgcaagaccaagcccctgctcctcctcacctggcgaggctccgatccctccctcccctccgtgctcctcaactcccacatggactccgtccccgcggagcccgagcactgggcgcaccctccattcgccgcgcaccgcgacccgaccacgggccgcatctacgcgcgcggcgcacaggacgacaagtgcctccccgtccagtacctcgaggcgatccggggcctgcaggccgcggggttcgctcccgcccgcaccatccacatctcgcttgtccccgacgaggagatcggtggcgcggatgggttcgacaagttcgcccgatcggaggagttccgcgccctcaacatcgggtttatgctcgacgaggggcaggcgtcgccgacggacgtgttcagagttttctacgcggacaggctggtgtggaggctcgtcgtgaaggcggcgggggcgccagggcatgggtcgaggatgttcgacggcgccgccgttgacaatttgatggattgcgtggagaccatcgctgggttcagggatgcgcagttcaggatggtgaagtccggggagaagggtcctggggaagtggtctcagtcaaccctgtgtacatgaaggccggcataccaagccccacgggtttcgtgatgaacatgcaaccttcagaagcggaggtcggctttgacctccgccttcctccaaccgaagacatcgagcagatcaagcggagggtcgaagaggaatgggcaccatctcacaaaaacctgacctacgagctggtgcagaaaggtccggcgacggatgtgtccggacgtcccgtatccacagcgacgaacgcgtcgaacccgtggtggctgacgttcgagaaggccatcgcctccgcgggtggggagctgtctaagcctgagatcctgtcttcgaccacggactcacgctttgcgaggcagctgggcatccctgccctcgggttttctccgatgaccaggacgccgatactgctacatgaccataacgagtttctggaagacagagtgttcctgaggggcatccaagtgtacgaacatgtcatcagagcactaagctcgttccaaggctgattcgtaaaaacaaaaagaagaaggaaaagtgttgttgcgtggagtgtaacatagctggatccccaactctcatctgctgaatgaaggtgagagagttgcggcctagccagtacaggtttgtaataattggtccagtcacaaacacgccaaaggaaacattccgaaactattgggatctgtg

SEQ ID NO: 1449 - DNA, 1588 bp, Zea mays
  Clone ID: 700153483_FLI
gcagatccctgcctgcacacggcatccggagttccggactcccctcctcttctcgggcagccgggcgccgcttcgcctcctcctcgcaggcaagaagagcagccagccgcttcgcgatcggggacgcggagaggggaaaggcgagtcgtcgtccgtccacggcagcttccctccctctcctctccgcccccgcttacctagcccggcccctcctacgccccccccctcccgccgccgcacgatgagcacctctccggccgcgtccgccgccgcgtcgcctccgccgcctattgcctccgccgccgaggcctcgcgggcgacggagacgttggtggtcgacgagagggtcgcctcacacgtggacccgttcctcgtagaggcgctcgacaaccctcgccaccgcctcatggttctacggatggaactggatatacgaaactttatgcagaaccctcagctgcaggagttcgaattccagaactttccgacttcttacctacgctgtgctgctcatcgtgttgcacaacattatggcttagagactatagtggcagatagtttagtagaaggctcagttagcaggatcgttgcaagaaaaacaccagagagcaggtgtcctgcaatttcattagcagaagttcctagcaaacaagcaagaaatgatcatgaggcagcagagaagcttaagtttgtcatttatcaaaggcccaaagcattccaaaatggaagcactgatttgggaaacaagaatggtgcaccaaaaactgttgaagagagaatagaggaatataataaagcacgagcacgcatcttcaatggttctgtttctgcagattctgatgctgcaagtgttttgggaactctttgcactggcagagatgagtcagtaaatgttgaaccttctgttgatgaaatcaaagtcagcacgatgaacaaccgttccagagttgctgttttcaaggatactcaaaaggatcgcagtgacccagattatgatcgaaactacaaaaggtatgttaggagcccagttcctgacttcaacttgagcccaggtgccttcaactttgtgcctcagtttatgcagtatggcgttggttatgtgcaatctcctggcatgtctacaaaccagcctgctgtctactttggccagcctgatctaacaatggggtcttctggagctgctgtttacccacattggccaaccccagcaatgatgtatccccattgctatgacaatgttggttcaatgatttctcaggttcctctgtaccaatctttcaaccatggttagtagattctgcttactggaaagttgggaaccgttctctgttgaacttgttatattgtgccgtcctatgttaagtggagttactttagattcgagccatttcgattacagaaaattccaaaaaattcatgtaatgtcgaacgtattagtttgtataatggggagtcctaattcgttgaaactaatatcgtgaactagtctggaactgtaattcgtgtctaatatctagttctcgtctgcaattgctctcggtttagggttcactagaatagtgatgcgcgtctgcacctgttcttaacc

SEQ ID NO: 1450 - DNA, 220 bp, Zea mays
  Clone ID: 700153536_FLI
ggtggcaatttaggtaactcgcttagaaggtatttcccccgtgtttgagcccccacccccaccaaaaaaaagaaggtatcatgctatctctgttccataagtagacatgatgtaatcgtactaagtgtttatttttattttttttacttatttcacttcaatcaatggaaaattatgcttcccaattatatggtgggtcatggcagtccccctccctcct

SEQ ID NO: 1451 - DNA, 639 bp, Zea mays
  Clone ID: 700153565_FLI
agaacaaattaaagatcagctcgatcaagttaattaacacggcacacatatagcattacattcttattcagagatactcacacacacaacacaccagacaactgaaaatacgacacggactcacacggtcaaaatacaacgccaggttcactcactgacacttgaacacacacgctcacacattcactctgaactggtcattattctagctgtaaatcaacacggagatggagcacacagtcacacacacacacagagacatgaccgctaaggatcaggagaccagtaagtaacgatcgattgccccctcctccaaacacatagaatgatttagatggagagagggagacctggaagaaaggcttagccttcccttgccgataagacttgccttctttcttgtgcaccgccgaagcatccctgctcacacgccaccagcccgcggcgccgaagctccgggcggacggcatggcaagcatgcttcctcgctgcatgcactcacaccgccgatgatggcggtgcgacgaccagtgcttcgctcacagcaccttcttcttctttgcccctctttttcctcttcctcgacatcatacgatggaaactgtgcttcacgagttcggtgtgagtgggccgggaccc

SEQ ID NO: 1452 - DNA, 574 bp, Zea mays
  Clone ID: 700153583_FLI
tgccgcccggagaacgttgccttcctcaactgcaagaagaaggaccctaaccccgagaagtgcctcgagaagggccgccaggtcacacgctgcgtcctcagcctgttgaaagaacttcaccaaaagtgtcccaaggaaatggatgaatatgctggttgcatgtattactacaccaacgaattcgacttctgccgtaaggagcagcaagcttttgaggaagcctgccccatttctgagtagatcttgagagttttacttgcagtggtcttcgcaaataagggaaaaaaaggcagaaaaacagcgttcatgatctcccatgtttgttgtcctcatggaatttgtactggtgaatgaatagcacagcctggagctattcaccccatttgccgcccctcaggattttagagcaggcgaatgctctaaaatggtgatgatggcgttttctctttatggttcacaaattacatttggcggactcactgttatttctgtctgtcccgagtgtgttaacccgctaatctgatcttctgctctggacttccacaaggctatggcacaactacaatgtactcct

SEQ ID NO: 1453 - DNA, 1213 bp, Zea mays
  Clone ID: 700153712_FLI
gctcgacagcccggttcccgtagccggcgccagtaggggcagcgttggagctggagttgaggctgcggagagcaagacaccgggggccgcggcgccggcggctgcctcgagctcggttgttgaccccgtggagtacaacgcgatgctcaagcagaagctggagaaggacctcgctgccgttgccttgtggagggcttctggtgcagcacctccagatcattctccagctggttcttccttgccaagtgtggatgttccacacgcaggccctcttaaacccatcggaggtactggaagtctagttcaaaacaagctagttggtgctccaggcgggggatcaagttcacatgtagtacaaaatgccgatatccctgttaagcaaaccactagctcttcctcacgtgagcagtcagacgatgatgacatggaaggagatgctgagactactggaaatggaaaccctgttcaacacagattacagagaaggaagcaatccaaccgagaatcagccaggcgttcaagaagcagaaaggcagcgcacttgaatgaactggaggcacaggtagcacagttaagaggtgagaactcttcgctgctaaggcgacttgctgacgttaatcagaagttcaatgaggctgctgttgacaatagggtgcttaaggcagatgttgaaaccttaagagcaaaggtgaagatggcagaggactcagtgaagcgggtaactggcatgaacacattgttccctgccgtgtctgatatgtcgtccctcagcatgccattcaatggctccccatccgactccgcctctgatgccgccgtacccatccaagatgacctgaacagttacttcgccattccaagcgagatcggaggcagcgacggttacatgccagatatagcttcctcggctcaagaggacgacgatttcgtcaacggggctcaggtcgccggcaagatgggcagcactgactcgctgcagcgggtggtgagcctggagcacctccagaagaggatgtgcggaggcccggcttcatcggggtcgacctcctaggttcctactccatcggatatgataaaggccctgatgcccacggcaagaatatgataaattaacagtttcacatactttgtagtggacattgctaatgctgcgatgcgcattcgttcgttgtggacttacgggtctactgctattgatttattgttcgttctt

SEQ ID NO: 1454 - DNA, 1125 bp, Zea mays
  Clone ID: 700153786_FLI
acataacaaatgtttctttaccacggtccacgggttaattgatgtggcaggtgacgaggttcaagtgtgggggcttcgcgctcggcctggccatgaaccactgcatgttcgacggcatcggcgccatggagttcgtcaactcgtgggcggagacggcgcgcggcgtcgccgagctcaccgtgccgccgttcctggaccgcagcgtcctgaaggcgcgcgacccgtccgtgcccaccttcccccaccacgagttcgccgagatccccgacgtctccgacacggcggcgctctacggcgcgcaggagctgctgtaccgctccttctgcttcgacccggaccggctggagcgcgtgcgcgggcttgcgctcgccgacgccgccctgggccgctgcaccaccttcgaggcgctgtcggggctggtgtggcgcgcgcgcaccagggcgctggggctggcgcccgagcagcgcaccaagctgctgttcgccgtggacgggcgccgccggttcgcgccggcgctcccgcggggctacttcggcaacggcatcgtgctcaccaacgcccttgccacggccggcgagctgctgtccgcgcccgtgtcgcgcgcggcggggctggtgcaggacgccgtgcggatggtcaccgacgactacatgcgctcggcggtggactacttcgaggcgacgcgggcccggccgtcgctcgcgtccacgctgctcatcaccacctggtcgcgcctcgagttccacggcgccgacttcgggtggggcgagcccgtcatgtcgggcccggtcacgctgccggagaaggaagtcatcctgttcctggcgcacgggaaggagaggaagagcatcaacgtgctgctcggcctgccagccaccgcgatggacgccttccaagagctcatggacgagatatgattcattcgtgatgacggacatggatgggttgctgctatacatacatatacgatgcagggtgcttatacattcttcaattgctcggtgttatagtacgaccgtgttaatacttgatctatgttgatgttgtttagtggccatatgacaatttgctgtcgattgcaattgttctaatattaatggaaaatagtaaactttgtttcctttc

SEQ ID NO: 1455 - DNA, 1094 bp, Zea mays
  Clone ID: 700154036_FLI
gcggcaggcggcggccctcgggcattgtcccagcgggagcaggacatccagatgatgctcgccgccgatgtccacctcggcaccaagaactgcgacttccaggtggagcgctacgtgtacaagcgccgcactgatggtatctacattattaaccttggaaagacctgggacaagcttcagttggccgccagggtcatcgttgccattgagaatccgcaggacattatcgtgcagtctgctaggccctatggccagagggctgtcctcaagtttgcgcagtacactggtgcccatgccattgctggcaggcacactcctggtacattcaccaaccagttgcaaacctccttcagtgagccacgccttcttatcctgactgacccgaggactgatcatcagcccattaaggagtctgcccttggaaacattcccaccatcgccttctgtgatactgattcccctatgcgctatgttgatatcggcattcccgccaataacaaggggaaacagagcattggttgtctgttctggctgctcgcccgaatggtcctccagatgcgcggtacaattcttccaggacacaagtgggacatcatggtagatcttttcttctacagagacccagaggaagcgaagcagctggaggaagaagaggctctggttgcacctgactatggcgcggttgcagaatacactgcaccaggcgctgacaactggggcggtgaatggggtgctggcgaagctgcagctccagctgctagcattccagctgctggcgcagactgggctgctgctccagctcctcctgctgacggtgtctgggacgcagctgtggctccacctccagcagcagcccccggatgggaacaaggcgcggcccccgttgcggcgtcgacccctacctgggagtaattaataaagagtaaatgagcatggtggatggtttatactagtcatcagcggagcttgttggtaggcacttgctggagtagttgcttcgaacttctttttttcgtgttagatgaggtaaaaaaacaattttgtgttattgactctgctgtgagcgagtgaaccttgcacattttcgttatctc

SEQ ID NO: 1456 - DNA, 1112 bp, Zea mays
  Clone ID: 700154042_FLI
accagacgctcgcccccctttcctccacctatcttcttcagacgaccagcaggaggtacgagcaagaccacctaggaggcctctctctctctctccccagccacccccgtagcgagagggagggcggaagaggatgagcgcgtccaggttcataaagtgcgtcacggtcggggacggcgccgtcggcaagacctgcatgctcatctcctacacctccaacaccttccccaccgactatgttccgacagtgtttgataacttcagtgccaacgttgtggttgatggtaatactgtcaacctcggcctctgggacactgcaggtcaagaggattacaacagactgagaccactgagctatcgtggagctgatgtttttcttctggctttctcactgatcagtaaggccagctatgagaatgtttcgaagaagtggatacctgaactgaagcattatgcacctggtgtgccaattattctcgtagggacaaagcttgatcttcgagacgacaagcagttctttgtggaccatcctggtgctgtccctatcactactgctcagggagaggagctaagaaagcaaataggcgctccatactacatcgaatgcagctcgaagacccaactaaacgtgaagggcgtcttcgatgcggcgataaaggttgtgctgcagccgcctaaggcgaagaagaagaaaaaggtgcagaggggggcgtgctccattttgtgatctaatcatcggtagatgaagaaacaagggcgaaggtgccatggctttatcatcgtcgcgtcttgcttcagtggaacggcatggatggtccccacccccctaggtttactggcggctcggctgcagcgagttctcatctctttgtcgaggcattaagcgatatgtttgtttcattttcctccttcctgccttgtgattatctggtgtgtgtgtgtgtgtgactgacgaagtcgcggcgattaggtaactcgcttagaaggtatttcccgtgtttgagcaaaagaaagtatccctgttatctctgttccataagttagacatgatgtaatcgtactaagtttatttttacttatttcacttgaatggaaaagtatgcttcccattt

SEQ ID NO: 1457 - DNA, 1751 bp, Zea mays
  Clone ID: 700154080_FLI
gatcagccgaatcgtttctgctgaaactatggagtggcgcttcctcttactccctcgtcacctctcctccgttgccccgtccagcgccgctgtcgtcgccggcgagatctctgtcctcctcagcgcccggaatttcctggcttctgttaactgtgcggaacaattcataagctccgaggccgtcacatcctcgggcgtccttgagctctaccgcgcggtggccgccgcagccccaagtgggaaggcccgttacttagtcgacgcggcctcggcgctagtcgaggcatccgcgcgcgcggacctccccgacggcgcgctgcggctgctcgagttcctcatcgacacgcctgcggcgcggctgccgatgggatcgtcctgcggccacctcatggtgaaactcctctcgctcggacgccgcgcggatgcgcgccacgtgtttgagatcctcgcggatgccggtgagcgccggcgcaaaaaggcgatgaacgagctttgggcagccggtaggggggccgacgccttcaaggtgttcggcgaaatggcggatgtgcccgtggtttcatatcgtaaaaggtacgatttcatgatgtatggctacttgaagaatggagacctgcagtctgcatccgagatacggacccggatgatgcaggggggcatcaagctatccactcaacagagacgaatgcttcggatgctggcagaagccagggcttgcccagagaacatgctgcggatcaaggtggaaatttgcattatggcacaggacatcgatgaggccatccgtttgctccggcatatgagccacggtgataagtcacctccaaacgctcactcctacaatttggtaatcgccggtctctggaaggcagggagaggtgacgaagctgtcaagctgtttggcgagatgacagacatatccctggcgccgaatcacttcacatacactgtcatgataaatggccacttgaaaagactgggtaatggtctgaccccgaggaagaatgggaatggagatctggaggctgcactccagttgaaggctcagatggagcaggcaggcttcaagtcagatgaacccacctaccatttgctgatggcagaactctgctcggctgaacggctgggagatgttacagctttattcgacgagatgatgacacaagagacgacattacataagatcgtccatagcagcatgttgcagttcctctgtagaatcaatgaaggtcagctactgcgcatcatcgaagaatctgcaaagaacggcgtttctgcagcggataatggttgcattaccttgttgttgaaggagctttgcaggatcgacaaggtttcaagcgcagaaaaggcgttgcagacgtttgccaaaacagggctggtcccgacaacagagatgtacaacattcttattgacggctatagcaagatcagggagctccaagcggcattcttgctgtatcgccagatgaaatcgcatgatcagcttgtacctaatgaagccacccatgaggcactactgctggctgtgcgcaacaacacaagcatcgtctactgggaggacgtggaggagttgtttgagaagaatggagttggtatagatgcgatgaacaacgccttttctgatatatatggattcaagtaggtatatcctaatacctagaatgctcaaaagggaacattctagcaagctgtttttagcatctgtagaatggacatattcattgtagatctcggctcctaccttaaac

SEQ ID NO: 1458 - DNA, 255 bp, Zea mays
  Clone ID: 700154112_FLI
cggctgctcctgctgcagctgcaactgagccggcccgcccggcccggcgatggcgcacgagagtcgagaggacgacgacgacgaggcgtataaatataatagcagcgtctaaataagatcctgtcaactgcacccgccattatcgatccatggtcgctcctggggttcatgttcatctgtgtaacgtgctcgcggtcatgtccgtctcgtgccggaattaatatttatatgcatgtatttgtgtttttctgcgtt

SEQ ID NO: 1459 - DNA, 570 bp, Zea mays
  Clone ID: 700154121_FLI
tgatccaggccgcgttggaccggatggacgacgggtactgccggtcagcgctggactacctggagctgcagccggacctgtcggcgctggtccgcggggcgcacacgttccggtgccccaacctggggctcaccagctgggtgcgcctgcccatccacgacgcggacttcgggtgggggcggcccgtgttcatgggccccggcggcatcgcctacgaggggctcgcgttcgtgctccccagcgccaaccgcgacggcagcctgtccgtggccatctcgctgcaggcggagcacatggagaagttccggaagctcatctacgacttctgatctccaactcctccccacaagtcatcagtaccagtacgcgcaacacaaagaagcaagagaccgttgggagtaggttgcagcaatattctttgatttcacacatagttcctgcacacttttccgttcctgcctgccccctttgggcagggcgcataccttttgtgccgaattatttacgagcccctgcaattgtatgatgaatgaacaatgaatgatacagattaataagattaattaactt

SEQ ID NO: 1460 - DNA, 863 bp, Zea mays
  Clone ID: 700154137_FLI
agagcggcggcgcgggcggacaaggagcaggcggaggaggagttgtgccaagccacaatgggtatctcgcgtgactcgatgcacaagcgccgagccaccggtggaaagcagaaggcctggaggaagaagcgaaagtatgagcttggtcgccagccagccaacaccaagttgtcaagcaataagacagtgaggagggtccgtgttcgtggaggtaatgtgaaatggagggctcttcgccttgatactggtaactactcatggggaagtgaagctgttacccgcaagacccgtatcctcgacgtggtctacaatgcatcaaacaatgagcttgtgaggacacaaacccttgtgaagagtgccattgtgcaagttgatgctgccccattcaagcagtggtacctcactcactatggagttgacattggtaggaagaagaaaacccctgctgcaaagaaggataatgctgagggacaagaggttgaggcagcagctgaggaaacgaaaaagagcaaccatgtcacgaggaagcttgagaagcgcaaggagggacgtacccttgacccacacattgaggagcaatttggcagtggacggttgctggcatgcatttcttcccgccctggacagtgtggccgagctgatgggtacatccttgagggtaaagagcttgagttctacatgaagaagctacagaggaagaagggcaagagcgctgtagcttagagcattctcatggattgtcttgcaccgaaatgtgtgtcctgatgagtacactttttttggttagtcgtctcaagttcagagcgttatgccatgttttcagtcctgattagtacactgttttctaaaagcgattgagctct

SEQ ID NO: 1461 - DNA, 680 bp, Zea mays
  Clone ID: 700154158_FLI
gcctgccatctctatctcgattgatgaagagtgctattggtgagggcatgacacgtagagaccattcggatgtgtctaatcagctttatgccaactacgcaattggaaaggatgttcaggccatgaaggcagtcgttggagaggaggcactctcgtctgaggatctgctttacttagagttccttgacaagtttgagaggaagtttgtgacacaaggagcatacgacacacggaacatcttccagtcactagatcttgcatggacattgcttcggatcttccctcgcgaacttctccaccgtatcccggcgaagaccttggaccagtactatagcagagatgcctcccactgaatcactgatcgttgatcagtgttccaatagtttggcaagtgttgaataaattgaacagattggcttcatggccttttccctgtatttatgtgtagtcaggtccaattcttttctgttgatgagcgcaagtttttcgtagatgactcgcggtcacggcaatatttgtgatattgtgtcatctgtggactatggttaaatttcagttatttgttttctttcaccttccagaactgttagcaagagcattctggaccaggatgctcgaacacaactggctgtatgtacatttgtgaatggtgaataaagaaggggcaataaactgctgcg

SEQ ID NO: 1462 - DNA, 1471 bp, Zea mays
  Clone ID: 700154167_FLI
gaactccgaactacaagtttcgcttctcgtcgcgacgactgggcgagaccgccgccgccgccgccgcctgagttctttagaaatggctgatggtgaggacatccagcctcttgtctgcgacaatggcactggaatggtcaaggctggttttgctggcgacgatgcaccaagggctgttttccctagtattgttggccgtcctcgccacactggtgttatggtagggatgggacagaaggatgcgtatgttggcgacgaggcacagtccaagagaggtattctcacgctcaagtatccgatcgagcatggtattgtgagcaactgggatgacatggagaaaatctggcatcacactttctacaacgagcttcgtgttgccccagaggagcaccctgtgttgctcactgaggctcctttgaacccaaaggccaacagggagaagatgacccagattatgttcgagactttcaatgttcctgccatgtacgttgcaattcaagcagtgctgtcactctatgccagtggacgtactactggtattgttctcgactctggtgatggtgtgagtcacactgtgcccatttatgaaggatatgcccttccccatgccattcttcgtctggatcttgctggtcgggacctcacagactccctcatgaaaattctcactgagaggggttattccttcacaacctctgccgagcgagaaattgtgagggacatcaaggagaagcttgcatatatagctcttgactatgagcaagagttggagactgccaagaacagctcctcagttgaaaagagctatgagctgcctgatggccaagtaatcaccatcggcgcagagagattcaggtgccccgaggtcctcttccagccatccatgattggtatggaggctgctggaatccatgagacaacatacaattcaatcatgaagtgtgatgtggatatcaggaaggacctctacggcaacattgtgctcagtggaggttcgactatgttccccggtatcgctgatcggatgagcaaggagatcacttcccttgcaccaagcagcatgaagatcaaggtcgtcgcgccacctgagaggaagtacagtgtctggataggagggtcgatcctagcctcgctcagcactttccaacagatgtggatatcaaaggaggagtacgatgagtctggcccggcaattgttcacaggaagtgcttctaggtttctgccaagttcgtcaagtgcttttagggttcgccatgttcatcatcgctacctagtcttaagttatgcccccttcatttgctgagatatgtgtggcagatttgcatcgttttggtatttcgtggctccatgtgtgagcatgctgtgtcctataacctggtttatgagatgagttgttaaacttgcttggcttgattggttttacctgtaagagctgatagttatataaattgcttgtacttgtttgcatcc

SEQ ID NO: 1463 - DNA, 736 bp, Zea mays
  Clone ID: 700154212_FLI
cctccctcgaccgtccccgtccccgtccccttccggcgcgcaagctcgcccgagatggcaaacgcgagatcgggtgtcgctgtgaatgacgagtgcatgctcaagttcggcgagctgcagtcgaagaggctgcaccgcttcctaactttcaagatggacgacaagttcaaggagatcgttgtggaccaggtcggggatcgcgctaccagctacgaggacttcacaaacagcctccccgagaatgactgccgatacgcgatctatgatttcgactttgtcactgcagaagatgtccagaagagcaggatcttctatatcctatggtccccatcctccgccaaggtgaagagcaagatgctttatgcaagctcaaaccaaaaattcaagagtgggctcaatggcattcaggtggaactgcaggctactgatgcaagtgaaatcagccttgatgagatcaaggatcgggctcgctaggcatcatcatgatcatgcatcatggacttggcctactactgtggatttgtatgccattatagacttggtgctgtgaaagactgcttgatgatttgcgggtttgttgctgtgtaaaaaaaggtcccatggctcccagaagaccatgaaggttcggatctatcatgtaattccttgttatctgccaattatgtatggactatggacatgtgttgcgctgttcaacttactactacaaataagtaatcgataatgttcccttccc

SEQ ID NO: 1464 - DNA, 1439 bp, Zea mays
  Clone ID: 700154223_FLI
cgagcgaggcactgcttttgcattgctcacgacctgagccccagatgacgccgtccgtccatgccgacgagtacgtccggccgcctcaacggccgctggcgctcatggcgcacgacaagccggcatcccatcctcaacaggtgcacatctcggcggtgggggcgcaccacatgcgaattacttgggtcaccgacgaccgcagcgcgccgtccgtggtggactacgggacatctccgggacagtacgacgcctccgagacgggctaccaggccacgtaccagttcttgtcatacacatcgggcgccatacaccacgtcaccatcggcccgctagagccgagcacaacttactactacaggtgcggaagggccggcgacgagttcagtttccgggcacctccggccactctgcccatcgagttcgtcgtcattggtgacgtggggcagacggagtgggcggcgtcgacgctgtcccaaatcggcgccgcggaccacgacatgatgctgcttcccggagacctctcgtacgcggaccgccagcaggtgctctgggactcgtgggggcggctggtgcagcggctggcgagcgcgcggccgtggatggtgactgaggggaaccacgagaaggagacgctacgcgagcacgaaacggtgcagcgcttcgtggcgtacaacgcgcggtggcgcatgccgcacgaggagagcggctcgcgctccaacctctactactccttcgacgcgtccggcggcgcggtgcacgtcgtcatgctgggctcctacgccgacctcgaggaggggtggtcggagcagcacgcgtggctgcggagggaccttgcggcggtggaccggcgcaggacgccgtggctgctggtgctcatgcacgtgccgtggtacaacaccaaccgggcgcaccagggcgaggcggaggccatgcgcagggacatggagagcctgctctatgaggcacgcgtggatgtcgtcttcgcctgtcacacccatgcctatgagcgctttgccagagtttatgacaagaaggccaacagccagggtccgatgtacatcaccattggtgatgcaggcaacaacaaagctgagaaattcatgagtggccatgagttggcgcacctgtcgctgttccgggagccaagctttgggtacgggcggctgaggattatcgacaacaggagagcagtatggacgtggcaccgtaacaacgataaggatgcccaagtctccgacgaggtctggttggagagcttggccaccagtccataactaggaatggaccattccaacggcaatgccaaaacgatattatatatatactagatatgtgaccgttgtgacgggagtaaaaaatttatatgaaacatagaaacagaacaacaaacatcactgtgatatgtaaaatttatgtggtaaatattatcaatatcgcac

SEQ ID NO: 1465 - DNA, 1007 bp, Zea mays
  Clone ID: 700154272_FLI
ggatcggactcaccttgcttggttggtggtacgagcctgggacgcagactcccgacgatgtcgcggcagccgcacggatgaacgacttccacatcggatggttcatgcatcctatggtgttcggggactaccctccggtgatgaggaggaacgtcgggtccaggctgccgaccttcacggacgaggaggcggcgcgagtgagggggtctttcgacttcgtcggattcaaccactacatcgtcgtctacgtcaaggctgaccttggccgcctagacgaccaagtgcgagactacatgggcgatgcagccgtgaagtatgacatgccgtttctcaagtcacgcaaccagttcccgttcggcgccttgacgagcgacttcatgacgtccaccccctgggctctcaagaaaatgctgaggcatctccgggtgacatacaagaaccctgcagtcatgatccatgaaaacggagctgccggacagcctgatccatccggcgtgaacagctacgacgacgagttcaggtcacagttcctgcaggactacatcgaggccacgcttcagtccatcaggaacggatcgaacgtgcaaggctacttcgtgtggtcgttcctggacgtgttcgagtacctgttcggctaccgcctccggttcggcgtctacggcgtcgagttcaactcgacggcaaggacaaggtaccagaggcactcggccaagtggtacgccagcttcctccggggcggcgagctgaggccagtcgctctgcctgacggagcatattcacagtgaccagttacacgtgtacgctccggctccaggggaatatctggcgatcagcgctctcggtgaggtggagagaaaatagagagtttgtaagcaaggatagtcggggtggtatatatagcagtgcttagatacggttttcttgggtaaatgtggtacgagttgaataagttgtggcatgtttggttagaggttagaggattggctctacccgaaaccagctgattc

SEQ ID NO: 1466 - DNA, 1029 bp, Zea mays; identical to SEQ ID NO: 993
  Clone ID: 700154332_FLI

SEQ ID NO: 1467 - DNA, 1347 bp, Zea mays
  Clone ID: 700154351_FLI
gcgccgcggcgggggggagtagcagcaaggtgccggcgctctacgtgttcggcgactccacggcggacgtgggcacgaacaactacttgccgggcggcgccgaagtgccgcgtgccaacttcccccacaacggcgtcgacttccccacggcgcgccccaccggcaggttcagcaacgggtacaacggcgtcgacttcttggccgtgaacatgggcttcaagcgcagccccccgccgttcctcgccgtggccaacaagaccaacaggcaggtcttccgaggtctcctgggagtgaacttcgcctctgcaggatcaggcatcctcgacacgacggggagctccatcatcccgctgagcaagcaggtggagcagttcgcctccgtgcggcgcaacatctcgtcgcgcgtcggcaacgggtctgctgctgccgacgccctgctgtcgcggtccctgttcctcgtcagcaccggcggcaacgacctgttcgccttcttcgcgcggaacagcacgccgtcggacgccgacaagcggcggttcgtcgccaacctcgtcgcgctgtaccagaaccatgtgaaggctctgtacgtgctcggggctcggaagttcgccgtgatcgacgtcccgccggtcgggtgctgcccctacccgaggagcctgcacccgctgggcgcctgcatcgacgtgctcaacgagctggcgcgcgggttcaacgagggcgtcagggcggccatgcacggcctcggcgtgagcttccaggggctcaggtactccgtcgggagctcccacgccgtcgtgcagagcatcatgaagcaccctcaaaggctggggttcaaggacgtgacgaacgcgtgctgcgggtcgggccggttcaacggcaagtccgggtgcacgcccaacgcgacgctgtgcgacaaccgacaccagtacctgttctgggacctgctgcaccccacgcacgccgcctccaagatcgccgccgccgccatctacaacggctcgctccacttcgccgcgccgatgaacttcaggcagctggccgaagacgaccggtgctagctagctagcacagctagagctagcacgaggacgtagggacgtgtctctgttctctgctgcggactgtggtgaatatggtcgttggtgtgtagaggacgacggatgcgtgcatggctgctgtgttcgctgtatgtttctcgaccgtggtttggtttagatgatgatgaccgacgccgccggcgtagtttggactgtgaacgaatttacatcatgctgctgcagaggtacgggtgtaccgtgtacgtgacatcgtctacacctctcctggacaactttaactgaatcttttttt

SEQ ID NO: 1468 - DNA, 1012 bp, Zea mays
  Clone ID: 700154395_FLI
agatgttgagtagaggctttaaggatcagatttacgatgtctacagatatctccctccagaacttcaggtggttttgatctctgcaactcttcctcatgagatcttggagatgactagtaagttcatgaccgaaccggttaggatccttgtgaagcgtgatgagctgaccctggagggcatcaaacaattctttgttgctgttgagaaagaggagtggaagtttgatacactttgtgatctttatgatacactcaccatcacccaagctgttattttctgcaatactaagagaaaggtggattggctcactgaaaaaatgcgtacaaataacttcaccgtatcagctatgcatggtgacatgccccaacaagaaagggatgccattatgggtgagttcaggtctggcgcaactcgtgtgctaataactacagatgtttgggctcgaggactggacgttcagcaggtttcacttgtcataaattatgatctcccaaataatcgtgagctttacatccatcgcattggtcgttctggtcgttttgggcgcaagggtgtggcgatcaatttcgtgcgcaaggatgacatccgtatactgagagatatagagcagtactacagcacacaaattgacgagatgccaatgaatgttgctgatcttatttgagcagcaagaggatcgggaggggagcttcttgtgttggcttgaggcccttggcgctagtgtggctgtggactggagcagatgggctttgtagttgggggtggagcagagattatttccgtttttgccatggcatgaactgtatatattttagctcgctccagctcatgtaacactttgttgctgcgtttgtgcttgggacacgaagacctgtgttgatggcttcgttagtgtgacactgatttggcgtcggatttttgtttgtcatctgtcattcctgtgctgatctgaattgctgtttgtttattattattattattattattattattattattacaattactatc

SEQ ID NO: 1469 - DNA, 1585 bp, Zea mays
  Clone ID: 700154401_FLI
ggcgctgctgacgatggcttcgtcggtgaaggggctggtgcctacgtcgtgcggcgacaaggatgtgtgccacccgacggacgcgcaggcggcggtggtgttcgtggcgctgtacctcatcgcgctgggcacgggcgggatcaagccgtgcgtgtcctccttcggcgccgaccagttcgacgagaacgacgagcgggagaagaagagcaagagctccttcttcaactggttctacttctccatcaacatcggcgcgctggtggcgtccacagtgctggtgtacgtgcagacgcacgtgggctggggctggggcttcggcatccccgccgtggtcatggccatcgccgtcggcagcttcttcgtgggcacgccgctgtacaggcaccagaagcccgggggcagcccgctgacgcgcatcgcgcaggtgctcgtcgcgtgcgcgcgcaagtggaacgtggccgtgcccgcggacaagtcgcggctgcacgagacggtggacggggagtccggcatcgaggggagccgcaagctggagcactcggagcagctggcgtgcctcgacagggctgccgtggtgacggccgaggacggcgcggaggcgagcccgtggcgcctgtgctcggtgacgcaggtggaggagctcaagagcgtgatccggctgctgcccatctgggccagcgggatcgtgttcgcggcggtgtactcgcagatgagcaccatgttcgtgctgcagggtaacacgctggaccagagcatggggccccggttcaagatcccctcggcgacgctgtccatggtggacaccatcagcgtcatcgtctgggtccccgtgtacgaccgcgccatcgtgcccctggtgcgctcctacaccgggaggccgcgcgggttcacgcagctgcagcgcatgggcatcggcctcgtcgtctccatcttctccatggtggcggcgggcgtgctggacatcgtgcggctgcgcgccatcgcgcggcacggcctgtacggcgaggacgacatcgtgcccatctccatcttctggcagataccgcagtacttcatcatcgggtgcgcggaggtgttcaccttcgtggggcagctggagttcttctacgaccaggcgcccgacgccatgaggagcatgtgctccgcgctgtcgctcaccaccgtcgcgctcggcaactacctcagcacggtcctggtgaccatcgtcacccacatcaccaccaggcacggccgcatcgggtggatcccggagaacctcaaccgcggccacctcgactacttcttctggctgctcgccgtgctcagccttctcaacttccttgcctacctcgtcatcgccagctggtacaagtacaagaagacggccgatgattaccctggcgccaaaggggagcacggtacagagcactgatgggcgagatggcggaaatggagtgatttctatgtgtggttagctgtctgtcgacttgttttgccacagtttgggtgcttaaacgttaacgtacgtactagttcaatatagtgtctcgggggcgaattggttgtttacatgtcatgtgtttatatatgcgcaatgttcgatctc

SEQ ID NO: 1470 - DNA, 3244 bp, Zea mays
  Clone ID: 700154435_FLI
agccaatctcctcctcctcctccgctctcagacgagcagcggttgccatcactctccacttcccacgcccgctgcgggctcgcaggcggcagagaattgtctgtgccgccgggtgggaatttgattcggtcggattcgctgcgccgcgatgccggagcggcaccagtccatcgacgcgcagctgcggctgctggcccccgggaaggtctccgaggacgacaagctcgtcgagtacgacgccctcctcgtcgaccgcttcctcgacatcctccaggacctgcacggcccccacctgcgcgaattcgtgcaggagtgctacgagctctcggcggagtacgagaacgaccgggatgaggctcggcttggcgagctcgggagcaagctcaccagcctgccgccgggggactccattgtcgtcgccagttccttctcgcacatgctcaacctcgctaacctcgccgaggaagtgcagatcgcgcaccgtcgccggatcaagctaaagcggggagacttcgccgacgaggcctccgcgccgacggagtcggacatcgaggagacgctcaagcgcctcgtctcgcagctcggcaagtcgcgggaggaggtcttcgacgcgctcaagaaccagaccgtcgacctcgttttcaccgcccaccctacacagtccgtgaggaggtctcttctccagaagcatggaaggatccgtaactgcctgaggcagctttatgccaaggacatcactgctgacgacaagcaggagcttgatgaggcacttcagagggagattcaagctgctttcagaactgatgaaatccgcagaacccctcccactcctcaagatgaaatgcgtgctggaatgagttacttccatgaaactatatggaagggtgtaccaaaattcttgcgccgtattgacaccgctctgaaaaatattgggatcaatgaacgtctcccttacaatgctcctctcattcagttctcttcctggatgggtggtgatcgtgatggaaatccaagagtaacaccagaggttacacgggatgtatgcttgttggcgagaatgatggctgctaacttgtacttctctcagattgaagatttaatgtttgagctgtctatgtggcgctgcagtgatgaacttcggatccgtgcagatgaactacatcgctcttcaagaaaagctgcaaagcactatatagaattctggaagcaagttccgccaaatgaaccatatcgtgtcatacttggtgatgtcagggataaattgtactacacacgtgaacgttctcgtcacctattgacatctggaatttctgagattctagaggaggcaacttttactaatgttgaacagtttctggaacctcttgagctctgttatagatcattatgtgcttgtggtgacaaacctatagctgatggaagtcttcttgatttcttgcgtcaagtatcaacttttgggcttgcccttgtgaagctcgacatcaggcaggaatctgatcgacacactgatgtccttgattcgataacgacacatcttggaattggctcctatgctgaatggtctgaggagaaacgccaggattggctgttgtctgaactgaggggcaaacgtccattgtttggttcagatcttcctcagactgaagagactgctgatgttttaggcacatttcatgtccttgcagagcttcctgcagattgctttggcgcgtatatcatctctatggcaactgccccatccgatgtgcttgcggtcgagcttttgcagcgtgagtgccatgtaaaacatccactgagagttgttccactttttgagaaacttgcagatcttgaagcagctccagcagctgtagcacggctcttttcaattgactggtacatggataggattaatggcaagcaggaggtcatgattggatattcagactctggcaaagatgccgggcgtctctctgcagcatggcaaatgtataaagcacaagaagagctcatcaaagtggcaaagcattatggagtcaagttgacaatgtttcatgggaggggtggaacagttggcagaggaggtggtccaactcatctggccatattatctcagccaccagacacgatacatggatcacttcgtgtaacagttcaaggcgaagttattgagcactcctttggagaggagctcttgtgcttcagaactttgcaacgctacactgcagctactcttgagcatggcatgcatcctccgatttcccctaagccagaatggcgtgctctgatggatgaaatggctgttgtagcaactaaagaatatcgatcaattgtcttccaagaaccacgcttcgttgaatacttcagatcggctacacctgagactgaatatggtaggatgaatattggcagccgtccatcaaagaggaagcctagtgggggaatagaatcactccgtgcaattccatggatctttgcttggacacaaacaaggttccatctgcctgtctggcttggatttggtgcagcgataaagcacatcatgcagaaggacatcaggaacatccatatactgagagaaatgtacaatgagtggccattcttcagggtcacccttgatttgcttgagatggttttcgcgaagggagacccgggaatcgcagctgtgtacgacaaattgctagtggctgatgatttgcaatccttcggcgagcaactgaggaagaactatgaggagacaaaagagctactccttcaggttgctggtcacaaggacgtccttgaaggtgatccttatctgaagcagcgtctgcggctgcgtgagtcctacatcaccactctgaacgtgtgccaggcctacaccctgaagcggatacgcgacccgagcttccaggtgagcccgcagccgcccctgtccaaggagttcaccgacgagagtcagccggcggagctggtgcagctgaaccagcagagcgagtacgctccaggcctggaggacaccctcatcctgaccatgaagggcatcgccgccggcatgcagaacaccggctaggccaagatcttcggtgtgcaaataacctgtctcccatgagacggtggacgatatgtgtaggcctgtgagcagttagtacaccggcgccagtgtgttctggaggatttttcatgtcagagcctttctcttgtgtgcttgctgtagatgccaaggggagcttattggctgttgaagcctgatgcaaaataaagtacgaaactatgttttttgttt

SEQ ID NO: 1471 - DNA, 1014 bp, Zea mays
  Clone ID: 700154447_FLI
cgcaacaagatggtgaagctcgcattcggaagcgtcggcgactccttcagcgtcacctccatcaaggcctacgtggcggagttcatcgccaccctcctcttcgtcttcgccggcgtgggttccgccatcgccttcgggcaactgacgaatggcggcgcgctggaccctgcgggactggtggcgatcgcggtggcgcacgcgctggccctcttcgtgggcgtctccgtggccgcgaacacctccggcggccacctgaaccccgccgtgacgttcggcctggccgtgggcggccacatcaccgtcctcaccggcctcttctactgggtggcccagctgctgggcgcgtccgtggcgtgcctgctcctcaggttcgtgacccacggcaaggccatcccgacgcacggcgtctccggcggcaccaccgagctggagggcgtggtgttcgagatcgtcatcaccttcgcgctcgtctacaccgtctacgccaccgccgccgaccccaagaagggctccctcggcaccatcgcgcccatcgccatcggcttcatcgtcggcgccaacatcctcgccgcggggcccttcagcggcggctccatgaaccccgcccgctccttcggccccgccgtcgccgcggccgacttcgccggcaactgggtctactgggtcggcccgctcatcggcggcggcctcgctggcctcgtctacggcgacgtcttcatcggcggctcctaccagcaggtcgccgaccaggactacgcctaagtagtgtgctccgttcgtctggattgagctcatccaacgcagccgcgcgtttcgatcggcgtcgtcatttgctttgctcttcatttcatcacgttatgtaacgtgccaatgatgtgtgtcgtcctggtctgttccgtcgtccttgtattcatttcccttcttttttcggggtaaaatcgatgtaaagatctcatccgatctgccgttttcgatcgccttggagtggaaaaaaaacaggtgattttcgtttcg

SEQ ID NO: 1472 - DNA, 1289 bp, Zea mays
  Clone ID: 700154473_FLI
cgacttttttttcaagaagacaggagaagggagttgtagtgagttttaagaatggcgagtgcacaggcagtggggcaaggagaacgaggccacttcgttctgaagagcggacacaccattccggccgttggtctaggcacttggagggccggctcagataccgctcactctgttcggaccgccatcgccgaggctggatataggcacgtggacacagctgcccaatacggagtagagaaagaggtcggtagaggacttaaagctgcgatggagggcgggatcaacaggaaagatttgtttgtgacgtcgaagctatggtgcaccgagctggctcctgatagggttcggccagcactcgagaaaacactcaaggacttgcagctggattacctggatctctaccttatccactggcccttcaggctgaaagacggggcgcacatgcccccggaagccggggaggtgctggagttcgatatggaaggggtgtggagggagatggaaggcctcgtgaaagacgggctcgtcaaggatataggtgtctgcaattacacggtcgccaagctcaaccgcctgatgcggtcagcgaatgttccaccggcagtgtgccagatggaaatgcaccctgggtggaagaacgacaggatctttgaggcatgcaagaagcatgggatccatgttactgcttactctccgctgggtccgtcagagaagaacctagcgcacgacccgctcgtcgaaaaggtagccaacaaactggacaagaccccggggcaggtgctcctcaggtgggcgctccagagggggacaagcgtcattcctaaatcgaccaaggacggaaggatcaaagagaacatccaggtgttcgggtgggagatccctgaggaggacttcagggccctgtgcggcatcaaagatgagaagcgcgtgctgaccggagaggagctgttcgtgaacaagacccacgggccgtacaagagcgcgaccgaggtgtgggaccacgaggactgagcggagctgccgtgccgccggatccctccactccacctgatgaaaccagaataaaggataccgacgcacctgtcagtcacctccctcccgtgccttgcgagagcggcagcctctcgcacagggaagatgctctgtgtctgagagcatgcagcctcgcacgagaaagatgcagaaggagtgtgtgtggcgcgcaatacactcctgtactgtacgatagactgaataataataaagaagaaaacgcagcagtttgccgttgcgttttcctttgtgcttgc

SEQ ID NO: 1473 - DNA, 1309 bp, Zea mays
  Clone ID: 700154547_FLI
ggattaggagcctgaaagatcgagaagccaaacccacaggcagagaatagcacggtttcgtccatccgatccgcgacgatccacagccatggcgatggcttacaagatggcgacggaggggatggacgtgaaggaggagtgccagcgctggttcatggagatgaagtggaagaaggtgcaccgcttcgtggtgtacaggatcgacgactgccgctacgccgtcttcgacttcgacttcgtcagcgtcgacaactgccagaagagcaagatcttcttcatcgcctggtacgtacgtacgtacgtacgaattcctgagccgctcgccttcagtttcccgtccaatggcttggctgttcaatcagtgcagcatcctaacgtcacaaaagcagggaaattgttgcttgcggcaatcatcccagctgcctttattaaggtcgccggttattttatcagatctgatctagcctgaatccacctgttgcctagatctgtcagcccaccgaaagcacgcagcgcccacgatgacagttgacagccataggcaaaactgtccaataatccgccagccatacattattattttttggacaataagttagtagcaacccgtcagcagaaacgagagcaactataatttatatacatctacctttcttgatctgtccgtgtccggcaacaagagcagcagcaaacaaatcaggattccatcgctacgagcaagcaactaccgaccgagttattctactactgctagcttgtcaactcgctccggtgtccacttgttaaagcgctatgattctgctggtgcgcacgcagttaggtgttctgacgggtgggattcgtttgctcggcggttggtgccgcgcgccgcgcctttttcttcttctttcgcgcaggtcaccggcggcgtcgaggatacgggccaagatcctgtacgcgacgtcgaagcagggcctgcggcggctgctggacggggtgcactacgaggtgcaggccaccgacccctccgagatgggcttcgacgtcatcagaggccgcgcgcaatgagagcgtgattggcgttggtgtgatgagctgagcctcccgatgatgccggtctgacgaggcttcgcgtgtgtttgctttccccccggttcttccgagagatggtgcagtgcaggggcgtggtgtgctgatgctgatgggtggagttactggagtagaagctgagggagtggcagcggattaatgaaacgtccatctccgcgacgtagaattccactgaacaatgctccagtgcaccataagctgctgcttcagatttgtttag

SEQ ID NO: 1474 - DNA, 1350 bp, Zea mays
  Clone ID: 700154638_FLI
tctcttgaagcctcgagactcgtctcgccgctgctccctcagctctgccgctgcgtgcctgcgttagctgttgcattgcagcgcagccccgcgagccttgagctgctagctcgcccttcaccacagtccccagacatggagttcgaagaccgctgccacaaggtccaggagcccaagttcgactgcctgctcttcgacctcgacgacaccctgtacccgctgagcgccgggatcgcaggccatgtcaagaagaacattgaagattacatggttgagaagctgggtattgacgagaccaagatcgagaacctgggcaatctgctgtacaagaactacggcaccacgatggctggcctcagggccatcggctacagcttcgattacgatgagtaccacgccttcgtccatggaaggctgccgtacgacaacatcaagcctgaccccattctcaagcacattctcaagaacctgcgcatccgcaaactcatattcaccaacggtgacatggtccacgccgtgagagccctcaagaggctgggcctggaggactgcttcgaggggatcatctgcttcgagaccctgaacccgccctgcccgccgcagggagaccaggagcccgagatcttcgacatcgccgaccacttcgcccgctccggcaccgccgacgagctgcccaagacccccgtgctgtgcaagcccaacgtggacgccatggaggaggcgctcaggatcgccaacgtcaacccgcacaaggcgatcttcttcgacgacagcgtacgcaacatccaggccgggaagcagattggcctccacacggtgctggtgggcaaatcgcagcgggtgaaaggcgcggaccacgcgctggagagcatccacaacatcagggaagcgctgccggagctgtgggaggaggccgagaaggcggaggacgtgctctaccccgaacgcgttgcgatggagacctcggtcaccgcgtaaaacccctgaatgcctccggtgcaccgtcagccgaactttctcgacatctccaggaccgcatcaacgatcacatgtcactcgctccccgagccagggccggtgatgatctcgcgctggaactgaatccaccagcaatgggcgggccgaggatcgatttccgacagcaggaggggtgcagcatgtaaagggggaacagatgagatcatgtttgggttggtcccccgttgtatatgtagttatgtatcagccagtcctttgtttgtaaattaccagtatttagaagtaataagaaaatgggggtttacgtgtacgtttcctgtgctctgtcatctgaagcaataaaactggttagcatgaccggaagatcgacat

SEQ ID NO: 1475 - DNA, 758 bp, Zea mays
  Clone ID: 700154676_FLI
gctggaagggcgccgacgtcctcgtcttcaactcctacctctggtgggtcgccggggacaaaatccagatcctgaggggcgccgacaacgacccgagcaaggacatcgtggagatgaagtcggaggaggcctaccggctggtgctgcaccaggtggtccggtggctggagcgcaacgtggaccccggcaagtcgcgggtgttcttcgtcaccgcttcgccgacgcacacggacggaagggcgtggggcgacgacgacgcggagggcagcggcaactgctacaaccagacgtcgccgatcagcgccgcctcgtcctaccgtggcggcacgagccaggagatgctgcgcgcgacggaggaggtgctggccacgtcgcgggtgcccgtcgggctggtcaatatcacgcggctgtccgagtaccgccgggacgcgcacacgcagacctacaagaagcagtgggtggaaccgacggccgagcagcgcgccgaccccaggagctacgccgactgcacgcactggtgcctccccggcgtgccggacacgtggaatgagctgctctactggaagctcttcttccccagcaacgatcaggtcctctgatggtgcctgcatacatacgcctggaaaccaactgctaggggctagcccaaagaaaattgtgtctagatgaagaacaaagccatggtgttcaaatgttttgttttgatttcggatatggacgctgtcgatgctcttgttctctgtggaattcttcttacc

SEQ ID NO: 1476 - DNA, 2464 bp, Zea mays
  Clone ID: 700154686_FLI
ggaattggctgctcaggcaaaggagaggcacatcctcagaacgcaaacccttctttgtgatatgctcctgcgggatgctcctgttgggatatttactcggtcacctaatgtgatggatctagtaaagtgcgatggagctgcattgtattaccagaaccagcttttggtgcttggatcaacaccctctgagtcagagataaagagcattgcaacatggctgcaggataatcatgatggttcaactgggctgagtactgacagcttagtggaagcgggttatcctggtgctgttgcacttcgtgaagttgtgtgtggcatggcggccataaagatctcttccaaagattttatcttctggttccgatcgcacacaacaaaggagatcaagtggggtggggctaagcatgaaccggttgatgcagatgacgatggcaggaggatgcatccacgatcttcattcaaggccttcttggaggtggttaaatggagaagtgttccctgggaagatgttgaaatggatgctatccattctttgcagttaatattacgtggctccctgccagatgaagatgccaacagaaacaatgtaaggtccattgtaaaagctccatctgatgatatgaagaagatacaggggctacttgaactgagaacagttacaaatgagatggtccgcttaattgagacagcaactgcccctgtcttggctgtcgacattgccggtaacataaatggatggaacaataaagctgcagaactaacaggtttacctgtaatggaagccatagggaggcccctgatagatcttgttgttactgattctatagaagtggttaagcagattttggactcagctttacaaggaattgaagagcaaaatatggaaatcaagcttaaaacattccatgaacatgaatgcaatggtccagtaatcttgaaggttaactcctgctgtagtcgggacctttcagagaaagtcattggagtttgctttgtagcacaagatttgaccaggcagaagatgattatggataagtatactaggatacaaggagactatgttgccatagtaaagaaccccactgagctcatccctcccatatttatgatcaatgatcttggttcctgcttagagtggaataaagctatgcagaagattaccggtataaagagggaagatgcgataaacaaattgttaattggggaggtcttcacgcttcatgattatggctgtagggtgaaagatcatgcaactctaacgaaacttagcatactgatgaatgcagtgatttctggtcaggatcctgagaagctcttttttggtttcttcgacacagatgggaagtatattgaatccttgctgacagtgaacaagaggacagatgctgagggtaagatcactggtgctctttgctttctgcatgtggccagtccagagcttcagcatgctctccaggtgcagaaaatgtcggaacaagctgcgacaaacagctttaaggaattaacttacattcgtcaagaattaaggaacccactcaatggtatgcaatttacttgtaacttattgaagccttctgaattgacagaggaacagcggcaacttctttcatctaatgttctctgtcaggaccagctgaaaaagattttacatgacactgatcttgaaagcattgaacagtgctatatggagatgaacacagtagagttcaaccttgagcaagctctgaatacggttctgatgcaaggcattcctttgggcaaggaaaaacagatttcaattgaacgtaattggcctgtggaagtatcatgcatgtacctttatggggacaatttaaggcttcagcagatcctagcagactatctagcatgcgcccttcaattcacacaaactgctgaaggacctatcgtgctccaggtcatgtctaagaaggaaaacattggatctggcatgcagattgctcatttggagttcaggattgtccatccagctccaggcgttccagaggccctgatacaggagatgttccagcacaacccaggggtgtccagggagggcctcggcctgtacataagccagaagctggtgaaaacgatgagcggcacggtacagtaccttcgagaagccgacacctcgtcgttcatcatcctgatggagttcccggtcgcccagctcagcagcaagcggtccaagccttcgacgagtaaattctgaccctcatgctgctggaactgcagcgagtgttctgccgtgtcgaagtctcggttgtagctagccaagtggctgctactgaaacatcggttggtcggttctggtatctagcacggcctgtgtagtgcggatagatttggttgtttggctttggagagataagctagctggctaggtgtaacgtaacgtcgaccgataactgtatgtgaatgatgatgagctgtgaggacgaataaaggcttcacttgtgttctc

SEQ ID NO: 1477 - DNA, 2096 bp, Zea mays
  Clone ID: 700154689_FLI
atttcatccccggaaagggaaagaaagttactatattcacaggttgccaaagccctaaacagcagtgcttctgtagatgaagcatcagcatcaaatgtcgttatgctatccgggttcagtatacccaagctcgtcttgcagattgttactattgaaactgtactgagaatggataagccaaacaaggagcttgctgttttgaaggacatagcatttacagtgtacaacaaggcacgacgaatcccacgggctgtctccacaagcgatatgttccagtcaccaacttatttgggtagatctcagtccacaatgatgcatgttacatctcctgctcctactctttggaaggaatgtttagttcctcgaatgtctgggccaactctctctcgagaaaccgattttgatgcatccatgaggtcggcaacatgggataactcatggcagcctgctcgttcgggaggacttctggacccaagtaagctgcctgatttatgtgctcaggatgataggaaatatgcctttgagccacttttcatactagcagaccctgggtctgccgatcttaatgctttaatggaaccatcaaaatctggagcagatgcatctggcagcagggtatatggctcaatttcaggaagtaactctgatagtggagtgagccctctactcgacgtatctgagagtgacagtgcagcaagtcttcattgctgttatggttggactgaggactggcgatggctagtgtgcatttggacagatgctagaggagaattattggacagcttaatatttccttttggtggtattagtagccgccaagacactaaagttctccaaagccttttcatccaaattctacagcaaggctgtcaaataatgtcgtcttcacctgaggctagcaatatgagaccacgagatgtcataataactcgtatcggaggtttccttgagcttgaaatccaagaatggcagaaggcaatatactcttatggtggcaatgaagtgaagaagtggcctgtgcagttacggcgatccatacctgagggtattccacctagttcaaatggtcctacgctccagcagcagcagcagcaagacatggccttaattcaagatagaaacatgccttcctcaccaaaccctctgtatagccctcatccaaaatcaagcttcatgaaaggtgcacttggacaatctggcaacaaaaaacagatccttgtggaacaaagtggaatggacacttcaaggggatcactgcacttagttcgtagcatcagtttggttgcagtttcccaagatcattcgttgcatctcacatgccaagcagatctactgagcagacctgcttcagctggcgaagggagtcaaggcagcagtggcccttggagttacctggaaggtttcactccagtgaagtccattgggtcaatgtcagcgtcacactcgtaccttctagttccttcgccaagtatgagatacctctctcctgcaacattacagctcccgacatgcctcacatcggagtcaccgccgcttgcccatctactgcacagcaaagggactgcgattcccttagcgatgggctatgtcgtctcgaaagccgtcccacctgttaggagggactctgcacaactcaccaaggatgaacagccctctgttctctcagtcagcatcatcgatcactatggaggcagcattgggactgttcaagagaagatgagccgaggaggcggcggcggcggcggcagcaaacaggcaaggaacttgagtcaggagacaacaggtcgtgagtgtgagatggagatgcatagtgtgttggaagctgtggccgcggagcttcactctctgtcttggttgacagtaagcccggtgtacacagaaaggcgcacagcactgccctttcactgtgacatggtcctaaggatgcggcggcttctacactacgcagataagtatctatctgaacctaagggagagacaactcactaattgtcatgtacaattaatatctagctaggtaggtatgtgagggcacatttgacgagctttgtagactgattttgcaataaccctgataacttacaggtggatgctgt

SEQ ID NO: 1478 - DNA, 589 bp, Zea mays
  Clone ID: 700154847_FLI
cgatctctatcttcgcctcttccatcgcaggattcagcggccatgggcggcggcaacgcccagaagtccaagatggcgcgcgagaggaacgccgagaagaacaagggcggcaaaggcagccagctggaggtcaacaagaaggccatgaacatccaggtatcttcctcctcttgcttgccctgtgttcctgtcgagattttgggggttttcccagattcgcttgggtttcaggctactccgtctggattcggcagatccagccacggcgcgattctcgaaccctaattgtcaaccatggctatgcctctagttttagggttgatttggtggtggatcccgaatcaccaaatcaaaccttatactgctttatatatgtatgggcaacgacagttcttctgttacacatgcaacatctgatccatagatacaactatggtttgttaggttttttttataaaaattattgagctggtggtggaagtgtttaagtgttagatatgatctacggttgtatcacgatctaatgtatcagatggtttgcttacacgcttgaacagaagaactgcttgtatagcagtcattgccgaag

SEQ ID NO: 1479 - DNA, 2622 bp, Zea mays
  Clone ID: 700154866_FLI
gttttcagggggtccggccatttcatccaggtcgtgtgaccactctgatctggattcctcttgcagccgcttcgggcgcgggtgggatcggcccgtggccggcggagatgtccggattcgtcggtgtcgtcgtgtccgacccctcgctgcaggggcagttcacgcaggtcgagctccgatcgctcaaggccaagttcgtgtctctgaagagagattccggccatgtcaccactaagaatctcccggtgatgatgaagaagctgagggggctcaatgaggtggtctctgtggaggagatcgcggccttcctgtccgagtcgtaccccgacagcgatcaggagattgaattcgaatccttcctccgggagtatctgaatctgcaggcgcgggtgagtgccaaggagggtggtgccggcggtggccggggtggcaagtcgtcgttcctcaagtccagcaccactacgctgctgcacaacctcaatcaggcagagaaatcttcgtatgtggcgcacatcaatacttacctccgtgaagacccattcctgaagaagtacttgcccatggacccgtctggaaaccagctgttcgatctcatccgggatggtgttctgctctgcaaactgatcaatgtagctgtacctgggaccattgatgagagggcaataaataagaaaagagttcttaacccatgggagagaaatgaaaatcacacgctctgcctcaattccgccaaggccattggatgcactgttgtcaacattggcacacaggatttggtggagggaaggcctcatttagttcttggattgatatcacaaatcataaagattcaacttttagctgatcttaacctcaagaagacaccacagctggtggagctatttgatgacagcaaggatatagacgaggttttgagtttgtcgccagaaaagatgctacttcggtggatgaaccatcatctgaaaaaagctggctacaagaaaactgttaacaatttctcttcagatgtgaaggatggtgaagcgtatgcttaccttctgaaagctcttgctccagagcattcccctgaaactacattggacaccaaggatccgaatgagagggcaaaactagtacttgaacaagcggcgaagttggactgtaagagatacttgaccccgaaggatatcactgagggatctgccaatttaaatcttgcatttgttgcacaaatattccagcataggaatggtctcaccagtgacaccaaacaagttactctcacacagaccgcaacacctgatgatgttctagtatctagagaagaaagagcctttcggatgtggatcaacagccttggggttgaatcatatgtaaacaatgtctttgaagatgttcgcaatggatgggtacttcttgaagtgcttgacaaggtgtctcctggatctgtcaattggaagctggcaacaaaacctccaattaaattgccatttagaaaactggagaattgcaatcaagttgtaaaaattgggaagcagttgaagttttctttagtaaatctggctggaaacgatattgttcagggaaataagaaattgattgttgcacttctgtggcaattgatgagattcaatatcctccagctgttaaacaaactgagattccactcccaaggagggtcccaaggaaaagaaatttctgatgctgatattctagactgggccaacagcaaagtgaaagcgtccggaagaacatctcgaatggaaagtttcaaggacaagagcttatcaaatggattgttcttcctcgagcttcttagcacagtacagccaagggttgtgaactggaaagttgttactaaaggggaaactgatgaggacaagaagctgaatgctacgtacatcattagtgttgcaaggaagattggatgctctgtgttcctgttgccagaggacatcgtcgaggtgaatcagaagatgattctaacacttaccgctagcattatgtattggagcctacagaatcagcatcagtcacagtctgaaatgccagagcaatcagaaccatctagcatggcttcagacgcagcctctgacattgcctcggaggacggtgcttcaacgacagcaccatctgagttggatgaggtgaactcgctgtctgatagcgtatccaatttgacaacggatgatgctacttcaaacgccccatccactgaaaacggaaatggtgtggcagggtcctgatggttatagttatgcagacccagttctttttcccacacacagtgctgttttttttatacagggaacagtgcttttcatggtgctcaaagtcgtcgctaccagaagtggtttttttaatacttctgcttcatgagtatggtagcttgatagatacagcaagtgcagatagatatagatgccctttgttcatggaatctgcttagactatagggggcggggcgggaaagatagtatatgtcgctggccgggtagtttctgtatttgtggcacacgcacccatgcaaggttttacctctttatgtatcttgtcggtcaattcgttcatatgtttattggactggtcatcgcttgtaatgctgttgctgctctgaaccgtgcctgtacataacatacactc

SEQ ID NO: 1480 - DNA, 1373 bp, Zea mays
  Clone ID: 700154889_FLI
ccgcggagggggcagacagagagtaaaggaggcaagtaggcgactccggcgagagaagtgcgggtgcggccatggcggacaagccgagccgcgcgctggtcgtctacgccgccggccacgccgcggcgctcatccccccgccgggctccgcagccgcggggagccacctcgacgcgttcgcctcccgcgcctgctgcggccttctcaccctacgctccccgccgacttcccatcctacgaccggcaccgaggataatagcagcacgattttggaactggcgcagctgctcgatgtttacgatcatctctaccccggaaagaatgcggaaagtggtcaagaagttgcccaagtggatccacaggagctcgtggttcccaagctgtctgagaggtttatgggcctgagagctgccttggtcaccagttgcccccatgtcagctccttggcagcgaatcttggtttccatgtttttaaaaccaatgattttgccccacaatctggctcgtccagcattactaaagaggatggattaatcaaaagagcatttgatctgctaggattctcggatggggatgtgcaggaaacatctgaattcgatctagtcttcatgcatgttgccatggagaacacaagcagcaagttaggaaagttaggaatgaagacagatatcaatcggctcgacaaattagttggtgcagtcttggaatctgcgcctgttggttcagctattgcttcgcgtattcatgtatctgtgattttgagctatgggtctgcttctggaaataaggatgagttttcccttttaacctcttcaaccgaaacagattcagacttgaagctactgcgtccacgccagagctacacaatgaaaacagggcgtacattagatgatgtcagacttcatcatccaattttgctggcacagtggcaggacggagtaacacgtgttgatttggctaaagggttctcttttgaggagtttatgaagcgtggtggaaaccttgccatgcttgctgagcgcttcctgcacgaggtggcatttaagctctggaaagcgcctaaatatggggcttgaggagggtatccagcgttgactgacttggcgtcgcggataaataatcgaagcaccagatgagttgtcgctttgtaacggaaatgacttgagtgatgccagacattgtggcatgtgagctttttatgtgaagtgtaacgtgaacaggccctgatgcgataaactgtttggacatcgttactggttcagccaatgagaacctgtagcaaaacaatatgatgttttcttatggtagtttggaatggatggagttacatgcattgagcactgtaattttgataatataagactatctccgtc

SEQ ID NO: 1481 - DNA, 1519 bp, Zea mays
  Clone ID: 700154910_FLI
ccaccagacatattgcagtctgccgtagaagtgaaagggtttggtgaaaaattccggccgcctcagcgtcgcgaggtgggggacgagacgaagccagagcgccccaaacccaaaccccagaaccccgacatagggttacgccatcgccatgggatctgttgcctccgcagcagcgccaccttctcctcactcagcgctaccccaggagggcgcgccgccctatggccccgggctcgccgggatcctcccgcagacgtcagtgggagaggagaagaaggaggagaaggtggactacctcaacctcctctgccccgtgcccttcgaggagatccagcgcgaggctctcatgtctttgaagcctgaactttttgaaggattgaggtttgacttcacaaaagggttgaatcaaaagttttctcttagccacagcgtttttatgggctccttagaagttccagcccaggggtctgaaactattaaagttccaactgctcattatgaatttggtgccaattttttagatccaaagttaatgctcattggaagggtgatgacagatggaaggcttaatgctcgcgtgaaatgtgatttgacagacaatctgatgctgaaagtaaatgcacagcttacccaagaggcacattactcacaaggaatgtttaactttgactacaagggaagtgactatcgagcacaattccaaatagggaacaatgcattctatggtgcaaattatattcagagtgttactccgaacctatcaatgggaactgaaatgttctggcttggtcaccaaaggaagtctggaattggttttgcctgtcgctataacacggacaaaatggtgggcactctacaggtcgcaagcactggaatagttgccttaagttatgtccagaagatttctgagaaggtttcccttgcgtctgatttcatgtataaccatatgtcaagagacgtaacttccagctttggttacgattacttgcttaggcagtgccgtctaagaggcaaaattgactcgaatggtgttgttgcggcatatctggaggagaggttgaacatgggtgtcaactttcttctatctgctgagattgaccattgtaagaagaactacaagtttggtttcggaatgaccgtaggagagtaattctgctaaaacaattgctgagaagagcacatgaggactttcgcagtctgctttgcattgtatgttaagatacttcaggtctcagttttgattgatcaggttctgccccgtcgaaaaaaatactagctgttgctgctttacagggttttgtctcagtgtattggtggttgtttattttcagctacttgagcatgggggccatgattctttgttcatcttggatgtaactagctgattggtgttccaatgatgttgtatttgcagaacgattttttccttttaaatcaccaacaaccaccacactaggctttttctgtaccatcatggacgggccacaagattttacagttcaaagctttggcacttgcc

SEQ ID NO: 1482 - DNA, 1483 bp, Zea mays
  Clone ID: 700154924_FLI
gctgctctcccccacctcccggtccggcagcagagagcgggggtgcagagagatcgagatccggaggccgcgagtgggagcgccaccaccagcgactgcggcaatggcgggcacggtgacggtcccggggtcgtcgaccccctccacgccgctgctcaaggacgagctcgacatcgtgatcccgacgatccgcaacctcgacttcctggagatgtggcggcccttcttccagccctaccacctcatcatcgtgcaggacggcgacccgaccaagaccatcaaggtgcccgagggcttcgactacgagctctacaaccgcaacgacatcaaccgcatcctcgggcccaaggcctcctgcatctcattcaaggactccgcctgccgctgcttcggctacatggtctccaagaagaagtacatctacaccatcgacgacgactgcttcgttgccaaggacccatctggcaaggatatcaatgctcttgagcagcacatcaagaacctcctcagcccatccaccccgttcttcttcaacaccctgtacgacccctaccgtgagggtgctgactttgtgcgtggataccccttcagcctcagggagggtgctcacaccgccgtctcccacggcctgtggctgaacatccctgactatgatgctcccacacagctggtcaagcccaaggagaggaatgagaggtatgttgatgctgtcatgacaatccccaagggaaccttgttccccatgtgtggcatgaaccttgccttcgacagggatctcattggccctgctatgtactttggtctcatgggtgatggccagcccatcggtcgctacgacgacatgtgggcaggatggtgtgtgaaggtcatctgcgaccacctgagcctgggagtcaagactggcctgccatacatctggcacagcaaggctagcaaccccttcgttaacttgaagaaggaatacaagggcatcttctggcaggaggacatcatccccttcttccagaacgtgaccatccccaaggactgcgacaccgtccaaaagtgctacatctacctctctggacaagtgaaggagaagctgggcacgattgacccctactttgtcaagctcggtgacgccatggtcacctggatcgaggcctgggatgagctgaacccgtcgacccctgccgccgcaaatggcaaggccaagtagatgtgccatcacttcggcactggagtgaaaaagaaagtatgattgggtcctgcctaggccccatagatatagctcttttttgagaaggaagagagattaattcagcagcagcttttataaattctttgttgtcatgaagcaggtggttcttttgtagttgatgaaagggatttgtcgtcgctatcgtttacataattcagacaataattttatattgtgtaattctgagaatcaaagcactgtttgtgttatagcatatctaagaatgagcattgctgttgtttt

SEQ ID NO: 1483 - DNA, 1503 bp, Zea mays
  Clone ID: 700154972_FLI
gctcgttcgatctgtgcagcagatctgaggtcccgggcgaccgtgaagcagcttcaatcgtcggcatggcgctcgtattgcatagtggggctggaaacaagaatgccttcaaagcacttattgctgcagaatacagtgggatcaaggttgagttgaccaaggattttgagatgggtgtctccaacaagacccctgagtttcttaagatgaacccccttgggaaggttcctgttctggagactcctgatggccctgtttttgagagtaatgctatcgcacgctatgttgctcgcttgaaggatgacaaccctctttttgggtcttcccgtattgaacaagcccacgttgagcaatggatggattttgccgcaacagaagttgatcctggtgttgcatggtacttgtatccaaggcttgggtacctcccttatgttagcacaactgaggaaacagctatttcttcattgaagaggtcgcttggtgctctgaacacacaccttgcttcaaacacataccttgttgggcatgctgttactctagctgacattgtaatgacatgcaacctctaccatggaattgcacggatcttgaccaagaccttcacgtctgatttccctcatgtcgagaggtatttctggaccatggttaaccagcctaacttcaagaaggtcattggtgaggtcaagcaggcagagtctgcacctcctattccgaaaaaggctgctccttctaaggagccaaaggcaaaggatgtcaagaaggaggctccaaaggaggcccccaagccaaaggtggttgaggcaccagcagaagaggaagcaccaaagccaaagccaaagaatcctcttgacttgctgccaccaagcaagatggtccttgatgactggaagaggctatactcaaacacaaagactaacttccgggaggttgccatcaaaggtttctgggacatgtacgacccagagggctactctttgtggttctgtgactacaagtacaatgatgagaacaccgtctcctttgtgaccctgaacaaggttggtggattcctgcagcggatggacctgtgccgcaagtacgcctttgggaagatgctcgtgataggctctgagccacccttcaagctgaagggcctttggctcttccgtggccaggatgttcccaagtttgtaatggacgaggtctatgacatggagctctacgagtggaccaaggtggacatctctgatgaggcccagaaggagcgtgtcaatgcgatgattgaggaccaggagccctttgagggcgaggccttgcttgacgcgaaatgcttcaagtgagtgtgcttgcctggagacagaactgtttagcccttgaatttgcctatggaagagtttgcccttttactagtgtcgatgttgatctggtataccttgctatgaactggttaaagtttgtgctggtttgggattttttgtgcatcttgtgatacctcaagtcttcatcatttaaatgtttagccgt

SEQ ID NO: 1484 - DNA, 621 bp, Zea mays
  Clone ID: 700154983_FLI
aagcggctcagcaggaccgacctggtcgctctctcaggcgcgcacacgatcgggctggcacagtgcaagaacttccgggcgcacatatacaacgacaccaacgtgaacgcggcgttcgcgacgctgcgcagggccaactgccccgcggcggccggcaacggcgacggcaacctggcgccgctggacaccgccacgcccaccgcgttcgacaacgcctactacaccaacctgctggcgcagagagggctgctacactccgaccagcagctcttcaacggcggcgccacggacggcctggtccgcacgtacgcgtccacgccgaggaggttcagcggggacttcgcggcggccatgatcaggatgggcaacatcagcccgctcaccgggacgcagggccagatcaggcgcgcctgttccagggtcaactagctagctacgtactcgcggctatagctacctgtgcgtacgtcccaagtgatccgacgatccaacggttcccatcagtgattatcactgtaataaggccggttgtgccattgtcagttgcgcctctgttttgcttgtactggttcaagaactcctctttctcgagtcagcaaaggtgggtgtgatatgactcgg

SEQ ID NO: 1485 - DNA, 1429 bp, Zea mays
  Clone ID: 700155024_FLI
catccagcaaatccagcgggtccgtactcatctgcttcacctccgggctccggctacggcggcactcttctctggcaaccggtcggaagatgttggatcttccgcttcaaatcgacgcataaaggatgcagattagttttgttcgcgtcaaatttattttgctcggtgtagttctgtccattaattaattatttgtactggatttaaggtgctgctattttgaaggttttttctcccggaaattttcacatcccgaaacgactggaaattgaagtagccatttgatgctgttacctgggttcataagttgttagacttgttgttatttgtttgttaatcctatagctattgcatattgtgtgcctgatcaggaccacagaaacctctaggcgacgaatcgagcaggtagaggagtaatcaggcatccatggctgagcatcttgcgtccatctttggcacggagaaggaccgcgtgaactgccccttctacttcaagatcggcgcatgccgccacggcgaccggtgctcccgcctgcacaacaagccttccatctccccgacgctgctgctctgcaacatgtaccagcggccggacatgatcaccccgggcgtggacgcgcagggcaaccccatcgacccggagcggatccaggaggacttcgaggacttctacgaggacatcttcgtggagctgagcaagcacggcgagatcgagagcctccacgtctgcgacaacctcgcggaccacatgatcgggaacgtgtacgtggagttccgcgaggaggagcaggcggcccgcgccctgcaggcgctgcagggccgctactactcgggccgacccatcatcgccgagttctcgccggtgacggacttccgggaggccacctgccgccagttcgaggagcacagctgcaaccgcggcggatactgcaactttatgcacgtcaagcaggtcggccgggacctgcggcggaagctgtttggccacctgcatcgctccctccggagccacagccgaggcagccgcagcccgagcccataccgccgccgcggtagctcgtccaggtccagggaccgcgacgattaccacgactactactaccactactaccgtagtggcagtggcagccgcaggagcagcgagagacaccgcagccacgacagcgacgggagccgccgtcgacgcgggcggtcgaggagccggagccggagcccggtgagggaaggcagcgaggagcggagggcaaagattgagcagtggaaccgcgagcgggaggcagctcaggtgtaagcaagttccccttccctagttgccatgttggttgctgcagtgttattggccttgctagttgccatgttgctgttgctgaagcctgttatcatgtattgtggtgtggttcaggcagggtaaggccataaattgagcctg

SEQ ID NO: 1486 - DNA, 1391 bp, Zea mays
  Clone ID: 700155029_FLI
cccaacaccacctcgcctgcgatcttcgtagcctccgtcgcgtcgagcatcgatcatgtcggcctactgcggaaagtacaaggatgagctcatcaagaatgctgcctacattggcacccccggcaagggtatccttgctgctgatgagtccactggcaccattggcaagcgcctttccagcatcaatgtcgagaacgttgaggagaaccgccgtgccctccgtgagctcctattctgctgccctggtgctctccagtacatcagcggtgtgatcctcttcgaggagaccctgtaccagaagaccaaggatggcaagccttttgttgatgtcctcaaggagggaggcgtcctccctggcatcaaggttgacaagggcaccattgaggttgttggcactgataaggagaccaccacccaaggccatgacgaccttggcaagcgttgcgccaagtactacgaggcaggtgcccgctttgccaagtggcgcgctgttctcaagattggccctaatgagccatcacagcttgccatcgacctgaacgctcagggtctggctcgctatgccatcatctgccaggagaatggtctggtgccaattgttgagcctgagatccttgttgatggccctcatgacattgatcgctgcgcttacgtcactgagaccgtccttgctgcctgctacaaggcgctcaacgagcaccatgtcctcctggagggtaccctcctgaagcccaacatggtgactccaggctccgactccaagaaggtgacccctgaggtgattgctgagtacaccgtccgtaccctccagaggaccgtccctgctgctgtgcctgctgttgtcttcctctctggtggacagagcgaggaggaggccacccgcaacctcaatgccatgaacaagctcagcaccaagaagccgtggtccctgtctttctccttcggccgtgccctccaggcgagcaccctcaaggcctgggctggcaaggtggagaacctggagaaggctagagctgccttcctcgccaggtgcaaggccaactctgaggctaccctcggcacctacaagggtgatgctgccgccgacaccgagagcctccacgtcaaggactacaagtactgagttgcttctctttgcgtgcccgttttggaactcctgcctacgagctaggttgcggagtgtggtttgctcgttagagcttattttcggacatccaaaaaacatgcttcctatgtgggatgatggttatctttatatttgtatgttaattagtctctttgctgttaaatttcgtgtaagttggtcctgccgatggagaatcgagcagctccctttttttgttctatcaactatgctgtaattctggctatgtatcggcaaaaacaattct

SEQ ID NO: 1487 - DNA, 1056 bp, Zea mays
  Clone ID: 700155036_FLI
gagaggggaattcagacttcgcatctttgctctgagtagtgaatactgccatactgcttaggcgtttactaccttgcattgttaatggcgttgggaagaccacaggtatggagtacccagagcgccctggacagccactctgtgagtactatgcaaagaatggcacatgcaaatttggttccaattgcaagtttgatcatcccagggaaagtggttttgtacctgtcgctttaaacaacagtggattccctctacgtctgggtgaaaaggaatgttcctattacatgaaaactggacattgcaaatttggaggtacatgtaaattccatcacccagaacttggttttcttacagagacgcctggcatgtacccaccagttcaaccatcacctatttcctccccacatccatatccacatcattccaactggcaaatggggaggcctgctgttgtgccagggtcatttttaccaggcccgtatccaccaatgatgcttccacctacagttatgccaatgcagggatggaacccttatgtttcacctatgaaccaaactacaccagctgggggccagcaagctgttccagcagggccatcttatggcttgtcgcaccaggagccaacctctgcagtgacttatggcagtcattatgcgcaattgtattcttctgggacttcaagcagcaacatacaagaatatgtgtttccagagcggcctgggcagcctgaatgtgaacattacatgaagacaggaacctgtaaatatggagcagcctgcaaatatcatcatcctcaatacttcagtggaccaaagtctaactgtatactgagccctctgggtcttcccctgcgtcctggttctcagcgatgtgcttactacgcacaccatggcttttgcaagtttgggccgacatgcaagtttgatcacccgatgggtactccaaactacagtcttccagcaccatcacttactgatttgccagtcgctccatatcctcacactttctctgttactcctattgctccatatctgctgccccctgatccgcggccgc

SEQ ID NO: 1488 - DNA, 1614 bp, Zea mays
  Clone ID: 700155052_FLI
acgcaattcaccagtagtagtagttgtagcggcataactagctatggctaccaccatggcggctaacgacccgacgagcatccgcgtggttagccgccggctggtgaaggcctccgacgcttccatccagcctcatgtcatgtccctctccaacctcgacctctacgtctgcgactcacagctcggcacgctgtgcgtctaccccaacgccggcggcggcttcagcgcgcgcatccccagcctgttcgagtccctcttgccgtccttgctcaactacctctacccattcgccggccgcctcgtcaccaacccaagctccggcctccccgaactccactgccacaaccaaggcgcagagctcgtggtcggcgaggtcggcgtcgccctggggagcctcaactacggcgcgaccaaggattccttcaagaagatggtgctcccgttccccagggacgtccttctgtcggtgcagctgctctccttcgcgtgcgggggcttctccgtcatgtggtggatcaaccacctcgtcggcgacggccacgtgggcgccacgatcgtcaggacgtggtcccagctcgcgcggaccggggacatcggcggtgcgcccccgctcaactacgaccgctccgtgttccgcccgcgcagcccgccgtcgtacagcgactccgtcgcggccaccttcacaacgttcgacgagaagcgcctgcccaacgccctcacggcggaggccagcttcgtggaccgcgtctactacgtggaggcgagcgacatcgccgcgctgcgcgacacggcggcggcggccaccacggcccagcgcccgacccgcgtcgaggcgctgtccgcctacctgtggaaggcgctcgccgacgtcgtggccgcgtgcccccggagcaacaaggagcgctgccgcatgggttggtgggtcagcgcgcggcgccgtgtcacggcgcctaagctcgtcgctttgatgcccggctacctggggaacgtgacgacctacgccctgggcgacgcgccggcggaggagatcgtgcggaagcctctggcggaggtggcggccatggtgcgggacgccatcacgtcggtggactacgacgagtacctccaggagatggtggactgggtggaggtgcacaagacggaaggcctgatggaggcggccgtcatcggagtcggcgcgcccacgctgaaccagtcggtgatgaccacgttcccgctcgacaccgacttcggcttcggccaggctactctggcaaccacggtctctgactatggcaggctttgctcggctttcctttcggtcggagcgcggccgggaggcgacggctcctggctcgtcaccgcctacatatggccgcagctggcggcggcgctggagtccgacggcatcttcaagcttctcacggcggagtacctcggtctagctatgtgagcaactgaacggaacacagttagctcgacggatcgatcatatatgtgttttctttcttttgattcgaatcgatgcatgatgtgcttcctttgtttttctgtcagcttttgtacctgtacgccagcagatgagactctggtctttgggatattatatatctgctaaataaagatgagctcgac

SEQ ID NO: 1489 - DNA, 639 bp, Zea mays; identical to SEQ ID NO: 1451
  Clone ID: 700155066_FLI

SEQ ID NO: 1490 - DNA, 1030 bp, Zea mays
  Clone ID: 700155144_FLI
actggcccttctggtaattcgttcgcgaacatatcaaacagcacacaactggttacgacaaacaacttgccattacagtctcttgagccaagcaaccaacaacaccttggtcggctgcattcctctgcagaccctttcaactcatttgttggtgagcccccccagtttgcagatcttggaaggtgcaacaccacctggccaaccgcggtctcatcatccaatgttcaggagattggccagaaggacaggatcgtgaataggcccaagcttgagcctctctcaagctttacagaagcatccagtcagatccctttgctgggaagtgaaatgcagagccaccaagtagcatcactagccagcaacggtcttccgatgccgttcactcaggaagcggtgcccttcgcttatggaagcagcacgaactcgagagagatgctgaataacaaccttgcgcttagtaattcaggcgtcaactctacattgccgaaccttcgcatagacggttctgttgttccagggcagacactgggtggtagcaattcaggtggttgtgttgtcccccctctgcaagatggcaggattgatcaccaagctgtcagcagtcatctaaactacaacaacgaactcatggggacaggtaggctgcaaaggggacttagtggtggtctggatgacattgtcgtggacatgtttaggccggaccgcgcagacgatggcgtctccttcattgatggggactgggaactggtctagcaagtttcagttctctacatcaagtctgccttcgtgtgagattttccgcatttgtggttgtggaggggttcggcgcttgattggtccaaagttgtttatagtagcaagattgcatcacaaatgccctttgcatttggtttttcagtttagcgaccaggttccagtgtcacgtccgaatatcaactatgtggtatttgctaccttaactcgtatggctatgttttcaagtcaggtgttaactgtggctatcgtgatatatacagcatggttatgagcc

SEQ ID NO: 1491 - DNA, 236 bp, Zea mays
  Clone ID: 700155165_FLI
cgttcacatttattctcagcatagacaagcagcaaagatggtctgcgaccaaaggccatcggggacgaccctcgatagggaggcagaaatatgaacggtgcccctggacgctggatccatgctggttttggacacggttgtctttttgtgtttaacttatctgctgccgtcctgtaacgaattcgctaagttttagttcttttgtgctttgttaagaatataaacaatgaggtttc

SEQ ID NO: 1492 - DNA, 656 bp, Zea mays
  Clone ID: 700155173_FLI
gccaaggtccgcctcgtcatgcgtcaggcgaagacgcttaagatctgtgctaaccatcttgtggtggcgacgactaagatgcaggagcacgcagggagcgacaagtcgtgcgtgtggcacgcgctggacttcgccgacggtgagctcaaggaggagatgtttgctatccgttttggatctgtcgagaattgcaagaagttcaaggacactgttgaagagatagctgaagagcaaggaaagaccgaggtgaaagaaaacgaggaagtctccattgccgccgcagatttggtacagaagttaacagtgacagaggctagcaaggagggagatgcagaggaagaggaggctcctgcatctgaccataagaaggatgctaaagggtaaagattgaaggcaaacaaggccaaatgattatgattccattcatttcgttgtcaaggttcatcttccccacaaattttcattacaaagtttcattgcattttctcctgagatgatttgtgtgtgtgtgtgtgtgtgtgtgtgtgtgtgttgggtgaaatctgagttgtcagtcatctacatgtctttcttggttgttagacttattctcagtcgcctgtttatctgggatggctaggtacatcatgtttgtacaattatttggggttgatttt

SEQ ID NO: 1493 - DNA, 666 bp, Zea mays
  Clone ID: 700155190_FLI
aggagattgcttggtgggaggagttggtgaggagaggtcgcgaccatggagaaccttgctctgctttggggcatcatcggcccgggcgtgtccggcgccatcttcggggccggatggtggttctgggtggacgcggtcgtttgcagcgcggtccaggtctccttcctccactaccttccagggatcttcgcttcgctggcggcgctcatgttcaattgcgtgaacaaggatgagatcggatacgactattactcaccctacggggacgattcagagtggagagtgaagctctggctttttgtggcatatgtcgtttcttttgtctgtttagctggatccgtgggtttattggtgcaagatgcactgacgaacaagggcccttctgtctggactggtgttgctggcgttctgcaatgtgttcttgtgttgataagcggcctggtgtattggacatgccactcagaagattaagggcgtaatgtcatgagcagacttgcaaggttggtcacagttgtgtgaaggaaattatttctggcaacatatgattttgtgtgatggaaatgacggacactgttcactgctgaatgggatgactagatgtttcatctgtgcatatctgacttttggaaaatgatgtttcttaacaccggtgcatgtgttagcccc

SEQ ID NO: 1494 - DNA, 581 bp, Zea mays
  Clone ID: 700155282_FLI
cgtctacctccagcttcagttaccatgaatgcaccagcgagttcaagtcaagcaattagctttccaagtggcccaaccaggggtttgaactattaccagaacctgatccatcagcatggaggggagaggcaggagccacttcagcagcatggaatgcagtttgcaatgcatcaccagcctcttgcctcgcaggccagtgccgctgatgttgtcagcagtggtgctatgccagctagggataccaagcaaaggcctacgaagccttgtgcttacttcaacagcgcgagaggatgccggaacggtgcgaactgcacgtttctgcacgatgtgtctgccgcgaggaaagaacagtcaaagggttccaaaaggattaagcttgacagcagaatagccgggcggtattgaggggctgctgccgccggttgatttttgactgttcatttcgccttttttccccttcaaaaacgtttcagtaaatattgcgccccagctccttgtttctttcacttagccaatttctctttgttgactaaatgaggtgttttagaagaaagaaaaatatcccacgatttattggagct

SEQ ID NO: 1495 - DNA, 1146 bp, Zea mays
  Clone ID: 700155317_FLI
caccgcgcagcaacgagaggggcaaacaagcttgctactgtgatttctcgtccgagcagcggcggaggagagagagagagcatggccgaccacaaggaggagcctgtgccggagtctgtgatggacaagatcaccgagaagttccacggcggggactcgtcgtcgtcgtcgtctgactcggacgacgagaagaaggggtcctcgttggcgtcggcggcggaagccatgaaggccaagatctaccgccttttcggccgggagaggcccgtccactccgtcctcggcggcggcaagcctgccgatcttatcctatggaggaacaggaagatctctggcggggtacttgctggtgccacggccatctggctcctattcgaggtcatggagtaccatctcctcaccttggtgtgccactgtctcatcctctcgctggccatcctcttcctgtggtccaatgcctccactttcatcaacaagtccccaccgaacattcctgaggtcaaaatccctgaggatgtggctgttaatgttgccctgtcactgagatatgagatcaacaggggctttgctaccttaagggagattgggcatggccgtgatctgaagaaattcctaattgttattgcaggtctctggcttctttcagttctcgggagctgctgcaacttcctgacactgttctatattgtctttgtggcactgtacactgtaccagttctgtatgagaaatatgaggacaaggttgatgcttttggtgagaaggctatgactgaactgaagaagtattatgccattttcgatgagaagtgcctatcgaagattccaaagggcccccttaaggataagaagcactagattggtagtaaggtatttgctatgaatcaacatctacattatgtcactagctgtcacctctttctctgaaggatggtgcttggtcctggtctctagttgatagtatataatctgtatgggcaactttggtgtgactgacagtctgctgaaaactgttgatcttgtttttggtttcagctttcaccatagttgcctggaagcttgaaatatattatgcgctctatcaatgtcatgtgaactttgtcatgtacctttaatattgatttggcgcctttcgcaagtgctaggttc

SEQ ID NO: 1496 - DNA, 639 bp, Zea mays
  Clone ID: 700155338_FLI
gggtcccggcccactcacaccgaactcgtgaagcacagtttccatcgtatgatgtcgaggaagaggaaaaagaggggcaaagaagaagaaggtgctgtgagcgaagcactggtcgtcgcaccgccatcatcggcggtgtgagtgcatgcagcgaggaagcatgcttgccatgccgtccgcccggagcttcggcgccgcgggctggtggcgtgtgagcagggatgcttcggcggtgcacaagaaagaaggcaagtcttatcggcaagggaaggctaagcctttcttccaggtctccctctctccatctaaatcattctatgtgtttggaggagggggcaatcgatcgttacttactggtctcctgatccttagcggtcatgtctctgtgtgtgtgtgtgactgtgtgctccatctccgtgttgatttacagctagaataatgaccagttcagagtgaatgtgtgagcgtgtgtgttcaagtgtcagtgagtgaacctggcgttgtattttgaccgtgtgagtccgtgtcgtattttcagttgtctggtgtgttgtgtgtgtgagtatctctgaataagaatgtaatgctatatgtgtgccgtgttaattaacttgatcgagctgatctttaatttgttct

SEQ ID NO: 1497 - DNA, 1591 bp, Zea mays
  Clone ID: 700155449_FLI
ggagagcagcagcttagcctagcactgctgcagcttgcttgctttgctttgcttcttcttggccaggcctcagagcagagctttggcttggctagtcgtcgtccgcggatagtctccgctgcaccgtgtgcgtgcaagcaaggcaaggcaaccagccagccgcggcgacgaccgatcgtcaacaagctcgatcgccttggccggcggccgggcgggccaccgcaagccgcgagcgatggaggagcagctgggcccggtggcggtgacgcacctgctgcagcacacgctgcggagcctctgcaccggcgacgccccgcagtgggtctacgccgtcttctggcgcatcctgccccggaactacccgccccccaaatgggatctccctggcgccgcgtacgacaggacccgagggaacaggaggaactggatcctggcatgggaggacgggttctgcaacttcgcggcggccagcagctctgccgccgcgtccgcgtgcggccaagagggggcagcggcagctgcggcggttgcatatgccggggactgtgaggcagctgtgcaggatgcggtgaagcaccagcaccagcaggcgcagggcctgcagcctgagctgttcttcaagatgtcccatgacatctacaactacggcgaaggtctgatagggaaagtggcggcagaccacagccacaagtgggtgttcaaggagccccaggagcacgagacgagcagcctcatctcctcctggagcaaccctgcagactctcatccgaggacgtgggaggcgcagttccagtgcggcatccagaccatcgccctgatcgctgtcagggagggcgtcgtgcagctcggctccatgaaaaaggtaacggaggacctgagctacgtggtgatgctccgccgcaagttcgggtacctcgagagcatcccgggggtgctgctcccgcacccgtcgtcggcgggcgtgttcgcggccggtgggtgcgtggggcccccgccggacatcgccgcggcgtggtcgtcgggcctgatgccaccgccggccgccggcgccgggccgccgctggagctctacgacccctacggcgccggcgcgatggccgccgggccaggcgccgccgccgccgctgcgtccatgcacatcatgccgtcgatgagcagcctggaggcgctgctctccaagctgccgtcggtcgtgccgccggccccgcagccagccgggtccgtgcccggagcagcgccgccgtccaaggacgacgattacgacgacgtgcagcagtgccatggcatggacgacgtggcggcgagcaacggcgcagcagggttcgtcgagagcgcgagcccgagcccgagcccgagcccgagcggcgctgcctccgcgcccatgtcgtcgtcgtcctactttgtcaacgtgggcagtagtattaatcccggcgatcatgggttttagctcgtcgtggcagcccggccggctgctcgtctcgtctcgtctgatggcatggccatggcgtgcttgttgattaattgtgctggtcttcgctagggcgaaacctatcgatcatatattaccagttgccgtcgctatatgctaatt

SEQ ID NO: 1498 - DNA, 1994 bp, Zea mays
  Clone ID: 700155450_FLI
acgtgcaaggctgccctcaggttttgggccgcgcttgacgcggggatcgcgaggaaagtgacctgttgcctcttcggctcccaatctctctgctccagtacttggacatcacgtccggccgcaccgcacggcgttgctctcgcgagagcaagaagcatcgtcctccggagttgaggacatgggcgacgcgcggtcggaggtgccgctggccgtgctccaggaccgccaggactcgacagcgacgccatggctgcccgccgacgctggctccggcaccggacaacaagagggctcaactaataaaaaacagctccaacagaccatgaagtcatccaagtatactacacttcgaatagaagcacgccgcaccggcagacgttacccctccaatgggcgaatgcagcacggagtacaggggcctgcccgacgccaatggcgaggacgcggggacggtgccggccgcgctccgcaaggtgtccatagtcccgctcgttttcctcatcttctacgaggtctccggcgggccgttcggcatcgaggacagcgtgggcgcagcggggccgctcctcgccatcgtcggcttccttgtcctccccgtcatctggagcatcccggaggcgctgattaccgcggagctgggcaccatgttcccggagaacggcgggtacgtcatgtgggtcgcctcggcgctcggcccctactggggattccagcaagggtgggtgaagtggctcagtggcgtcatcgacaatgccctgtaccccgtcctcttcctggactacctcaagtccgccgtgcctgccctgggcggcggcccgccgagggcgttcgcggtgctcggactcacggcggtcctgacgctgctcaactacagggggctcaccgtcgtcggctgggtcgccatatgcctcggggtgttctccatccttcctttcttcgtcatggggctcatctcgctgcccaggctgcggccggccaggtggctggtggtcgacctccacaacgtcgactggaacctgtacctcaacacgctgttctggaacctcaactactgggactccatcagcacgctgtccggcgaggtggacaaccccggcaagacgctgcccaaggcgctcttctacgcggtcatcttcgtggtggtggggtacctgtaccctctcctggccgggaccggcgcggtgccgctggacaggggccagtggagcgacggctacttctcggacctcgcgaagctcctcggcggggcctggctcatgtggtgggtgcaggcggcggcggcgctgtcaaacatgggcatgttcgtggcggagatgagcagcgactcgtaccagctgctgggcatggcggagcggggcatgctgccggccttcttcgcgcggcggtcgcggcacgggacgccgctggtgggcatcctcttctcggcgtcgggcgtccttctgctctcctcgctgagcttcgaggagatcgtggccgccgagaacttcctctactgcttcggcatgctgctcgagttcattgccttcgtgctgctgcgcgtgcgccggcccgacgcgccgcggccgtaccgtgtcccgctcgggaccgccgggtgcgtggcgatgctggtgccgcccacggcgctgatcgtcgtggtactggcgctgtcgacgctcaaggtggcgctggtgagcctcggcgcagtggccatcgggctcgtgctgcagccggccctgaggtttgttgagacgaaggggttgctccggttcgccgtcaatacggacctgccggacatcggcgtgggccagtcatccgcctcggcggaggagccagtgacaccgtagaagccgacacagatttggcattcgcgacgcaaactggaaaaaaggaaaaaggttaggatggtgttcaggtgactgtctccggatgactgcgaccttgagttgtactgcaacaaggcaggacggatacctgctgtgttatgtgttcagcttgattaacagggatttaaaaac

SEQ ID NO: 1499 - DNA, 901 bp, Zea mays
  Clone ID: 700155468_FLI
gcatagattcatcccttgctaaagctctgatggagtccattaagaatattacaaaacttgaggtgcccaatctacaaaaaaatattcccaacaatgagatgcaatgtagactaactctcttgccaagtagtcttctgccaggattgaacttggtcatttggaatggtggtcactattttgttaaagtcgcaaatctgtgggcaaatcggatatctcctgatcctcctcttctgccaagcaaccccacctcttcaatgaacaatgcagcaacacacagccagtcatgctgaataacatgtcaaacatctgaggctgtgacctacactctgatggaagcatcaaatgcatgttgtgtaaaacatattcgtcaagttatcttttttatatacgtaaactgagcaagcaccgtgctgattgagggctgttcttggaagatagagatccaaggtgactgttcctttgcaggtcattcttttgtacaagttgtaatttacaacattctttccatagtgccggatgatgtcactaagtatagcaagtcgaaagggaatgacaagtttggaagtggacgtctggtataatgttgtactaaaacccatccgaaatggtgccaatgtgtagattatcaaagctgagaattggaatacggatcgtggaaactgtcactcttttgctaggttaatattatgggctttgctgtgttttgctagatcagttggtattcctcagctacgcattgtgatttgggactgtgtctcgataagttgctcagcccagcgttgactatttattgacttgaaacgaagatagatcttactccgttctttccacgctgatggacaatggcactagtatagcaagtcaaaaaagaatgttcagtttggaactgaacgtattgcat

SEQ ID NO: 1500 - DNA, 1166 bp, Zea mays
  Clone ID: 700155517_FLI
ccagacatttacttccttttcctacggaactggggtctttgccccaggtcggtgctcacctggactagactgtgcctacccaactgggaattcactcgtcgagccttacactgctggccataacattctcctagcccacgctgaggctgttgatctttacaacaagcattacaagcgcgacgacacccgcatagggcttgcgtttgacgtaatgggtcgtgtgccatacggaacatcgtttctggataaacaggccgaagaaaggtcctgggacatcaacctaggatggttcttagagccagtggttcgtggtgactaccccttctccatgagatcattggctagggaacgactacccttcttcaaggacgagcagaaggagaagctcgccggttcctataacatgttggggttaaactactacacctcacggttctccaaaaacatcgatatctcaccaaactactcacctgtgctcaacactgacgacgcctacgccagtcaagaagttaacgggcctgacgggaagcccattggtcctcctatgggaaatccatggatctacatgtaccctgagggcttgaaggatctccttatgatcatgaagaacaaatacggaaacccacctatctacatcacggagaacggaatcggggatgttgataccaaggagacacctctacccatggaggatgccttaaatgactacaaaaggctagattacatccagcgccacatcgctactcttaaggaatcaatagacttgggatcaaatgtgcaaggctacttcgcttggtctctgctggacaactttgaatggttcgccggcttcaccgaacgttatggcattgtctacgtcgaccgcaacaataactgcacgcgctacatgaaggagtctgccaagtggttgaaacagttcaacgccgcgaagaagcccagcaagaagattcttacgccagcttagaaatcgggggcctcatgatgtgggtgcagcccataaaaaactggtgtgtggtttcgaaccgaaaattttctgtttttttccgccacgagaggttctggaggcatactctccagcaccgtggctaataacgcattgttccaattcagtctggccttgtcatgcatgcaataaataaagtgatgggtttccctgtttcaatatc

SEQ ID NO: 1501 - DNA, 1133 bp, Zea mays
  Clone ID: 700155571_FLI
ctcgcttgaggcggcccgcggccttctcgaagccctccgctcgctccgtgctcgtggctcccgcacgatccccacattccttggccggctccgcgctcgtgctctcgttgggatcgttgtcagttcaggtacggtggcgatgaggtcgtccgtggcccgcctgattcgctcctcctctgcctcgccctcccgtctcagtggaaatgcattcttcggcaatgccacacccagtgatcagaggcacattgagaagccttttaaagtgaaggaggcagaacctgtgaatgtgacaaaaccttcaccacacaagctgctggttctaggaggaagtggtttcgttggatcacacgtttgcaaagaggctttggacaaaggtttagttgtctctagtcttaatagatcgggaaagccatccttaaatgaaccttgggctgacaaagttatatggaaccaaggcaacctccttgaaccagcttcattgaaggatgctatggataatgtttctgcagtggtatcttgtgtcggaggttttggatcaaattcattcatgtataagattaatgggactgcaaacatcaatgccatcagggctgcagctgagaaaggtgtaaagagatttgtatatgtgtcagctgcagactttggattagtgaattatttattgcaaggctattacgagggcaagagggcttctgaagctgaattgttgtcaaagtttacatatggaggagtgatactgaggcctggttttattcatggaactcgtcgagtgggcagtgtaaagatacctcttggtcttgtcggttctcctatgcagatggtgctccaaaatataaaacctttgactaggttaccacttatcgggccgctattgactcctcccgtcagtgctgcctccgtggggaaggtcgctgtgagagcagcgacggatccggtgtttcctcctggcatcgttgatgtctacgggatcatgcgttacagcgagcaaaactaagctgcctcattcaccgggcagtatatacatgccgctgtacttttgttacagctgtttctttgtttgttttacatgtactggtatccttctttaactcacttgtttacgagacgataaacattcaataaatatgtatttt

SEQ ID NO: 1502 - DNA, 636 bp, Zea mays
  Clone ID: 700155593_FLI
ggacaaggatgatgagaaaatagtactgtgcgatggctgcgacgaggcttatcacatctactgcatggacccgccgtgcgagtctgtcccgagaggtaaatggttctgcacgcggtgtagcgcgcggaggtcagtgcaagggatgcagaggttatgagaagtcgatcctggagaaagtcaagcgtgctcctggtgccaatgggccgaaggtgcaggcatctgctggtccagaaaaataggcagcagtgtggatgatgtttcacaggccatactagggtagaagaaagggaaggatacttttgttcctctgagggagggggtatacattgctctggtagctttgaagaatcgatggatgggttgtgtatacgtggggggaaggaagatgccccgttggctgctgatgttgattcactgtgctgccatttcgtttttggaattcttgagtgtcgctcggcttgttgttgtgctgttatgttgtgtctgatggtaagtggcatcgcttatcgatgatatgtacatgcctgtaactcgttttcttttatttgttggacattgtgtgtgtgtgtgtgtgtgtttgaattgtgatgacctagagaacgctggtgtcaatcaatgcagcgtaccttgtttgca

SEQ ID NO: 1503 - DNA, 729 bp, Zea mays
  Clone ID: 700155612_FLI
cgtccgtccaatccatccattcatctacacacgcagttgcagcacatacagctagctagctcgttactgtttttgcagctgatctgatcgaccgacgcgacccaccgatcacgatcatgagctaccaagcgggctacccaccgccgggccaacaggcctacggcgcgcctccgccggcgtacgtcgcgccaccgccggcgtacccgccaacggcccaggacggcggcgcggcgtactacggccagcagcagacaaccaccaccagcagcagccgcggcggcgacggtttctggaaaggatggtgagggcttatataacttattaattgactccaaccacagaagctagatagatagagatgatgcgttctgatcacctgctgcatgcttggctttgctcatgcagctgcgccgccatctgctgctgctgcgtcctcgacatgtgcttctgaggacatatcgtcgatcgatcgacgacggccagggcatgctagctagctgatgaccggccggtacgtgcgtggttgatgatcaccatcatgtgctgctctagtagctgctgtgtcattatatattacacatcgtgtatacatatatacgtatacgtacgtactcgtacgtcttcgaattcattcctgtggttattgtattatacatatgcagcacactttgtactcgtacccgtgtctgtgtcgtgtattcaattgtcgagacattcttttacgattct

SEQ ID NO: 1504 - DNA, 1333 bp, Zea mays
  Clone ID: 700155615_FLI
caagcatgggttgtctggagcatgtgcaatttggagaacaagattatatcagtagagagaatcctgcaatacataagcattcctgcagagccccctctttccattccagaagataggctggctctggctcagaactggccatccgaaggagagattcagctccttgacctccatgtaaaatatgccccgcagctgccatttgttctgaagggacttacagtcaccttcccgggaggcctcaagaccggtattgtcggaagaacaggaagcggcaaatcaaccctcatacaggccctcttccgtatcgtggacccgagtattggccagatactaatagacggcgtcgacatctgcaccatcggtctgcacgatctgagatctaggctgagcatcattccacaagagccaaccatgttcgagggcaccgtgaggagcaacctcgaccctcttggggagtacactgacagtcaaatctgggaggccttggattgctgtcagttgggtgaggaggtgaggaggaaggagcacaagcttgactcaccagtgatagagaacggcgagaactggagcgtgggtcagcgacagctcgtatgcctcggcagggtgatcctgaagcggagcaagatcctcgtcctggacgaggccaccgcttcggtggacacggcgacggataacctgatccagaagacgcttcggcagcagttcgcggaggcgacggtcatcaccatcgcgcacaggatcacgtccgtcctcgacagcgacatggtcctgctcctcgacaacggtgtggccgtggagcgcgacgcgccggccaggctgctggaggacaagtcgtcgctgttctccaagctcgtcgcggaatacacgatgaggtcgacgcacacgtagccacactactaggcagcccgcaactgagaaaggttgctttgctccacgccgtttgggggccgcggcaggctgactcgtcgaccacgccggcagatttttacgggtcgccggtgaggcaggcagcaggcttacttgtcgatgatgccgaaaagtgaaatattagaaagctagcgctattcttaacgtttgaggagttgagggggtacagggaatgagtcaagggcttgaggtcattaagaagttggtggaagtggttttgtgttagcatactatactagtgtagttctctgagcatgcatagcatgcatcaagaatatcttgagcttttagccacgtaccaggaatgtctcaaagttttttttttgggtaataatacctgtattcgatgggtggtaacactcctatactacgcttgaagaaatagtgaagtgtttgcacgttagct

SEQ ID NO: 1505 - DNA, 1436 bp, Zea mays
  Clone ID: 700155657_FLI
atcatcaccagtaccttccaagagatcgccggaaacaaggacaccgtcggccagtacgagtcacacatggcgttcacaatgcctggcctgtaccgcgttgtccacggcattgatgtgttcgaccccaagttcaacatcgtgtctcctggcgcggacctgtccatctacttcccgtacaccgagtcgcacaagaggctgacctcccttcacccggagattgaggagctcctgtacagccaaaccgagaacacggagcacaagttcgttctgaacgacaggaacaagccaatcatcttctccatggctcgtctcgaccgtgtgaagaacttgactgggctggtggagctgtacggccggaacaagcggctgcaggagctggtgaacctcgtggtcgtctgcggcgaccatggcaacccttccaaggacaaggaggagcaggccgagttcaagaagatgtttgacctcatcgagcagtacaacctgaacgggcacatccgctggatctccgcccagatgaaccgcgtccgcaacggcgagctgtaccgctacatctgcgacaccaagggcgccttcgtgcagcctgctttctacgaggctttcgggctgacggtggttgaggccatgacctgcggcctgcccacgtttgccacagcctacggcggtccggccgagatcatcgtgcacggcgtgtctggctaccacatcgacccttaccagggcgacaaggcgtcggccctgctcgtggacttcttcgacaagtgccaggcggacccgagccactggagcaagatctcccagggcgggctccagcgtatcgaggagaagtacacctggaagctctactcggagaggctgatgaccctcaccggcgtgtacgggttctggaagtacgtgtccaacctggagaggcgcgagacccggcggtacctggagatgctgtacgcgctcaagtaccgcaccatggcgagcaccgtgccgctggccgtggagggagagccctccagcaagtgatgcgcgacggcggccacagacctgatcgatcgatgagcgagagggagcactcggagtgtcgtgtcttttcccttgccatttctttctttttttcccttcccggaggcgaaaaaaagagtctgcttttgctaggcggcgggcgttcgttgctgctctttgcttcaagagttaaatttacctaccttgtcaaggtcttgttccatcattgatccgggtgtcgcttttttagtagtctgatggactgttagtagtttgcgttgcgtcggttgagagggaacgttggtggtggtggtgtgtgtgcagtcaggcgtggtgctccctttgtttcctggatgggatgttgctccttgaataataatcgtagtggccttggagcccttttcctgaaataagagcagcatcctagtgcttacctttgcagctgt

SEQ ID NO: 1506 - DNA, 1436 bp, Zea mays
  Clone ID: 700155715_FLI
aatcctcctcccgtttcaccatgccgccctgctgctcccccaccacctccgccgtcaccgctgcggcggcatctcccggcgcctcgcgcagcgggggcctcctgcgccgctcgcgcccagcccccgccgccgtgaattgtaaaaagattgattctctgaggtcaatcaatggagcaccaccttgcattccggtgtccaacaggtcgttattgactcctgtaaccttgccagttttccgggatccaaacatgaggaacgacacgaggctgcgcatcttctcaggcacagccaatccttccctttcccaggagatagcaagttacttggggctagaacttgggaagataaccataaagaggtttgctgatggtgaaatatatgttcagttgcaagaaagtgtacggggctgtgatgttttccttgtgcaaccgtcgtgtcctccagcaaatgaaaatcttatggagcttctgatcatgattgatgcctgtaggagagcatctgctaagaatatcactgcagttatcccttattttggttatgcaagggctgacaggaagtcccagggcagggaatctatagctgcaaaacttgtagctaatatgattaccgaagctggtgccaaccgtgtccttgtttgtgatcttcattctagtcaagcaatgggatactttgacatcccagtagatcacgtttatggccagcctgttattcttgattatctcgccagcaagacaatatgttcagatgacttggtagttgtatctcctgatgttggaggtgttgccagggcacgtgcctttgccaaaaagctgtcagatgcacctctagctattgtagataaaagaaggcaaggacataatgtcgctgaggtgatgaatcttattggagacgtgagaggaaaagtggctgttatgatggatgatatgatcgacacagcaggtaccatttccaaaggagctgagctactgcaccaggaaggcgcccgagaagtatatgcttgctgcacacatggtgtttttagcccacccgccatcgaaaggctatcaagtggattgttccaagaagtaatcatcacaaacaccatccctctgaaggaggagaagagttttccgcagctgactattctttcggttgctaacctcttgggggaaacaatctggcgcgttcacgatgattgctcggttggtcatgagccatactccagcttggatattgactgatgcttaaggaatagttgtggcagctcgcaaccttctctttcttttcttttggcctcggtttttgtctgtgcgtgtaataagcaatgtttttgtggaattctgttagcgcagaacctcagccttgtatttgagtgacagcacataagatgacattccagattgtagtgcagtgtttcagctatcctcaatcacagcacataatatgtgtttgcttgc

SEQ ID NO: 1507 - DNA, 486 bp, Zea mays
  Clone ID: 700155750_FLI
caccaaacacagttttagcaaagcaagttgcctccatcaatgcaacccaatgaagaacagcatatccaagcgccaggagaagactatcatgaaactggtagttgatgctgaaactgacaaagtacttggtgcatccatgtgtggaccagacgcacctgaaattatccagggcatcgctattgcggttaaatgtggagccaccaaagcagacttcgacagcactgtcggaatccacccttccgctgctgaagagttcgtgaccatgcgcaccgtgacgaggcgcttgagcccgacatccaagccaaagacgaacttgtaagcaagaaattggtattctggggaaatgttacaccggacaaatactctggtttcatcacgttggtaatttttacgtcattggaactggaaccatgtatattgaaggaataagttgtttttttcatggcaacacaccgaaaataatgagaccgtggactttcttgatac

SEQ ID NO: 1508 - DNA, 2184 bp, Zea mays
  Clone ID: 700155775_FLI
gcaaagcgaggccaagccactaacagccaaagccttgcagaaagactagggagaaagaagataagtgagaggatgaagcttcttcaagatcttgttcctgaatgcagtaagatcattggcaaggcaatcatgctcgatgagattatcaactatgtgcagtcattgcaacgacaagtcgagatcatatccaaacaagtaaagccacccactcgatcaccatatctccctctaggatcaagcggccttactggcccatttaaccaaggaatcatgcagccataattgatgtgcaccattgccaatcccgttgatgttttgcatggagctattcacgaggcgtcaacaatgaaccattattgatttgtccactgttatgttcgttgctggtgcaatcatgggatacattatgttcactgaatctacactcccagttcacactgaacttacccctaaatcttgtggcttccaagattgcagtctagactacggtaattgttcatttctggactctagatagaaaagaaaattatggcctctagctcaagtcacataatgcatataatgaaatataatcaagttcaatcacaatatgaatacttaaatgcttttatgtggcaagttatattcttctgatattgtgctttttcggtgcaggtgatgaatccaataaccaaatatccttggacttttattgtagctttttgtgtgcatttgttccgatacttaacaattaacattatatgacaccatagtttctctaatcacatgtaactccatctagccatctaggtttgtcctaagtcaaacatatcttttaattttgattagaaatatctataaaaaataattgtcttaaataagcagagttatttggttttagtaatgaatttagcaatgccaatgctatttttatcgttctatataaattttagatattcatggtcaaacttaaaaatgtttgacttggacaaatatagatagacctacacatgcattgtgattttaggaagtcctacaattctcctccccaaagtctgctatcaacttctaacagttagtccagttttcatgaacaaatttagttttaatcattctatgttgtgccaaccgccagcaactaataatcagagctgggtcatatcatcatatcatagtagattgtatagctttcttccctgtgcatgcttactggttactagatgaaaaaggtcgtgttacgttatggcgcactcctctcctttgaataggacatgctttcacactctcaattcggcatatccttctagagactagctgtgagttgggtcctaaatgtttcttccatgttcaattcgaatggcattgttgtgttaattagccgtcctgttttgtatttttttcctacaagttatagtggttacattaatgactaaatcaagatcttgacccactttattgatgacacccttttttcttcttattgcttctcctatcgtctctgagtttgtcattccattcaaacacgaaatttgtgtcagtatagatgccatggaaattttggtttagcttgagtattttgtagatacttcattcttgagtattcttgagtttgccttgttataaattgcagcacactccaatggtcttctaaatgaatagcacactatagtcaagagtatgacttaccaaattcattattggttccaagcatcttgaaagagaagtccatcgtctctcttactgtcatctcagcatggctaacagaagcacgcagcgacaagattaccccacatgttgtatcatggtttactagctagagaggctactcaagatgaggaatttgaagttatgtatggtgaggacgatgatgaagacaaagatgacgaggatgatgatgattatgatacaaagaccaagggggctactggagggggaagggcagcagcgaacgacctgttgagtgcaagcaggagtgagtgctgcacattgaatattggcatgcattggttgtggagcaattagtctggttctacttgatgcaaggtcattgagttattgaagtgatattttgtcgaatattttatatgccattgcaaagcacgggcatctaactagtctttcttatatatgtacactacaatacataatcatttatgccattgtttactacaaatatatatattaggcaactcttgaactggttgc

SEQ ID NO: 1509 - DNA, 2357 bp, Zea mays
  Clone ID: 700155786_FLI
tctctccatctccggctctccaccttccacaaatccccaaatcgccacatcaaatcgaatccacccaccacggaccacgcattcgccatggagtttcccaagcgagggcgagcttttctccaaggttccctgcgaaggagccccaaggcgacgatacctggagctgccacgggggccgacgagaacgcaagctctaagcatctcgtgccggtgggggccgcgtcgccgaagaggaagaaggtgctcggggagaggaacgacagcggcgtcgggggcatggagggcgccgcgtcggcaccagtgcagcagccaaagctcgcgttgagccccccgacacccgcgagccgcggcgcggggccgtacgacccgaagacgaactacaccacgccgcggccggcgttcctgcgctacgaccccgaacggcgtcgcgagatcctcctccgggtgtcgcgtgcggcagaggtgatggacgacgactgctctagcaccacatccggcactgcggcctcggaggaggacggtggctcgtccttggcctcggacgcggcggcaggctcccttatctcgtcgccgccaaggagcgactccgaggccgagcttgatgacagcgaggaggaagaggaagtagtcccagctcgtcgaggccggtgggccaggcggttgcttctgttgctcgtctgtgtgtcctgctcgttctgctacatgtattgcgccaaaccctctggctttcctacttattcagaagacgcacttgatttggatagaggtattgggggcatgtacgatgcctatgatcatgaattagactcactgagattgttagggccagttcatatgatgggtccagaggatgtgctggaagaaattacaaatcaacttgtgcacgaggactctaaaagtgtggaccatctgtatggcaacagagctcctagaaatctggtggcagttgctatggtagggctagctgatatctgcctcaatgtttcttcaggagaatttacatgccaaattgggggtgaaaaaggtgagaatgtgcctgatttgaaggaagattctgaaatggacaaactcgatacagaactgacaatctcctttcagaatgacaagcaaagcagtgaagttgattgcctgggtggaaacgccccactggattccattggttccacttctactcacactgataacttggagggcagtttggaatcattccatctagaggaatgggatgattactcaaatcaatctgaactgcagttagtctccatggagagggctataaaatcagcaagttacaagctgaaagacagaacgggtttggaaagtgaggagttggatctatggcagtatgagaatacagcagaagctgctaaaacaatatgctctactgtaaaatttctgtggtctgcaatggaacctcacttgctgcaggtattggcatgcttgtcttttgcaggtttggtggctgcattatataggtattatcaaagatcaagagagtgctgcaactgcatcataacctatgactcacttgctgaacaaccattgttagttcaacatcaagttgcgcagctgtcagtgacttcagttcgagatgcacagctacctgttcactcttcggagcaacctatacaattggcaattcctaaccaaggcacggctggtagtttggaggttcctatggagttgacattgcccaagctggacccattggtcagtcttgaggatcctgcacaagagtcattgcccatgacagacccactggtcaccgtcaagattcctgtgattggtcgtgggatccatgatcagaaacttaaacgtggggattctgagaacattaaggcttcaaatggtatgtttctgaaccatagtgacgttgacagctccaagccaccagtggttgaactacttggagagttcgtgcttgcaagtagctcaagagaaagatctaccaagaaattgtatcagaatgctggagatgctacagataagaaattgttgaaacctttgaaaaaggatgaggatgttgaaaagatgcagatgcattcaagcatcatccaaagccctagtgttggaagagccaaaaaagagcaggagaaatctataaaccgggagaagaccgatgcgacgccaactccactgagacgctcaagccgcctccgcaacaaggtgacttctccctgaccaaaatccaaggtgctcagctcgtcgttcgctaacctttggatgctgggttcctctgtggtgtggtggaaagctgtggacgggacagcacctagttgttacccaagctttgatattgtactttaggagcagaacaatgttttaccagaatatatgctgcgtatttgtcccctctt

SEQ ID NO: 1510 - DNA, 873 bp, Zea mays
  Clone ID: 700155821_FLI
gaattcggaggcgcagcgccaccaacttctaccagctcaccgccgagcggaacgaaactcggcgagtgagagcggaagcggcgccgagcaaccaacccctctcctcgtccgtcgccgtctccccggaccatggccatggccgcctcctcctcccggctgctctgggcgtcccgcgccgccgcctacctcaggatctccacattccccagggccttctccaccgtgatgaaggatctgaagtatgctgactctcatgaatgggtgaaagttgagggtgattcaacaaccgtggggattagtgaccatgcccagcgtgctttgggtgagcttgttgttgtggagctaccagaagttggcatcagtgtatcccagggaaagacctttggtgctgttgagagtgtgaaggcagccagcgatatctattcaccagtgtctggagaggtggttgaagtgaacgagaaactatgtgacttgcctggattggtgaatacaagtccatatgagaagggatggattatgaaggtcaagctcagcaattcaggtgagctcaattcgctcatggatgatgatacgtactcgaaagtgtgcgaagactcgaaagtgggcgaagacgacaaccattgaagaaatcaaagtgtcttctgaagaccagaacgtgtttttcaagctttatcactggttatggtctggagaccagctgtgacaaattggcaaggttcatcgcaaggaataaatgttaggatttgccaatcctacaagggcatgggaaatccaagtttgtgttgtcaatgacgtggtcatatttgatatttctttgtagttgtaatctcgtgaattccttcttttttcttaaaaaaggactctttttgattc

SEQ ID NO: 1511 - DNA, 1680 bp, Zea mays
  Clone ID: 700155851_FLI
ctccacgtcgcctcgcctcgcctcgccggtaatcgacttccttctcttggcccttatgcaatcggttgggttgtggctgagccgatctgacccgatcgggtgggtccttgcgccgccgctgcgtgggctcatctcggtcgcccgcctgctcggctcgatcggccggggacggcggcggctagatctgcgatggagggcaacaaggacgacgcggccaagtgcctgcgcatcggcaagggcgcgctcgaagccggggaccgcgcgcgcgccatcaaatttatgtccaaggcaaagcgcctcgacccctcgctacccatcgatgacctgctcacctcccttctcaacgcgcaagacgactccccggcttcctcatcatcatcgccgcctccaccaccgcaaactgccgcagcaggggcatcggaggcagctgaggctgatgggctgagagagaggaagcacaagggcaagaagagggaggaggaggaggaggcgactcctgctgccagggagtacaccgcggagcagctcgaggttgtgcgccaggtcaagaagcacaccagggactactaccagatcctcggcctggaaaaggactgcagtgtcgaggacgtgcgcaaggcctaccggaagctctcgctcaaggtgcaccccgacaagaacaaggcccctggcgcagaggacgccttcaaggccgtctccaaggccttccagtgcctgagtgatgcggagagccgcaagcgctacgaccttgttggctcggatgagccagtagcacaccacaggagggcctccactgcccgcgcatacaatgggttctatgaggatgactttgacccagatgagatattcagaaacttcttctttggcggtatggcgcctgcaaccaccaggcagtttggacagtttggaactttccattttaggactggtgggatgcatgcccatgcccatgcccaacaaaactctggtggctcaactgtcaggatgcttattcagctgttgcctgtcctactgctgctgttgctcaacttcctgccatcctctgagcctgtctactcgctgtcccgttcatacccttatgagcataagttccaaaccccacgtggagttgcatactatgtcaagatgtctaatttcgaggagcagtatccacaccaaagcactgagcgagcgacgctggagcggcatgttgagagggattattactccataatcacacagaattgcagggctgagctgcagcgtcgccaatgggggctgtcataccagacaccacattgtgatatgcttaaaaattttgaggctgcagcaaagtaataactcatccaattctgtaaggttgacatggggagagagactgctggccactcatgtaaaggcgctgccttagccgccagcttgaagtttgaggggacattttagtttggcttagtagtaaattttgtggaataagtgcctttgataactatacaccgctgtccagatgctccctcttagtattggcaaggagtgcgttaattagttacttcaaaaagatatgcaagcttcataggggctgatcacatgcaaaccagtgtatgtatatgaagtatatctatctcattcttttaacttttttgaagtgaagactgtagttaaaacagaaatgcaactataacacaaatgtgatattcattttat

SEQ ID NO: 1512 - DNA, 2176 bp, Zea mays
  Clone ID: 700155866_FLI
cgccactctcacacctaccaggaaaccaatcaaaacttaaaaccaatcgaaattagaccggcgacgaggattagcgctcgccggcgatggattctgactacggcgtgcctcgcgagctctcggaggtgcagaagaagcgcacgctctaccagcccgagctgcccccctgcctccagggcaccactgtcagggtggagtatggtgatgctgcaattgcagctgacccggcaggtgctcatgtgatcagccatgcattccctcatacctatgggcagcctattgctcattttctcaggaagacagctgttgtccctgatgctaaggtcatatctgaacaccaggcggtcagggttggcattgtcttctgtggcagacaatccccaggaggccacaatgttgtttgggggctctatgaggctatcaaggcccacaaccaaaacagcaaactcattggtttccttggtggatcagatggtctgctagcacagagaaccttggagatcactgataaagttattgcttcatataaaaatcaaggtggatatgacatgcttggtcgaacaaaggatcagattaggacgacagagcaggtcaatggtgctatggctagttgccaagctttgaagttggatgctctggttatcattggaggtgtcacttccaacactgatgctgctcaacttgccgagacatttgctgaggcaaagtgtgcaacaaaggttgtaggtgttcctgtaactttaaatggggaccttaagaaccagtttgttgagacaaccgttggctttgacaccatatgcaaggtgaacgcacaacttatcagcaatgtatgcactgatgctctatctgctgagaagtattactactttattcgcctgatgggacgcaaggcttctcatgtggcattggaatgtgctcttcaatcacatccaaacatggttatcctaggagaggaggtggctgcttccaaacttacaatttttgatattacgaagcagatttgtgatgcagttcaggcaagggctgaaaaagacaagaaccatggggttattcttattcctgagggccttgtggagagtattcctgaactatatgctctgcttcaggaaatccatggcctccatggcaaaggtgtttctgttgagaatatctcttctcagctttcaccttgggcatctgcactctttgagtttttgcccccttttatcaggaagcagctactactacatcctgaatctgatgattcagctcaactttcccagattgagactgaaaagctgctagcccagttagttgagactgagatgaacagacgtttgaaggagggcacttacaaaggaaagaagtttaatgcaatctgtcacttctttggctaccaagctaggggagcactgccttcaaagtttgattgcgattatgcctacgttttggggcatgtgtgctaccacatcatagctgccggattgaacagttacatggctacggtgacaaatcttaagaatccagtgaacaagtggcgatgcggcgcgactcctatttcgtctatgatgactgtgaagcgatggtcgcgtggcccttcagccacccaaattggaaagcccgctgttcacatggctagcgttgacttgaaaggaaaagcatacgatgtgttgagacagaattcttccagctttttgttggaagatgtctacagaaacccaggcccgctccagtttgaaggaccaggtgccgattcaaagcctatttcattgtgcgttgaggatcaagactatatgggcagaataaaaaagttgcaggaatacttggagaaggtgaagaggattgtgaagcctgggtgctcgcaggatgttcttaaagcggcgctgagtgccatgtcttctgtgacggaaacactgaacatcatgacttcatcttctaccggccagactccactgagtcattaggtaccatttcatggtatggatcataatccccacttttttcagtggtggcgattaacgagtttaggaacagcaaccctggtatcatacgggttattcttttgtagccttttggagagttctatcggttttggattcggtagtttatgaaggcttgttgatgagtttgagctcgaatagcttttgaaacagccggatgatgccatctttaataaaccaaattctgtgactgcatt

SEQ ID NO: 1513 - DNA, 1201 bp, Zea mays
  Clone ID: 700155914_FLI
catcacgcacgcaggcgttcagtcgataggattcaggctctgaataacccatgcagcctagcctgtcatgttcccagtatctgaactctacctgtctgaggaaatcatccacggacggtagaggactcagaagagagcatggggagagacggtggtgatggtgagctcaagctgctggggctgtgggcgagcccgttcgtagcgagagcgaagctcgcgctccagatcaagggcctaagctacgagtacgtcgaggaggatctcggcaacaagagcgagctgctgctcagctccaacccggtgcacaagacggtgccggtgctgatccacaacgggacgccggtctgcgagtcgacggtcatcgtccagtacatcgacgacgctttcgccggcactggcccgtccctcctccccgctgacccctaccagcgcgcccttgctcgcttctgggccgcctacctcgaagacaagattgtgacgccgtggcggcgggtgttcatggtcaaggccgacgaggagaaggccgaggcgatgaggcaggcggtcgcagccatggacgcgctggagggaggcctgaaggaatgctcttctgggggtgggggccagagccccttcttcggcggcgacagcgtcggctacgtggacgtccttctgggtggcatggtttcatgggtcaaggcatccgagccgctctccggcgccaagatcatcgacgcagccaggacgccgctcctggccgcgtggatggagcgcttctgcgaactggacgctgccaaggcggtcctgcaggacgtccatgcggtggtcgagtacgccaggacgatgcagatgcaggcacgggttgccgctgcgaccgcaagcaatcagtagtggaaacaccgcgaaacccgaacccagtaggcaacgtgatcccatcttctcagttggctcccgttcggctcagtgcgtcacctctgtcctgccctttgcacctgccctatccgcgtgttcgtaagccgtcgtcccaggaaacgtcgtgccatagacgatctcccggactgttgagactaccaacgtgtgtttttgaacaggaacatgtacctgcaattactgatacgtgccatcctctcgttgagtcaatggcaacgatgcaagggtctgcatcattttggaattacctcaatctatgaagtgggaatgataaggtgggccacatttgatc

SEQ ID NO: 1514 - DNA, 2333 bp, Zea mays
  Clone ID: 700155960_FLI
tgcagcgcaggtgcagcgcagcgcacaagaggggagggaaaagccaaagaagccaccgcttcccttccgcggcttccacaccacctgagctcggccggtggcggtctgcttccgaccgtccgccggtttgcttgcttcatctgcctccgccgcacctcgcctccgtccagccagccagccagccagcgccaagtcaagcgatccggccgcacccagcctcgacctccccggccgacccgtgagggcggtgtgtttggccttcaacggcctcgactcgcctcgagggcggggctcttccaccacctgcaggccgggagaagaaaaaaaaaggcagcagcttggattcttgctaggggcgcgcggttggtcagctcgagagagaagctgaccgggtttgggcgtcgagatttcgattgacttttgaggtacccggggtatagtctacaatacaggttgcttcttcttgcacgctgctttcttggctctgtggctaccgaccttgctggctttccctcccgaattagcggctgagctccatccagaccttgcagagattggacctttggggggcggttcgctcactcctagcttgcctcgctggctggtctttgagcttctcgtgctacgagccaagggaggccatcttttcctgctcggttctgtcgtgcagacgggaaagattgagctgatctgctgctagctggggatcctgcagaggctaccgcgttcttcttgtctggggtgcacagtgcatgggcagtgggtgaactggtagagagcaagatggggaattgcatcgacaccacggcgcgggtggatcacagcatgaacaatgctgcctacccatcaaaagtgaccagcaagacaagtttgtcgtcaatcccttccacaattaagagcaactcaagtcgttcaacactgactcttccatcaatgagagatcgaaatgagcttcctactcctcggacagaaggtgaaatcttgtcatcttctaatttgaaggcattcacgttcaatgatctaaaaaatgcaaccaagaacttccgaccggacagccttcttggggaaggagggtttgggcatgtctacaaaggttggattgatgagcacacgcttgctccttcaagacctgggagtggtatggttgttgctgtgaagaagcttaaaccggaaggttttcaaggacacaaggaatggctgacagaggttgattaccttggccaacttcaccacaagaatcttgttaagctcattggttattgctcagatggtgacaaccggcttctggtgtatgaatttatgcccaagggaagtttggagaaccatctgtttagaagaggtgctgatcctttgtcatgggcaataaggctcaaagttgccattggagctgctaggggcttgtcatttttacatgatgctgaaaaccaagtcatatatcgtgatttcaaggcatcaaacattcttctcgactcagaattcaacgcaaaactttcagattttggcttggcaaaagctggtccaactggggataaaacccatgtatccacacaagtcatgggtactcatggatatgcagctccagagtacattgcaacaggccgcctctctgcaaaggcagatgtctatagcttcggggtggtgttgcttgaactgctcactggaagaagggctctggataaatcaaaaccaggctttgagcagaacctagttgactgggccagacctcacctgggcgacaagcgcagactgtaccgtatcatggacacgaagctgggaggacagtaccccaaaaagggcgcaaatgccattgcaagcattgcctcgcaatgcatttgcggtgacgccaagctgcggcctccaatgtcgcaggtgctggaagagctggaacagctacaagatgccaaatatggtgcaccatcgccattagtcgacatccggaaagcctcgcacgccgcccccaaatcgcccatgagcagcaccccaaaatcgccgctgagcagcaccccaaaatcgccgatgagagctcaaccggcagcacggccttcgccacggcgctcgcttggagcagcagcacctttggcaggataccgcactgcccaagtgcactagaactttgcccaagtgcactagaactggacttattagcggggccaaggcccctgtaggctgtgtgtttgtgggctcaagctgtgagcactgagcatgttgtagcttttgcttctactgatgtttcggcgatggtgtgtgccacgggaatatgaccatgtcaaccttatgataagttgtcaggcctggttcattattgacctgtgtcgtgactgttccgaaaaaac

SEQ ID NO: 1515 - DNA, 514 bp, Zea mays
  Clone ID: 700155974_FLI
tcgcttcctgtctagggtttcacccgcgtgccttatatatcctatcacttcccgcccagccgccatctccgcatttccatcttcccgtgggatcccagtcgccgccgcaagaagaagagctcggggacttccaggtctcgcgagaagatgccgaagcagatccacgagatcaaggatttccttctcaccgcgaggaggaaggatgcccggtcagtgaagatcaagaggagcaaggatgttgtcaagttcaaggtccgctgctccaagtacttgtacaccctctgcgtattcgatgctgagaaggcaaacaagttgaagcaatctctccccccaggcttgagcgtccaggaggtttgattggatacatgacaacgtcgggtcgaacctctagagcatctttatcattagcagagcatgctgtttatgtagttttggactttaagctattagacatgtctggatttgtggatcttgaatttttggagaaataccaatttgcctcgttcaattgcgc

SEQ ID NO: 1516 - DNA, 544 bp, Zea mays
  Clone ID: 700156058_FLI
ctggctcacttctccaggtaaggaaagtgttcgtcctcatggcgccgccgcagccgaagtcgggcctcttcgtgggcatcaacaagggccatgtcgtcaccaagcgcgagctgcctctgcgcccgtcccaccgcaaggggaaagcaacgaagagggtgtccatggtcaggggcctgatcagagaggttgctggctttgctccttatgagaagcgtatcaccgagcttctgaaggttggcaaggacaagcgcgctctgaagcttgccaagagaaagcttggaactcacaagagggcaaagaagaagagagaggagatgatgggcgtcctcaggaagatgagatcggctggtacgcacactgacaagaagaaataaagcatttcaagttcatgaatgtggcagccagagattatcaactgtgttttttccctacctctagaaactagacatggcaaagtatttttgaccgaaacattgtttgttagtaatgtattgaaccacctcgtggtattttgccccaacttccaatgcatcaatggtttgtt

SEQ ID NO: 1517 - DNA, 1813 bp, Zea mays
  Clone ID: 700156105_FLI
cggcgggaagggccagcagaccaagggaggcggcggcggaggaggaggaggcaagggcgggaaagacgcgaacatggtgctgccgcagccgacaccacagcagatgcagcagcagatgcagatgaagggcatgaagctgcctcctgagctcctcatgggcatgggcggcagcaagatgccgccgttcccgacgcccgcgcctgcgcccggcccgccgccgccggcggccaaggaccccaagcccgccaagttcagctaccccgaggacgacgagttcggggacgaaggcagcgagttcgacgacgagttcgatgacttcgacgatgaggacgacttcgaggacgacggcttcgacgatgacgacctgtacggtgaccccaagatgatggcgaagcccgtggccatgccgccggccgccggcaagaaaggcgggaacggtggcaagaagggcggtggcggtgggaacgagatacccgtgcaggtgaaggggaacgcgcacagcggcggcggcaagaaggactcggccgcgaagcagaaccagggaggcgggaagaacggcggcggcggcggcggctcgcaggcgccgcagaacggcaagggcggcgggaacgggaaccagcagggcaagaagggcggcggcggcggtggtgggccgcctgccggttccggcgccccgatgatgggcggcatggcaatgccagcgcctcggccgccgctgccgcagcagcaacagccgggcccgggcatgatgatgaggccgccgaacatgatgggcggcgccggtttccccggtggtggcatggggccgggcatgggccagatgggcggcgcgccgatgggccaccctcaccacccgcacccgcaccagcacatgggtgcgggtggcaatggcatgcagatgcagcctggcggtggcggtggcggtgccgtgcatggcatgccagccggcgccatgccgggacatgctgctgggttctaccaaggcggtggtagtgcagccggcggcggcatgccgtccgggccagagatgctgcaggcggccgggaaccccatggccatggcggcgcatcagcagcagcagcagtacatggcgatgatgcagcaacaacagatgatgaatggtcacggcgccggcgccggcggccccggcgggtacccggcgatggggtacgggtacggccggccggcgatgcagtacccaccgccgccgccgccgccgtactactaccacccgatgccgcagcggcacccgcacgacaacatgttcagcgacgagaaccccaacagctgcacggtgatgtgatcatgtccctgtcatgcatgccaggaggcaaaggtcgctgcggcctgtcgaagctttttctcctgcctgctattcttccggaggagggagaagaccgatcatgggtcagcgtcaccatggttggaacaaagtccccggattggattggatctcagtatacatgagacatgcatgagaagccccctacccccttttttctcctttttttttttctttttcacttctactactagtatttatctttctctttttttttctagcttgtttttcacctttactttctttggacaaagaggggggaaaagaagcaacttccttgaaggcgaaggtaggtatagtagtaattatcaatagtggtgggcataagacatgatggtggtggtggtggttgttcatggggtttatagtaagcagtagctcaagaaggtggctctcatggctccccttcttgttgctccacaatgtgatgatggtatggaggtggcatggtagaaaagcttggtgaatctc

SEQ ID NO: 1518 - DNA, 2210 bp, Zea mays
  Clone ID: 700156106_FLI
cttggagtagcaaagtctacaattgaatgtggtacaactctctggaatggtgacttgttggcagggtcgaaacacttgcggtttcttgacctctctggtaacgaaataatcagtagtggaaagagttgcatatctgccacagaaaaaagctgcagcctggagaccatcgtcattcatcaaggatgtgctggactagagaagatctcattggccgggtgtgctcagctagagaatgtactcttgacaggatcattcaatgagctcgtgagccttgatatctcaggatcagctgtgaagaggctggatctcagtgcgatgataatgctgaaacttaatgagctaattctactagactgcaacatgctacgtgcaatcctatggcctccggaaggaagagagagagaatatcctggcaagctgcgcattcgaacaaaaaaggagactaccataggcagtgctactgctccatcaggattgacaatgatgtttggtagtctagtccccgccgaatatttgtggtggtatatttcagtatacgatgaaaggctgctctggtcacttttgcccttaaaacagtatttcagttaccactttgtacatttcgagatttcctctcctggtcgccgaccagatggcttggcatgtacaagtgatgaaatgatcctagaagtgacaaccccagaaggttataacacgtcaatatatgtagacgtcgccaagggccaactgctacatgtgaagggagatgaaggtgattctcctatatccttcacaagggtatggccctgcccacgtgctcctgatttagtcccatcaaactgctacctgcacatacaagactggccacagggaagaaaaccacaacgaactagtcaaaaaactgctaccattactattccagatactatatgcaacaggactggcagcatacatgtgcacgatagcttgtacatcactcggatgccagacccagcaccttctggtgcaatctgggctaatcttttttggtgccgagtggagcgttgccctaaaatggattgtgtattcacaagttcgtccatggtaggtgctgagaacagggacgacaggatcttttggagactggcaacgctatgggtgtcccagcttcccaaggcacggttcatatggagctcgaggaaacacgagatcagcggttattcgtttctggacctagacttcgtgcatgtggacttctgcccccggttgacacatgttcttcccttgtccatggcattgatcagaggaagtggcctggacagtctaacaaccctagagattgtgtggtgtggagatctgagggcagttttccctttggacactgatgcccagagctaccaagatcatcggcgaaaccaggcaatcaccgtggaatttccttcccttcagcgtattcacttgcacgagtcaccaaagctgcatggcttatgtggccgtggaaggatgtacgcaccaaagcttgagagcatggtgatcaggggctgctggaacctcacacgcataccatccgttggcgatggcggcgaccgcattaccaagaaggtgaagtgcgactgtgagaaggagtggtgggacaggctcgagtgggactggcttgaagaaagacaccatccatccctatatgagccaactcatccaaaatattacaagaaaaccttgctcaggacctccgtgctcagatgagcattgctcaagcctaataatggtgatcgatatgggccatgaccagtgtgatgtgctgctctatatatgggccatgatctgtggtcaccagagtgtttgttcttcgatttcacctgcatgtgtgttttggttttgcttgttgtttttcaaatctgtgacatcgcatccacagaatattgttcacttgtttccatggtgtgtggacttccgatcttggattgtggtctgctgatctgcgtcgcaacgcgaactatctgcaaaatgtatcagctcttctcagtagacacataaataaatatgggtgagccaaaatgcatttggttagtagctggatgtgtttgccccctcataatatttgtaactctgtactctccctgggttttctggtgtggcgtgtatttgtcagcattgtgtaaactgaatgactgctcctactgttgtgcttgctcaagctacaaacatatatataaatggatctggacttttgtgtctgcagtagcagaatttgt

SEQ ID NO: 1519 - DNA, 1167 bp, Zea mays
  Clone ID: 700156236_FLI
atgtctatcctacagagtcatctatatgctttgacagccacgcctcggatgttgcctatgtgtctgcaagtagatcagttattgcttctgctggatatagttcaaatggttcaaatgttgttatatgggacacactgtctccaccagctacatctcaaacatctatcatgtgtcatgaaggaggagctcggtctatttctgtgtttgatagtgatagaggctatgggtctatctcaccgcttgttgtaactggtgggaaaaatggagatatagctttgcatgattgccgcttcctttctactggaaagtccaagcatcatagagttaccactgagcatggtgtcgaggcatcttccatgcatgacatcaaatctagtacttttggtggtactgacagtgggatggtctggcatataccaaaggctcatctaggtagtgtcacaaaggtaacgaccatcccaaataccagcttgttcttaaccggaagcaaagatggagatgtgaaactttgggatgctaaaaactcccagctagtctttcactggacaaagatgcatgaacggcacaccttttttcaaccaacctccaggggctttggcggtgttgttagagctgctgtaacagatctccaggtgttgcctaatggtttcgtttcatgtggaggtgatggttctgtgaagcttgttcagataaaagatgatctcgctgcagcatatcagcgttaaaacaagcaaagagggaagaagacatgctagaaaatgcgatggatgcagttggtcacttgatatcattctattttgctttgctcattatacttttgagatgctttactcctttcaggggtggtatagcaaggaggaagctatgatttaagagcactagagcagacatctaggcaatttgacatcagcatttatacgtcgagtttttatacgagcctggtttgtggctagtcaaactgccctcagtggtttttttgaggcctgaattttcgcactttggacagggcaatgcggaccataattttttgtacatctgtacagtcaaatatcttgttttgttggccaggatgttgatggagggtgtaaagttgtaagctagaagtagggagataccaagctacaatacctttttgttacttaatacaaaagtgctgggtttagggtt

SEQ ID NO: 1520 - DNA, 1177 bp, Zea mays
  Clone ID: 700156247_FLI
agtcgcgggccgtggccctgcctcagtatttcctcttccccgcgataggcaacagaaaccgcagcataacaaggaaagcgaagcgaaccctcgccgcgcgagttagcgatggccggagaggacgccgccgccgcgaggaggcccccgaaggaggaggaggaggaggaagatgacgacgatttggacaacgttccgctggcactttccagggccaagaaaccgggtaatgcgagcgcctccaaggtcaagaaggaggaggaggacgatgacgacgacttggacaacgttccgctcgcactttccagggctaagaagggaaacgagaagcagaaaggcaacaatagcaatatgaaggcttcttcgaaagtcaagaaagaagtcagttctgatgatgattttgtcatgccaacggcgcagaagaaaagtgcaggtgctgctggaagtaatgccaagacatccaaggttaaaaaaattaaagatgaagatttggatgatctcaaggaggacaagaaaaggaagaaacgagtcggtgtcaaagaagaggcaaagttggccttggccattgtaaagggagagaaggttaagaaagagaggaaagtgtatggtttgccagggcagaagcatgatcctcctgaagaaagggatccattgaggatattctatgaatcactctacgagcaggtccccaccagtgacatggctgcaacctggttgatggaatggggtttgctcccggtggatgtggctagaaaatgttttgagaagaaacaaggtcagaaggttaagtcaccagtcaaagcaattacggcgaagagaattccttcttctccagccaagacactgccttcatctgcaaagaagttagttatggcttcaaacagtgctggaaagctgaagtctcagaagaaaaggaaggcaagtgatgacaccgacgacgacgacgacgacgatgattttgtagcttctaaagcaaagaccaagaggcacaaggcctagttaggtcctagcatctcattatcctagtaatgagacgtgttcttcagacaatttctagctcgggatgaccttggatgattgttccttccattggtttgctcatttggggcgcgcacaactaaattctgtgaagtagcgtgttgtgttgtgtcaagaagttcctgcaaactttcacttggtt

SEQ ID NO: 1521 - DNA, 2205 bp, Zea mays
  Clone ID: 700156315_FLI
ctctgcttgtgcttgtgcaatgcagggattgcggcaagcaggtctatttgggcgggtttgacaccgctcatgcggcggctcgggcgtacgatcgggcggcgatcaagttccgcggcgtggaggccgacatcaatttcagtctggaggattaccaggacgacatgaagcaggtgatttatactcctatacggagcatgtagcgagaaagatacatgtaattttttctttccttcgtctaccagcagatgggccacctgagcaaggaggagttcgttcacgtgctccggcggcagagcacggggttcccccggggcagctccaagtacagaggcgtgacgctccacaagtgcgggaggtgggaggcgcgcatgggccagttcctcggcaagaagtacgtctacttgggcctgttcgacaccgaggaggaagccgccaggtaaaataattggaccgcactgtgtgcccgcgaggcgtttctcggagcaccgccacccccctctgggccgcgaaactgactgatggatggatgccccgtgtctgtgggattgtcgggtcgtgtgtgtgtgtgtgtgtgtgcagggcgtacgaccgcgcggccatcaagtgcaacggcaaggacgcggtgacaaacttcgatcccagcatttacgccgaggagctcgagccggcgggttcgtctatcccccgcccgcgatctccgccacgatcgcgccccctcgtcgctgtgcggcgatttcgctacaggctacagcctatacaggcaagctctgacggtccgctgtttcgccgtgcagcgtcgacgggcggcggtggcgatgaccacaatcacaacctggacctgtcgctggggagctcggcggggaacaaaaggggcagccttgacgacggcggcggcggaggaggcggcggcgacgacgagacctcggaccagcgcgtccccatggcgttcgacgtcgactggcagacggccgcgccccggagcacgaaagcaaagctggacgcgagctccaagcaaccccagacccagatgctgcctcctccgcctcctgctgtcttgcgagtcgcccaccagctgccgttgccgttcggtcccaggcatccgcaatcgcagttcctgagcaacggcggcgattcggggacctcgggaggcctgtccctcgcgatcggcggcgcgggcggcgggcactggcctccccagctgcagcacctgcagcagcagaggctgcacggcgcctgggccaacggcggcggcacgagctggccgcctccgccgcacccgcacccgcacccgcacccgccgccaccgagcaccgccgcgaccgcagctgcagcatcatcacgattccctccctacgttgttactacgacgcaaggcccggcaggctgggctcagaagaatgggttccattcgctggccaggccaacctagtatgccaagaaccacgactggccggagcgttcattcgtcgtcgatcgtcgacccagggcaaacgacacctccaaccactgcacgacgacgttttaatttaccggatgccattctctctctcccctccccccttcccttctcccttctcccttctcccttctctgtgttcttgattgggtgagacatggatccgaggatggatggacggcctgtacctgaggagttcccgggaagaagacgagtgagtgagtgagtgattggtagggtaggcgactaggcgtcgcgtcaggcagtacgtccttttggcgccttttttcttctttcactcaccattggcgaccaccaatgaatgatgacactgactggggtgtcaacatcgcagctggttttgtttggtctcatgttgcatcactcgctgctccacgatgccttgctatggttggggggagatttgctccatccaccccacgccggtcaggcgacagagcctccgctgcgtcgtctcatccgtctggtgagttgccactgtcttagaatctgagtggtacggtacgtgtggatctcgcgcgcgtgtaaacctagtattatgtactacaaactgtcatcatcggagatcactcgaataagatatcgatcttgagattacgggcggcggctcctgtcatgtgcttactacagcaaagctgataaactgtccgagtctgaacagctcatgtaatggaacgccgcatagatatttccttcttgttaggggtactttggaaccccaatttttt

SEQ ID NO: 1522 - DNA, 3206 bp, Zea mays
  Clone ID: 700156317_FLI
gcaaggtcaacatcatcatggatggggaaggaaaaatgctcttacaagggaggcggtggcaaaagttgttgatgacacatacaggaaaatgcaagtatgtgctcctgaccttccctctagaagccacagtggatcagatttcagtcatttcaggcccaaagaggaagcgcctgacttctaccatgtggatactaaggtccgctgcctttgcaatagcacattgctaaatgacaatatgattaagtgtgaagatggcaaatgccaggtgtggcagcatattacctgcgtactcattccagataagcccacggagggtgctggccctgatattccacctcatttttattgtgaactgtgccgactgaaacgggcagacccgttttgggtgactaccggaaatccattactacctgtgaaatttatgtcatctggtgttggaaatgatggagcaagtgtacctcaaattgtggagaagactttccaactttcccgagcagatagagaaacagttcagagacaagaatatgatctccaggtttggtgcatccttataaatgacaaagtccagttcaggatgcaatggcctcaatatgcagaattgcaagtgaacggtattcctgtacgagtaatgaccaggcctggttctcagttactagggataaatgggcgggatgatgggccactggtaaccacatgcagtagagaagggatcaacaaaattagcttatctagagtggatgctcgaaccttttgctttggagttcgaattgttaggaggaggactgttcctcaggtattaaatttgatcccaaaggaaggtgaaggggagtcttttgaggatgctcttgctcgtgttcgtcgctgtcttggaggtggaggtgctacggacaatgctgatagtgatagcgacctggaagtggttactgaatctgttacagtcaaccttcgttgccctaatagcggatccagaatgaggattgctggaaggttcaagccttgtgttcacatgggctgttttgatcttgaaacttttgtggaattgaatcaacgctcacgcaagtggcaatgcccaatatgtttaaagaattactctctcgagaacttgatgatcgatccttatttcaaccggattacatctttgttgcacaattgcagtgaagatgttaatgagcttgatgttaaacctgatgggtcatggcgtgtgaagggtgatgccgctaccagagatctatctcagtggcatatgcctgatggtactctttgtgactcaaaggaagatacaaaccctggtgtcgttagtgttaatgagttcaagagagagggtacttctgatggacatagaactttgaaacttggaattaaaaaaacccctaatggattatggcaggttagcagtaaaccagatgataagaaacccgtggttagaaatcacatccaaaacaacacggggtactcaataccaaacatagtacctatgatcagtagccccactgggagttgcagagatggtgaagatgtaagtgtgaaccaagaagggggtggtattcagtttgatatatcattgaaccaagagtttgacagttttgcgcataactttggtcaaacatacaatacagaggataggcaacaagagccacaacataatgctgcagatgtcattgttcttagtgattctgatgaagaaaatgacccgattgttcgcctgccagctgtctatgcaaatactcctacaaatggtgacagtttccctttcgtcactgatgctgccgtatctggatatcctgaagggtaccaggaggatgctggggttggtacaagtggccttggtttattgagcaacaatactggtgattttgaaataaataactggcaaatgcattcttatccacaaccagagcaagggttccagttttttgggactgatactgatgttggcaatccttttgttggtccgcataattcctttagtattacaccagaagactactcccttgactgtaatgttggcatagaggatccatctgcagctcacgatgtctcaattggccgaaacagtaatgatgtgcatggaagcttggttgataacccattggctttagcaggtgacgatccatctttgcaaattttccttccaagtcaaccttctactgttccccttcaggaagaactgagtgagcgcgctaatactccaaatggagtccaccctgatgattggaggatatctcttacgcttgcggctggtggagggggtaatgaagaacctacaagtgttgatggcctaaaatcacagccaaaagttccatcaaaagaggcaggagttgaacctttacttgatgctgcttctgctctcccaagcatgaacaatgacagatgtaatggatctaatctaaacccgagaaggattgaaaatatattttctcatcctcgccaaccacggtctgttaggcctcgtttgtgtttgtcattagattctgattcagagtagttcggacatcatactgggatagctgaatttgctattaatctggcaaagttggcttccagaatcttgatttttattgtggagggctatcaggttattctggttgatacaaagagaaacaccagtgtggatgctttattgcattaacctggtaagattcaagtgttctatatgatccaagtgggatctccatagagttcatctaatggttggtacaggatattttctaactgggagtggtttaacgtggctagtggagcaggctgtacattttccctgacatttactgggtataaggaatagggggccatcacttggcacaagacaaatacatgtgaatgttttgtgtgtaccatcattgtatttagggttcgggtgttaatttagatgtttatgaccctgatgtttgatggaaaataaattattccttgatgaagcggcggtcaatgaacagagcccttcggttttcagtcggagctactgacccttcatctgttcctgttgtgaagtggttgcttccgcttccgtggtgggaccaaccatgccgaagtcgtgtctagcagagggcaattaatctccttggtgtctagcaggtttctttgtgcatcatgctgtattattctggtgtcctttgcaggtggtggtgggttgtatcggttttgtgaacccttctgattgaaaggtgctaggatggagtactggtatgaagaacttatcttctttc

SEQ ID NO: 1523 - DNA, 1671 bp, Zea mays
  Clone ID: 700156333_FLI
gccggacggtggtggcatcgccaattcaactccgcatctgaatcggcactcggcagcgcgccagctccatagtgtaggaggagatggcgctcacaagaatcggtcttgctggccttgcggtcatggggcagaaccttgccctcaacattgcagagaaagggttccccatctctgtgtacaacaggacaacctccaaggtggacgagaccgtgcagcgtgccaaggcagaaggaaaccttcccgtctacggcttccatgaccccgcgtcctttgtgaagtccattcagaagccacgggtggtgatcatgctcgtcaaggccggcgcgccagttgaccagaccatcgcgacgctcgcagctcacttggagcagggcgactgcatcatcgatggggggaacgagtggtacgagaacacggagaggagggagaaggccatggaggagcgcggcctcctgtatcttggcatgggtgtctctggaggagaggagggtgcccgcaacggcccgtccttgatgcccggaggctcgttcgaggcttacaagtacgtcgaagacattgtcctcaaggtggctgctcaggtccctgacagtggcccgtgtgtcacgtacattggcaaaggtggatcgggcaactttgtcaagatggttcacaacggaatcgagtatggcgatatgcagctgatttccgaggcatacgacgttctcaagtcggtcggtaagctcaccaacagtgagctgcaccaggtgttctccgagtggaacaagggcgagctcctgagcttcttgatcgagatcacggccgacatctttggcatcaaggacgagcatggcgatggctacctggtggacaaggtccttgacaagaccgggatgaaagggacagggaagtggacggtgcagcaggccgccgagctgtcggtggccgctcctacgatcgaggcgtccttggactcgaggttcctgagcgggctgaaggacgagcgggtggaggcctccaagatcttccagggtgactactactccaccggctcgccggtggacaaggcgcagctggtggaggacgtgaggcaggccctgtacgcgtccaagatctgcagctacgcgcagggcatgaacatcatcaaggccaagagcgcggagaaaggctgggggctcaacctcggcgagctggccaggatctggaagggcgggtgcatcatccgcgccatcttcctggaccgcatcaagaaggcctacgacaggaacccgggcctcgccagcctgctcgtagaccccgagttcgcgcaggagatcatggacaggcaggcggcgtggcgcagggtggtgtgcctcgccatcaacaacggcgtcagcaccccgggaatgtccgctagcctggcctacttcgactcctaccgcagggacaggctgcctgccaacctggtgcaggcccagagggactacttcggggctcacacctacgagagggtcgacatgcctggctctttccacaccgagtggttcaagattgcgcgcaacatctccaacaactgatgagctgctcaacggatggcatgcccggtgttgactactccagtcggtaatgagatttcctgcaggaacttgtctattgatctttgtaagttaattatttatatgaataaaataagagcagacatgcttgtgtttgggc

SEQ ID NO: 1524 - DNA, 1680 bp, Zea mays
  Clone ID: 700156359_FLI
tcgattgaaaaaaggtaccccaagaacccaaagtcacaagacactttaggcacttcattcagcttcaagaaagcggagcaatggagatggtgccatggcttctcggcttcctcggcaggtacccggagctcatggtgtccctcgcttgcttcctcctgctgtttcgtaggctgaaccagcgggacgggctgccgacgaactggccggtggttggcgcgctcccggcgatcaccgtcaatgccgggcgcatgcacgagtgggtgacggagttcctgcgcgccgcggggctgtcgtacgtcatgaagggcccgtggggatcgccggtggacgtgatcatgacggccgacccggccaacgtggcgcacgtgttcacgtccaacttcggcaactaccccaagggccaggagttcgccgcgctgttcgacgtgctcggcgacggcatcttcaacgccgacggcgagtcgtgggcgttccagaggcgcaaggcgcacgcgctgctgtcggacgcgcggttccgcgcgggggtcgccgccagcaccgcgcgcaagctccgcgacgctctcgtgccgctcctcgacggcatcgccgcgtcgggcgcggtggtggacctgcaggacgtgttcgtgcgcctcaccttcgatctcaccgccatgttcgtgttcggcatcgaccccggctgcctcgcccctgacttcccctacgtcccgttcgccgccgccatggacaccgtcgaggaggtcctgttctaccggcacgtcgcgcccgtgccgtggctgatgctccagaagtacctcaggactgggcacagcaagaagatgtggaacgctcgacgggtgctcgacgcgtccatcgccgagttcatctcgctccggcgagagcgcgccgccgaggccgaggccgaggccgacctgctcacgtcgtacctggcgtgccacgacgagataggcaagtccggcgccgagctcgagcggttcttgcgcgacaccacgcttaacctcatggtcgccggccgggacacgacgagctcggccttgacgtggttcttctggcttctgaccaagcacccggacgtggaggccaaggtcctcgaggagctccgcgcgcacccgccgttgtccggcgcgggaggccatcgcaccgcggctgagctgaagcagctggtgtacctgcacgcggcgctgtcggagtcgctccggctgtacccgccggtgccgttcgagcacaaggcggcggctcggacggacacgctgccgagcggcgcgcgcgtggggccctcccggcgtgtgatcgtgtcgttctactcgatggggcgcatggaggcggtgtggggcaaggactgctcggagttccggccggagaggtggctgaccgcggcggggcggttccggcacgagccgtcgtacaagttcgtggcgttcaacgtggggccccggacgtgcctcggcagggacctggcgtactcccagatgaaggccgtggtcgccgccgtgctgccgcggttcagggtggaggtggacgccggcgccgtggtgcggcccaagttgtccatcatactccacatgaaggacggcctcaaggtgagggtgcccaagagagaagaagatggcctatgttaagtgcaatactgcactaatctttgttgctaataataatgttggtcgacttgtacgtcgtcgtgtc

SEQ ID NO: 1525 - DNA, 861 bp, Zea mays
  Clone ID: 700156369_FLI
ccgcaggaccggtcactcggcagtcggcacgcaggctagcagcacagcagcagccagagccatcccctctcctcgctacgcttcgcttcctcggcgccgattcctcctcctcctcctccaccctcgtccgtcccgttccggcgcgcgagctcgcccgagatggcgaacgcgagatcgggtgtcgctgtgaacgatgagtgcatgctgaagtttggcgagctgcagtcgaagaggctgcaccgcttcataactttcaagatggacgacaagttcaaggagatagttgtggaccaggtcggggatcgcgctaccagctacgatgacttcacaaacagcctccctgagaatgactgccgatacgcgatctatgatttcgactttgttactgcagaggatgtccagaagagcaggatcttctatatcctatggtccccatcctccgccaaggtgaagagcaagatgctttatgcaagctcaaaccagaaattcaagagtggcctcaatggcattcaggttgaactccaggccacagatgcgagtgaaatcagcctcgatgagatcaaggatcgggcacgctaggcgcaccgccatcgtgagtttcatgatcacgcatcatggactcgcctactactgtggatttgtacgccattatagacttggtgctgcgaaagactgctttggtgatttgtgggtttgttgctgtgtaaaaagatcctcatggcttccagaagaccatgaaggtttggatctatcatgtaattccttgttatctgccaattatgtatgaactatggacatgtgttgcgctgttcaactcactacaaataagtaatcgatatattccctacccatgaatcggtg

SEQ ID NO: 1526 - DNA, 1070 bp, Zea mays
  Clone ID: 700156383_FLI
ctcaaccgaggccaacaagtcaaggcgagtgcggagtagaggcacaaggtcggatgcctagagagatttcccggtcgcctccgccattccgccggcgaggctcccctcctctgcggtacgctagccggagaaacagacgagatcggagccgctccccttacgcctctcggcgaaaaactcgttctccttctccactatgggacaggagcaactcaccaagtccaagaaggcatagaagcccactatctccaaggagacacagaagacagagaagtcggagcactacaagttcattagagaataacccatccagtccaagtcacgcatcagagaaaataaattcatctgtaaaacaaaggctggaagaagaaaagaaaaggcgtcaaaaggaagctgaatttaagttactggaagaggagcttgctagaagggtcgaagaagctataaggaaaaatgtcgaggaacgtctgaaatctgaagaggtgaaacgtgacatagaacaccgaattgaggagggtattagaaagttatttgatgaggttgacgctcagctacaaaaagagaaagaagtggccctttatgaggccaggcagaaagcagaacaagaaagaagagagagggaggagttggatagaatgctcgaagagaacaggcgtaaagtggaggaagcacaaagaaaggaagctcttgagcagcagcagaaagagttggaacgatatttggagctggaaaggatacaaaggcaaagagaggaagcgttgcgcagaaagaaaatggaggaggaagaagagagagccaacaagctgagattgctggggaaaaaccggggttgagagctgtcatctttctatacacagcggtctatgtgccgtggttgccccccatttgacttgttagttgttgccttaccagtgcgagaacttttgtttgatgtacgagcatgaaaatggtcatgtatgacatatatgaatggaacctgcagcgtattctttgagtacgttttaagacaggttatttagattcctcaatgttttgctttgccatgcttaatatatttttttaaatgccct

SEQ ID NO: 1527 - DNA, 1541 bp, Zea mays
  Clone ID: 700156515_FLI
gtctcattctcagtgtagagaggggaagaggaacaggagcaggaacagagagagagagagagcaatggggaacaggcacctctgctgcctgtgcttgctccttctcctgggactggcgtccggccaggtcctgttccaggcgttcaactgggagtcgtggaagcagagcggcggatggtataacctcctgatggggaaggtcgacgacatcgcctccgccggcgtcacgcacgtctggctcccgccgccgtcgcactccgtctccacccaaggttacatgcctggccgtctgtacgacctggacgcgtccaagtacgggacggcagcggagctcaagtccctgatcgccgcgttccacggcaagggcgtgcaggtggtggcggacatcgtcatcaaccaccggtgcgccgactacaaggacgcccgcggcatctactgcatcttcgagggcggcacgcccgacggccgcctggactggggcccccacatgatctgccgcgacgacaccatatactcggacggcacggccaacctcgacaccggcgccgacttcgccgcggcgcccgacatcgaccacctcaacgaccgcgtccagcgggagctcaccgactggctgctctggctcaagtcgtccgacctgggcttcgacgcctggcgcctcgacttcgccaagggctactcccccgaggtcgccaaggtctacgtcgacgccacggccccgaccttcgccgtcgccgaggtatggaacagcatggcgtacgacggggacaacaagcccgagtacgaccaggacccgcaccggcaggcgctggtggactgggtcgacagggtgggcggggcggcgtcgccggccaccgtcttcgacttcaccaccaagggcatcctcaacgccgccgtcgaaggcgagctatggcggctcatcgacccgcaggggaaggcgccgggagtcatcggctggtggcctgccaaggccgtcacctttgtcgacaaccacgacaccggctccacgcaggccatgtggccgttcccctccgacaaggtcatgcagggctacgcctacatcctcacgcaccccggcaacccgtgcattttctacgatcacttcttcgactgggggttcaaggacgaaatcgccgccctggtggcggtgcgcaagcgcaatggcatcacgccgacgagcgagctcaccatcctcgagcacgacggtgactcctacgtggcggagattgacggcaaggtcattgtaaagatcgggtccaggtacgacgtcggccatctcatcccggcgggttttgaggtcgccgcccacggcaacgactacgccgtctgggagaaagccggcgccgaacaagtgactcgagcataatagagtgctcgagataccgatttgattctcagtacaatgtacacgggactgcattgataaaataagtggtttctcctctaataagtaagggagcgtaaaagggcaattggagccatatgtaaccttaaaatattgctgagtaaaatataaaggtgatccctaaattctccttttc

SEQ ID NO: 1528 - DNA, 727 bp, Zea mays
  Clone ID: 700156618_FLI
atcaaatgtcccattacaggcaaaacgttcatccaagaaacccgcagcacgggcaaaggttccttttgagaaaggctatagtcaaatggattggctaaaactgacacaaacacatcctgatctagctgggcttaaggggcagtcaaaccgaaggttaatttctttggaagaggttaagcagcacaaagcaggagattgtatttggacagttctcaaaggccgcgtgtacaacattgctccatacatgaaatttcatcctggaggtgttgatatgcttatgaaagccgctgggaaagactgcactgctttgttcaataaataccatgcttgggtaaatgcagagttcctcctggagaagtgccttgtcggattccttgatcccaccgcgtagatatccaggtctcatggcattttatcacacccggactgtttgtagggcaggcacctcagtcgacgaattaaagaatctaaatgtttgtatcacaacgggagtacaacaattaaattctgtttcaaaaagaaaacggaattgttatgacgatgagaaaaaatcagtctaatactggtatgccattacagtgcgaggtgaattacaacacctgatgaaattactgcattgtcaatatgaaaacatgtggttgtttatatatacctggggtataatcctttccaagcgctgtaatatgcatgtatattgtttttttccacatttgtttgaagttttgtt

SEQ ID NO: 1529 - DNA, 519 bp, Zea mays
  Clone ID: 700156628_FLI
ccttcctggagatgatcaaggaggaattcaacaggagatattcaggtggcgaagcaggaacggctacagccaacagtctcacccgagatttcgggcccaggcttagagaccagatgcagtactgcacggatcacccagaggaggtgagcaagctgtccagagtgaaggcccaggtggatcaggtgaaaagcatcatgatggaaaacatcgacaaggcctttgatcgcggacagcagatcgacgggcttgtcacaaggacggagcagctccacgacgaggccgttgatttcaggcggcaaggcgtgcagctgcggcgcaggatgtggtaccagaacatgaaggtgaagctcatcgtcctcggcgtcgtcgtcgcgctcatccttatcatagtcctctcaatttgccatggcggatgcagcaagtgattattctttttttttttaaaaaaatgtgctggtgctggtcttttgctcgctctacctataaacatatctaatctagagattatacatttttact

SEQ ID NO: 1530 - DNA, 962 bp, Zea mays
  Clone ID: 700156629_FLI
ctgacctctgatcgtaattaccaaccactgccagcgacctctcctcggaggcgtgaccgtaattgctccgcaactaccccgataccattcccaaatcctccgtcgacccctctacaccggcgatcggcggcgaacgatggggtgggcgacgcggttcctggcggcggtgtgcttctttgctgcgggcgtcctcttcgtcccagaggctatcggttccccatccggcgcaggagccgtcaccgccgccaagctggcccacgtcctctcctttgccacctcctggggcgccgccctctgggccaccttcatcggcggcatcataatgttcaagaacctgccgaggcacatgttcggcaacttgcagagcaagatgttcccggcctacttcacgcttatatctgcatgcgcagccatctccgtcgccgccttcgcgtaccttcacccgtggaagacggcgtccactgtgcagcgctaccagcttggattcctcctctcagcgctcggctgcaacctctccaaccttctagtcttcactcccatgaccatcgagatgatgaagaagaggcacaagatcgagcgggacctgagtatcggcgaggaagtcggatggtcaaagaaccagcaggtggctaaatccaaccccaccctcgctgcaatgaacaagaagtttgggatgatccacgggctgtcatcactggccaacatcatgtcgtttggcagcttggccatgcactcctggtacctggccagcaagctagagctgtgaagaaggggagacaagacgacacctttctccgccttgttgtgaatcttgtcagttgtcacgatggtgttgcttgctgctctcaaaccagtttcaaaattggaataactagaaaatggccagacacatacagacagggttttgtaaaatcacactatctccgatctcgaatattttgcaaaaccgcatgtcctcgtgc

SEQ ID NO: 1531 - DNA, 799 bp, Zea mays
  Clone ID: 700156660_FLI
ccgcgaatcggatccgccgacaaggcgagagggaagagatggggctcacgttcaccaagctgttcagccggctgttcgccaagaaggagatgcggatcctgatggtgggactcgacgccgccggaaagaccaccatcctctacaagctgaagctcggcgagatcgtcaccaccatccccaccatcggattcaatgttgaaactgtggagtacaagaacatcagcttcactgtctgggatgtcgggggccaggacaagatcaggccactgtggaggcattacttccagaacacccagggtctcatctttgttgtggacagcaatgatagggaccgtgttgttgaagcaagggatgagcttcaccgaatgctgaatgaggatgagttacgtgatgctgtgttgcttgtgtttgctaacaagcaagatcttccaaatgctatgaatgccgctgagatcactgataagcttggactgcattcacttcgccagcgtcattggtacattcaaagcacttgtgctacaacgggtgagggattgtatgaaggcctggactggctgtccagcaacattgcaaccaagtcctaaattgtcaagcaaggtttggatcatctaggagcttttggatgatgatgatggtgctggatatttagggttgggttggtatttccgtatgtaagatgtatgcccctgagctcggcagtttttgagctctgcttaagattctcacagttaaattgttttatgtaatttgggccttgagatgtttctgaaccaaacagctaaaagagttcagttgagtt

SEQ ID NO: 1532 - DNA, 946 bp, Zea mays
  Clone ID: 700156661_FLI
gatccgccattgctcaccgcacaagtgcacgctcacctcacacacgcagctaagtagctaacgccgtaggcgagaacaagaaaaggctcgacatggccgaggagaagaagcagggcctgcagctgctggacttctgggtgagcccattcgggcagcgctgccgcatcgcgctggacgagaagggcctggcctacgagtacctggagcaggacctggggaaaaagagcgagctgctcctccgcgccaacccggtgcacaagaagatccccgtgctgctgcacgacggccgccccgtctgcgagtccctcgtcatcgtgcagtacctcgacgaggcgttcccggcggcggcgccggcgctgctccccgccgacccctacgcgcgcgcgcaggcccgcttctgggcggactacgtcgacaagaagctgtacgactgcggcacccggctgtggaagctcaagggggacggccaggcgcaggcgcgcgccgagatggtcgagatcctccgcacgctggagggcgcgctcggcgacgggcccttcttcggcggcgacgccctcggcttcgtcgacgtcgcgctcgtgcccttcacgtcgtggttcctcgcctacgaccgcttcggcggcgtcagcgtggagaaggagtgcccgaggctggccgcctgggccaagcgctgcgccgagcgccccagcgtcgccaagaacctctacccgcccgagaaggtctacgacttcgtctgcgggatgaagaagaggctgggcatcgagtagagagcatccatcggtcggccggtggctggccgggagtaataatgacgaaccaattatctagttttggtttgagtgtgctcagcagagcagttcgtcgtcgttgtattttctattgtcagcggtggcagcgccgtacgtgttgcctcgtgcaccacatccgaataaatggttatgaattt

SEQ ID NO: 1533 - DNA, 384 bp, Zea mays
  Clone ID: 700156710_FLI
ggtggcacctcgcgtgggacgagtggacggcggcgtacccggccaccaggttctacgtcggcctcacggcgtcggagatgacgcacggctgggtgcaccccaagaacgtctactacgacgtcgcgccgtccgcgcagaaggcggacaactacggcggcttcatgatctgggaccgctactacgacaaactctccaactacaccagcatggtcaaggactacgcttgattggatttctcgactcagttcagagcagacatgcatgctagctgcgtcagccgcttcgatctagctcaccgacctatataagccgaagtactgtgtagtgtgtttgcattttattgtaagaaactaagaaggaataaattggcgaataaacaagagt

SEQ ID NO: 1534 - DNA, 701 bp, Zea mays
  Clone ID: 700156742_FLI
cctcacccgccgcagccaaaccctctccagcagccgtcgtcgccaccgctgcagcgcggaggcgacccccatcgccgccaagatgcagatcttcgtgaagaccctgacggggaaaaccatcacgttggaggtggagtcctcggacaccatcgacaacgtgaaggccaagatacaggacaaggagggcatcccgccggaccagcagcggctcatcttcgccggcaagcagctcgaggacggccgcaccctcgccgactacaacatccagaaggagtccaccctccacctggtgctccgcctccgaggtggcgccaagaagcgcaagaagaagacgtacaccaagcccaagaagatcaagcacaagcacaagaaggtgaagctcgcagtgctgcagttctacaaggtggacgacgccaccggcaaggtgacccgcctccgcaaggagtgccccaacaccgagtgcggtgcgggtgtcttcatggccaaccacttcgaccgccactactgcggcaagtgcggcctcacctacgtctacaatcagaaggcgtaatcccatgcgccgctttgcttcacccgcctacctatcaagcattcacctgttggttactcgatttgaatatcatttagatctgtttgaggttggaacataaatgcagcagtagtttctgtcttattatattggtacctctgttactgagttg

SEQ ID NO: 1535 - DNA, 359 bp, Zea mays
  Clone ID: 700156764_FLI
gtttgtcaggagtaaaaaaagccaaagtttctcttggtcatctagtttgtgaaaatgacatggacgaggaagaggagtgatttcgagcagccttgaccttgaggatgcaatagaagtgcacttagatggttccacttccacctgcacctgtgtgttttgttatgctagtcttagtctgtacggcgatcttgaatgtaaagacaagtacaaagttgaatgtcagttctcatgtgttgcatgaatgaaaattctaagggcttgtttggtaggactctggctccctttaaaaacccctgtagctctgtctcatttgtagctcctccacatgagccacctcaatttctataaatcagtttctt

SEQ ID NO: 1536 - DNA, 1492 bp, Zea mays
  Clone ID: 700156775_FLI
ctatgatactgctatctatctatgatactactatgatactgctcctaattcttggagcttgagctggagctgtactaaacaggccctatgttaggtgcattgacaacaatggtgacagtttgctgttgggctttaggttctggagtctttacttggagacaactttgttccaaatgacacagagcttcacgccgatggtgagtactgccagattgtcacaggacctaacatgggaggaaagagttgctacattcgccaagttgcactaattaccatgatggctcaggttggttcctttgtaccagcttcatcagctatgttgcatgttgttgatggaatttataccagaatgggtgcatctgacagtattcaacaaggaataagtaccttccatgaagagatgaatgaagcttcaaacatactgcataactgctcatctcgatccctagttatcatcgatgagcttggtcgaggcacaagcacacatgacggtgttgctattgcttactctactttacactatcttctcaaagagaaaaaatgcattgtcatttttgtcactcattatccaaagatccttgatatacagagagaatttgaaggttctgttggggcataccatgtttcatatctagccactaggaagcttttggaagtgactggtaaacaggtggaaactagcccagaggcaaatgatcttggagaaattattttcttgtacaaacttgttgctggagcttcagatagaagctttggacttaatgttgccctgcttgcacagcttccgtctagatgtatcaagagggcatccgtcatggcagccaaactgcaagaggagttaagtccgcgggaggaaatcaagcttcggaggacaacggatgcacaaactgtggacggaccatctgaaagttccgcagaagttggtttgttttgtgcacatccttatcaacgattggcagaaacatgtcgcaggatactgctgaacatcacgttggctcaaagcaataatgatgtaacgaacacacttccttctttgaaaaatgcacaggaaattgcacagaagacgatatgatgcagcggtccatttgacaactgacatattcttcatcagtgtgaagggaacttatcaggtatcatgtaccttttttttgctacggaggatccctaatggtggtaagcattttgctggagccgtttgtgtaacccatactctgccaggatagcgtggttaagcattttggtcacaactcaaagcagtgcctgtgtgtagttggagtgaactccgtgatatatactggagtacttagggcatgtttggttcgttaccccaattgccacactttgcctaacttttctgcctaaggttagttattcaattcgaacgactaagcttaggcaaagtggggcatagttagccacaaaccaaacaagcccttagtatgtaactctatattccgttcattaatttatctagaactcgtttcgttgatgt

SEQ ID NO: 1537 - DNA, 959 bp, Zea mays
  Clone ID: 700156788_FLI
ctctttcttccccacgaaaccagagcaaattccggcgagccggtgcggtgcggcggaggaggccgagggagacgccggcgcgagaaggagcatcaggaggaggcagcggagatggatccggactcggtgaagtcgacgctctctaacctggccttcggcaacgtcatcgccgccgccgcccgcgacctccaaaaagaaatggtggctaaagacaaggctcaagcagcacctgcaagccatgatgaagttgatcttgatgagctgttggatgacccagaacttgagaagttgcacgcagagagaattgctgcccttaagaaagaagttgagaagcgtgaagtgctaaaaaggcaaggtcatggtgaatacagggagataactgaaggggacttcctcggggaggttactggcagtgaaaaagtcatatgccatttttaccaccgtgaattttaccgttgcaagatcatggataagcatttgaaggcccttgctccagtctacgtgggaacaaaattcgtcaagcttgatgctgaaaatgctccattctttgtggccaaactggcaatcaaaaccttgccatgtgtaatattgttcaagaagggtattgctgttgaccgattagttgggtttcaagatctcagaagtaaagacgattttccgacaagagcgttggaaaatattctcaagacgaaagggataatcgatgagaagaagaaagatgacgacgatgacgatgaagaaagcgaggctaagaataggagggttaggtcctcaactgctcaagactcagactcagactgaacctgagatgagggactcactgtttttgcactttggattttgtttgtttgtttgtttgtttgttctgtgctgtgctgtactgtaattgatttgtgtaacggtaccagacaccacaacaaaaacatgtacaagagattctttagcagtggctgtctttt

SEQ ID NO: 1538 - DNA, 576 bp, Zea mays
  Clone ID: 700156851_FLI
tttcagatacataaggcctacggcagcacgaaccatctgccttcagctcatacttgctttaaccaactagacttgcctgagtacacatccaaagagcagctccaggagcggttactattggcaatccacgaagcaaatgaaggtttcggatttggctaatcagttatactcgtttgtccgtgccctgagaactgcaataggcgagcagcacgtgtgtggctgatcacattatgaactccacgtgtgtgatgagagatggccggagagaacatgtccaggatagacgaatgcccgtgggagaggtactactgttaagagagagagcgactattttgtgtttataatctttgtctgtttgtagtttttgccttacattggtcgttgctccgaagtttttccccttcttttcgttcatagactggtgtaagttgtaaccgaacattatgtcaaatgcaggtcatcttacgctggaatgttatacctcccctaatctgttaaaacaactgtaaattccgaaggactatttattctaatattattagagcgaaaattctctctttcgctctcccaaaaaac

SEQ ID NO: 1539 - DNA, 723 bp, Zea mays
  Clone ID: 700156870_FLI
acgacgtcagcaaggcgaccgggaagtcccgttcccccattattagtgtgatgacaaccaaagatagtggcagcagcttttctgtttttagcaagttgaaggcgctcatcagggacaaattcctggtgaagaagctgccttcatcgtgccagaggtccttgttaggcagcaaagaaacagcggcagtgagcgagctgctgcagatggtggtgtcgtcgctcctcttaacaccaacggaggtgacaggccccacgacgatgactaccgagcaagaagagttggccaggaaggcgatgaagccgccgggacccggtcgttgtgatggaagccatgcgtggcttcttccactccccaaaaggagcaaaggcatttccagcatgttttttagtgggaaatgggcatttctgacatccgcattggccatccgcgctccaggtccagggtgcaaccactgaaagaaaggacttccttctggtcatggctcgtgtaaaaattgaagtacggctctttataatgctactgcttaggaaactcgtatcgggtgccagtgcacgggacgcatagtctttcgtgcatcagacagttaacagcgggtgtataacgggagaaatgtcataattcgtatttattttttattcgtctttgtattaacacgtctgaagtctagccccctgttgtacatcgaaacacatgcagttcataaattgaaattttaatttatcc

SEQ ID NO: 1540 - DNA, 1099 bp, Zea mays
  Clone ID: 700156909_FLI
ttcggtattgagaatttgcgataccgatctgggagaagagaagggcgtcatgtcgtcgttcggacgcaattcatggtgtatcctcgtgctggcctccgtgctcctcctgtcctgcctcgccgacacggccgtggccaagcgaacaggcgagctcaccgtcttctggggccggaacaaggaggagggcacactgcgtgaggcctgcgacaccgggctctacaacaccgtcatcatctccttctacagcgtcttcggccacggccgctacgcccttgacctctccggccacccgctggacggcgtcggcgccgacatcaagcactgccagtcccagggcatcccggtcttcctctccatcggcggcgggggaaaccactactccatcccttcctccgcgtccgcggaggccgtcgcggacaacctgtggaacgcgttcctcggcggcggcaacagcgacgtgccccgccccttcggtgacgcggcggtcaacggcatcgacttctacatcgacgaccacagcgcaccgggcgaccactacgacgagctcgcgcgccgtctcgactacttcaacagcatgtactaccacgccacgacgaagtacgtacggctgacggcgacgccgcggtgcgcgttcccgcccgacgaccccatggcgcgggcgctgcggacggggctgttcgagcgcatccacgtccgcttctacggcgacgccgacaagtgctcgtacaagaacggcgacgtgtccggcgtcgtggaccagtggagcaagtggacggcgaggtaccccaagagccagctttacgtggggctcgccgcggccgagagcggcgtgccggaccacgcgccgccccccgttgaggtctacctcaaatacctctactacgatctgctgcccaaggtgcagaaggcgcccaactatggtggcgtcatggtctggaataggttcaccgacaacaggaccggatacagcggcgccgtcaagggctgggcggcttgcagctatgctggctgtgttaactaagtgcatagcgcatgtataaaccacgtaaataattcgtataaggtgcaagtataaataaacacaagagactttcgtgat

SEQ ID NO: 1541 - DNA, 736 bp, Zea mays
  Clone ID: 700156980_FLI
gccgccacctcaacccaggaacagagcgaggcgacgccgcggcacctcttctccgttgatattgattatttaggcgaagggaaatggcaaccgttccaggggatctgatctggcaggttgtgaggaagaacaactccttccttgtgaagcagttcggcaacggcaatgccaaggtgcagttcaccaaggagccgaacaacctctacaacatccactccttcaaacactcgggtttggcgaacaagaagactgtgacgatccagccagctgcaaaggactcggctgtggtcctctctactaccaagaccaagaagcagaacgcacctgcgaagctcagccacaagtctgtgatgcgcaaggagttccgcaagatggccaaggctgtgaaaaaccaggttagtgacaactactacaggcctgatctgaccaagccagctcttgctaggctaagctcggtgtaccgcagcctccaggttgccaagtccggtgtcaagaagaagaacaggcagtcctaagcgctaagtttgtgttctgtcagggggcacttgcaaaaaagaaagccagagagagaggaagacgaacatcactagtcagcactagattgtgtgttttatgttgagttgcaaattcaggtcctgatttttgtcctgccatgaaccgttaggcgatattgtattggaaaggatgcttcctttattgtttcacgatatatggcctcagaatagaaatttccatt

SEQ ID NO: 1542 - DNA, 644 bp, Zea mays
  Clone ID: 700157051_FLI
cgctgcctcgtgcaggtgtcgtacgccatcggcgtgccggagcccctgtccgtgttcgtcaactcgtacggcaccggcacgatccccgacaaggagatcctcaagatcgtgaaggagaacttcgacttcaggcccgggatgatcagcatcaacctcgacctgaagaagggcggcaacaggttcatcaagaccgccgcctacggccacttcggccgtgacgacgccgacttcacctgggaggtggtgaagcccctcaagttcgacaaggcatcggcttaaggttgggagtgtcactgtggacatgaggactaccttcctctggctctgctgttacctgcaagcattgctgctgctggatgtgtgtgtttgatcagtgactggctgctgctccatagaagatgaacggagagaaggatgatgaagggctttggcaatcgccgctgcaactgcaacccatgccatgccggcttagtgattgggtataatttggcttggcagcagccagcattattatgtgctgatctgttatcttttactagtttggtcgtccgatatctttctttctttttccccccttttcgactctgtactgaaactgctgagagattcgcagtattgttgtatcgtattcatatgctactgtt

SEQ ID NO: 1543 - DNA, 197 bp, Zea mays
  Clone ID: 700157149_FLI
tggttgtgggcttgtacacctgccgccagtcgtcgatcttggctacccctcactcaggaagaactgtttttctttacctgaagaaacaagaccacaggcagtggccctcgctccctgcttgctcaaaagcccacagctcatttacattactttgacgcttttatcttgaagtaactatacccgcatcacttctctgc

SEQ ID NO: 1544 - DNA, 755 bp, Zea mays
  Clone ID: 700157172_FLI
gcaagcaaaaggaagaaccagctgctgcggccggagatgtcgtcgcagctgatcgaggagcaccggtcgggcgcggaggtgcacgtcgggcacgagctgtgcgagcgcaagtcgcgcgagttcatggtggagctgggcctccccgacgggctcctcccgctgcccagcctggacgaggtgggctacaaccggtcgacggggttcgtgtggctgcggcaggccgccggcctgacccacaccttcggctccatcggcaagcaggtgtggtacgacagggaggtgacggcgttcgtggagcccgggcggatgcacggcctcgccggggtgaagagcaaggagctcctcatctgggtcaccatctccgagatcgtcctcagcccctccggcaccaagatcgtgttccgcacccccgcggggctcggccgcgccttccctgtcaccgccttccagctcgagcccgcggcggcggagggggaccacaaggaggaggccgaggacgccgccgccgccgccgccaactgatctgctctagcttccggcggcggcggccgtgcgtgggctgctcgatccggtagtggcagtggctttgtgagacagtcgagtcgattgtggtttcccctcctccgccatgtgcgtgtagtggatgatgatgcaggaataaacggtgtccctggatccagaactcacggttcgatccatccagtttatctcatgcttgtgtatctctatgtatgcattgcctgtttgttcgctgg

SEQ ID NO: 1545 - DNA, 882 bp, Zea mays
  Clone ID: 700157267_FLI
caagtacccaaacggctcgcgccctaaccgcaccgccgggaaggggtactggaaggcgactggggccgacaagtcgatcgtgcccatgggcagcaccagggcggcagggatcaagaaggcgctggtgttctactctggcaaggcgtccaggggcgtcaagacggactggattatgcatgagtaccgcgtcgctcaagcggaccacaccctggggaagaagggctcacataagctggacgagtgggtgttgtgccggctgtataacaagagaaacaattgggacaaggtgaaggtcgaggagcaggagttggaggcggcgccgcgccgacaacatcaccgacaaagtgcggaggattccatgtctgacagtttccagacacacgacttagacatcgacaacgcctccgagctacataattgctacggtaacaacatggtgcaagggcaggccatgaccgccagaaacgacattggcgtcgtgacggtgaaggaggacaacgactggttcaccgacatgaatctggatgatctgcaggcgtcctacaacatggcccatacggtgaatccgatcccggcccaaaccgcgaacctggtgacggggcaaggccatggctacttgcaaggctatggctacttgcagtacatgaactcaccgtcgatgaagatgtggcagacaatcctgcctccgttctgagtgtccacgatgaagagatgctcttgtacataagggggcatagaagtgactagactggaatagaaacaacatggtataggcttgtaacgtttattcatttgttagataatacgtatgtggttggtaataccaaaaaaatgcatctccctttgcactacttgaagaaagcacaaagttgtagttctcgt

SEQ ID NO: 1546 - DNA, 989 bp, Zea mays
  Clone ID: 700157378_FLI
ctgccagccatgtgcagtgctgcgagtggagactagagagaaaacagaagagaggagagggccggccgcggcctggccgaacggaaccggaggtagggtaggcgggccccacccccacaagctctacgctctacgctctgctctgctcttctctactcctgcgtgcgtggtctctttcctcccctcttcatccagatccggacccgaccgccgatccatccaaatcacccttccccttccaccaccaccaggccgccgcctcgtgtcctcaattctcctttcgaatttagaatccccgtgctgagagctgagtgctgccttggttgctccgtactggactcgattcctcatcgcagcagaagcatcccgtcccctccgcttctccttgctctgctctggtaacacacagacaaaaaaaaaatagcatcatgtcggaggtgaaggactccaatgtgcctgctgcacttgatggaaatcctcaacctatggaccaaactgaagacaattctatgccctcagcacagcaacaggaagaagcaatcaagaagaagtttggaggactaatgcccaaaaagcccccactcatctcaaaggatcatgagcgggcctactttgattctgctgactgggctctagggaagcaaggtgttgccaaacccaaaggaccgctggaggcacttaggcccaagcttcagccaacacgccaacaacagcaacaacgtgcaaggcgccctatttacacttcgtcagaaaacgaggacggagacggtgctggtgctgaggatatgaacatcaattgaagtggagtggaatgcctgctcagattggttgatgagcaagtcgtcactatatgtcaagtgctgtagtttgctttgcaattattggaggaattaaatgatcgtctgctgggttcatgagtcgaacatttgatatatatggcctattatttactactatatatttttattatctgtggataaacatttgat

SEQ ID NO: 1547 - DNA, 310 bp, Zea mays
  Clone ID: 700157393_FLI
ccttggtgtccctgtgtttgtgtttgagacactggaggttcagaatgcagtgttgatattttaccccctccggccacatgatttagtcgttttggacggagggagtagacgttattgagtcataataaaatgcaatgtgcacggtgggagactgggaggataggaattatagttgtttattacgactgcttactgcatccagattgtgttgtcccttgtctggtgttgcttctgttgcttgctgcgttgcagtgccggaggtgactccagatttcagaacttaaacatgattgcttgttcaagtgtgtgc

SEQ ID NO: 1548 - DNA, 711 bp, Zea mays
  Clone ID: 700157464_FLI
cggaacagagcgaggcgacgccgaggcacctcatctccggcgaagggaaatggcgaccgttccaggggatctgatctggcagattgtgaggaagaacaactccttcctggtgaagcagtttggcaacggcaatgccaaggtgcagttcaccaaggagcccaacaacctctacaatttacactcctacaagtactctggcttagcaaacaagaaaactgtaacgatccagccagctgctggaaaggactcggctgtggtcctctctactaccaagaccaagaagcagaacacacccgcgaagctcagccacaagtctgtgatgcgcaaggagttccgcaagatggccaaggctgtgaaaaaccaggttggcgacaactattacaggcctgatctgaccaagtcggcccttggtaggctgagctctgtgtaccgcagcctccaggttgccaagtctggtgtcaagaagaagaacaggcagcctacgcactaagcctgtgttctgtcgttggtgcccatagtctcagcttatatttatccaatgtctccaacagttttgagacttgttagaactagagcaaatcgtgttaagatgttgccgtttgtcattctatagcaagaattccatgacaaagattgcttggcacttgattgctgctttgtttgcaagctggctggccgggattacccctgatttttgttgggttctggaac

SEQ ID NO: 1549 - DNA, 792 bp, Zea mays
  Clone ID: 700157465_FLI
ctccacacgctccattaattcatgttatgaaggtcaaacctaacaaggtgaatttaataattggttctggtggaaagacaataaaaagcataattgaggagactggggtagatgctattgatactggagatgatggcacggtaaaaattactgcaagagacctaacaagcttagagaagtcaaaaattataatagctaatcttaccatggttccaaaagtaggagaaatatacagggactgtgagatcaagtcaatagctccatatggtgcttttgttgaaattgctccagggcgtgagggtttatgtcatatcagtgagttaagttcgggctggttggccaaggctgaggatgcttttaaagttggagatcgcatagacgtcaagcttattgagataaacgataagggtcaacttcggctaagttctcgagctttgcttccagacgtggattccgaatccaacataggttcaacaaaagaaaaggtgccacaaaaagatgatgtcataaaaatgacaacaaagagaccaaggcgcaagaaacagtctgagccgtctggagctgaaaatgccacaacaaaggctcttgcgaaaagcgctgctgctccagctggttcaaagggcagtgaagcgtagtaggatgtggacagcttggtgccttaatcagacgattgactggccaagctagggatacatccttcaaccgactatatgatggtcataggcatgagaaagagttcagacatgagggcacaactgtctaaacaggaatataatggagaagaattggttg

SEQ ID NO: 1550 - DNA, 884 bp, Zea mays
  Clone ID: 700157586_FLI
gcgagatcgtgcgcgcctccgagatctccacgaagttgtggtaacatggggctcaccttcacgaagctcttcagccggctcttctccaagaaagagatgaggatccttatggttggtctcgatgcagctggtaagaccaccatcctctacaagctcaagctcggagaaatcgtgaccaccatccctacaatcgggtttaatgtggagactgttgaatacaagaacattagcttcactgtctgggatgttggaggtcaggacaagatcaggccattgtggaggcactatttccagaacacccaaggccttatctttgttgttgatagcaatgacagagatcgtgttgttgaagcaaaggatgagctccacaggatgctgaacgaggatgaattgagggatgctgtcttgctcgttttcgcaaacaagcaagatctaccaaatgcaatgaacgctgctgagatcaccgataagcttggtctccattccctgcgccaacgccactggtatatccagagcacttgtgctaccacaggagaaggtttgtacgagggtcttgattggctctccaacaacattgcaaacaaggcctgaatggacaattctgctgtttcacggagcacatctgcacatggcgaggcatggtcattttgaccctcagacgatcattgtttcattggaaagtatcgtatttctatgctaggcttttcagagagattactctctaagaaactgatccgatattaagacactataattggcattggcactagtagatcgtttactgagtaatgcagtttattttaatgtatcccaattgtgttgtaagatacaactatgcgtcggaattacccattcaatttgaatctagatacgtagtttttgtt

SEQ ID NO: 1551 - DNA, 616 bp, Zea mays
  Clone ID: 700157645_FLI
gctgtaatacagatcaattacattgaattttaccatggcagctgaggaagatgtcaagcagaggcagatcattgaaaatcgtgccagaaatataagccacaatgttaggtgcactgagtgtggtagccaatcgattgaagattcacaggctgatgttgctattctcctaaggaagctcattcgtgatgaaataaaagcaggaaagagtgataaagagatctacaagaaactagaggatgattatggggagacagtactatatgcccctaaatttgatcttcagactgctgggatttggctttcgcctgtcattgttggtggtatagcagctggaatctgggcttaccaaaggcataggcaaaggacaaatgttcacattatggctctgaacctggtccgaggggtaccactgactccaagggagaaggagaccatgctagacatccttacacctccaccggctccaaggaaatggtggtggccaggcaaatgatgtagaattcatgtgctggacctggtagatgctcaaaaatggttaggatgcaaattacagtttggatgcatgatactttgatcgtgactttcagtttaaccaaaagcctgttcatttggatat

SEQ ID NO: 1552 - DNA, 653 bp, Zea mays
  Clone ID: 700157653_FLI
tgcagcttttgcagtgagctaccatgtccacgatgggcttcttccaggacacccgcgtcgtcggtggtggcagcagccggacggccaggtttctccagtaccagaggctggagtgctgggaggacgccggagtcgctcccagtcccaggtcccggtggcggtggccgtggctgccgacggagaatggtaagatggctcccccctgtttgttcaatgtcaagaggctgaagtggagcaagatcacctcggctctgatactaccaaggaaggttgctgagctctccgcaaagatccgtcacgccagcgccaggaccgaggccgccgccaccatctgcccggccgtcgtcttcgtgtcaccgtgggggcttcctgtgctctcccggccactcttggtcggccacaagagcaggtaccagtatcaccatggaaaggacacctgatgatgagctgagcaggtagtacccaatctgtattcctggcgatgattatatatgcggcgagctagttgatcttgtagtatgtgtagtaatcctcattttgattcccctgcgatgcttgtgtcatgcttgattgggccccttgctacggcatgcatgtcatgttgtgccctctatcaacatccgtaccaagcaaagcaattgctatattccatc

SEQ ID NO: 1553 - DNA, 579 bp, Zea mays
  Clone ID: 700157734_FLI
tgtgctttcacgtcatttgttgctgattgcactgtgttcttttcaccatccttctttcttccagcattcaaaccctagcgcgccgccaccatctcccgtttgatcacgccacaaaccgagtcaaagccgcttccttgtttttctccttcggttacgtcaaaaaaaacagaaacaaaaaaaagaaaaaagaaaacgaaagagaaaggatagaaccatagaacaaacaaaaaaagaaaggagaaaggatacaaagcggttgtctcatcttggtcgttttaaacataacttgaggtatcttccttaaaccgggcataacttttcgctcggttgttcaaaaaatctgaaatttttacaggagcttgttgacatcattatgaggccaaccaaacactacgacttgtttggtttcgataaaattgtcaaaaaaaattaggaaaataaagaaaacaattcgtcaaagctcttgcacgcttttcagagaacttgctctttttctgtagaccacatttgatctatgttttaggtaaaacttggtgtagctcctattttgttgctattaagctgttctttcaatcggct

SEQ ID NO: 1554 - DNA, 306 bp, Zea mays
  Clone ID: 700157806_FLI
caaggctgcaggtgtcgaaaaaggttcaaaagagccacaacggcagaaggtgggaaaggtaacagtggatcaagtgcgtgcaatagctcaagagaagttgccggacttgaactgcaagagcatcgactctgctatgaggatcatcgctggcaccgccgctaacatgggcatcgatgttgatcctccaatccttgtcaagaagaaaaaggtcctcttgtagtttgtttttgctggcaccaccagtgcccattttgagattatatgtgaaaggaccaagatgatcaaaagagtgaattgagtttctct

SEQ ID NO: 1555 - DNA, 774 bp, Zea mays
  Clone ID: 700157834_FLI
cacaaacagagacagcgttatggccatgatggaggcatttgtacatgacccgttaatcaattggcgtctgttcaatttcaatgaggttcctcaagtgtcgaactatggtaatgttcatgctcacacggttgtcagtagtgaagaagcagtggctaaccgagagctcatgcaacctcagcgaggagcacgtgagagggaacttctacaggctgtcaatcaactcggtgatgccaatgaggttttgaatgagcgtgctgtagctgtgatggcacggatgagtgacaaactaacagggcgtgacttctcttctgggtcagctttggctggagcaggtagctctatccaacatggcagtgagcatttggcttcaggagatgcccgggatgcccaacctggtctctcagtgaaggttcaggttcagaagctcatactccaagcgacttcacacgaaaatttgtgccaaaactatgtcgggtggtgtccgttctggtgagctctcttggaaacagtagcagtttataacatgtaaatattgtgaataccgtgtgcatagaagtttcgtggtgacagtttgtatgtgcagctttgtaattagcagaacttcaagatgccttggaccatccttttgtcagtttcttagaccgagtttagcagttcacccttatggccattcaaaacactgtttttttactgtagattgtattgtttgtagattgtactgttcgcagggtggattttgaatatgagtatgagaatgtgtaagctgttgaagat

SEQ ID NO: 1556 - DNA, 519 bp, Zea mays
  Clone ID: 700157842_FLI
caagcttctccaccgtgtcggctgctcctccctgcgtccatctcccatggcgccttggagtcccagctcggcctccttcctgcagccggttgtggttgcccctcctgcagctcgccgggcacgctcgccagcttccaaacacgatctcatcatcgtttcatgcgtcagcaagaaatcccaagtgttgggtgaagacggagccagcagcgtggtgttcaccgagtgcgcgacaaaaagctcgaacaagtcgtcgagcgtcatactcgtctacgccaagccccccaagccgtgaagacactctggtgttggccacgtgtcacctgctcgacaaaaaggaattccatgagtatctagtcaagagtagaaattgtgtgcatcgctcgtcagacgtgtgtgatcgaagacatcaaccgaaaaccggcatcatgtgtaacacccctggtgtttatattccgctcgacaacgagtatgaatttaagcacgtaatcagtggataaaacggatgccaaaattttcttc

SEQ ID NO: 1557 - DNA, 502 bp, Zea mays
  Clone ID: 700157846_FLI
gagagaggctgtgcactggactcagcctgacaaacaggaacaggggcgggcagggcacccagacccagcaaggccaaactgccgccggtagccgacacagatctgaggcgagcccggtccagcggggccgcgcagccgcacggagatctgtgactgtgagcttggagtgcaagggagccagccgccagcgaggaagaggccgatgccgagctggatggaaccaaaaggcattgcgttgcgtcctctcatctgatctgatctcatgactgaccagtgttccatttgagacgacggtgctctgatctgctcgagatcctccaggatacaatacatacgataagagctgcgagcgcataccaatgccaaaatggccagaaccaaccacttttcatgttgctgcataagcataactgcacgcgtgctgtagataattacgctgttctgttcgttgtacactcaaccgcgtcgctgtcgaaccatacaattgtgagtgcatagcaac

SEQ ID NO: 1558 - DNA, 701 bp, Zea mays
  Clone ID: 700157878_FLI
ccgttccgctcggaagtctctctaccaccttctccccattccgctgttccgccctctcgcgtcgcgtgcctccaggtccctcctctgcgtaactgggtggccgccgatccgccgccaccgccctgcgtcaggtgttccggtgacaagcgtccacctgcaagatgttggaataccaaaacgcaattggggggagactgaagctgaagggtaaagcgctggacgtaaaggatggtggggtgaagaaaaagaagaagaagtaccagcgtgaggagtcgtctcagattgcgcacgatgagctccacaaaggggggagatctgaatcaccaattgatcccaacaatgagcggattgaatctgacaagaccggagatgaagggaacccacatcctgactatggccatctcacaccagcagagcgacgctacatggaacagaagcagaagatcgacatgcagaagatggccaaagtcgccaacaagtcccatagagaccgcatccaagacttcaatcagtacctggcaaacctaagcgagcactacgacatccccaaagttggtcctggctaacatagccaaactggctgtgttacgcacaacaattgtgtgctgggtctatccatttatgttagcatgttatgtatcgtttaaaacgatttgttgccaccagaaattgatatttaatttcaaaagcatgttccaact

SEQ ID NO: 1559 - DNA, 1142 bp, Zea mays
  Clone ID: 700157894_FLI
ttaaccataccctctgccttggtaattttatccggaactctgctaaaggaggttcatatccccaactttccatacgagcaggcccataagaagttcgtagaagcaagtggaaaatgttaacagctttgaaatgtcctgaagtatggcgaccatgtgtttacatgtacatatcacttgcgttgagtgtcgacatccaagaaggaatgttcttctggtacacggaccaaagcgcagggttatcttttcatgagggatttattggcttcatgttcgctattggatcagttggttctcttgtgggtgttatactttatcagaatattcttaaggaccattcctttcgaagccttcttttttcaagccagctgttgctaagcttggcaggaatgcttgatctgatcttggtgcttcgactaaatcttaagatggggataccagattactactttgcggtgatcgatgagggggtctccaaaatgatcaaccgtatcaaatggatgcctcttctagtgcttagctcaaagctttgccccactggcattgaaggcacattctacgcattgctcatgtccatcgacaacattggctcgttaactggatcatgggttggtggattgctccttcatttgttgagaatcacaagaacagaattcaagaacctctgggccgcaatcttgattcggaatatgatgaggctgctaccactggcgctgctgttcttggtgccaagaagtgatccgaattccactcttcttccatccgatttgctgaatgagggagatgatgatgaagctcagcgagtagagaatgtcgagttaacttctctccctgcaaacagaaattcttgcgatggtaaatctctccatgacggagaacgggatgacgatgaagcttcacttcttgccaacaggagttgatactggattgaatatggagatttttcttttgtacacgagcaaatagataaaatttagaaaaatctttgacatttgtttactatagatactcatttagatgttcacgttgttaaattcattgaatttgcagcagggtagcgaaggcttgagagaagatactggggatgctttgagctggatttcccatataccaaaactataatggatcaaactttactaagtgtg

SEQ ID NO: 1560 - DNA, 1017 bp, Zea mays
  Clone ID: 700157909_FLI
ccgctccacaggatcctctgcgccaccgcaaccgtgtgaccgcccgtgccgccggcgatcccgatccgccgacccgtcccagccccgctcgcagccatgtcgccgtcggagccgacgcgggaggagagcgtgtacatggccaagcttgcggagcaggcggagcggtacgaggagatggtcgagttcatggagcgcgtcgcgcgctacgccgagtccaaggtcttctacctcaagatgaagggtgactaccacaggtaccttgctgagttcaagtcaggtgcagagaggaaggatgctgcggagagcaccatgaatgcctacaaagctgctcaggatattgctcttgctgatctggctccaacccaccccatcaggctcgggcttgctctcaacttctcagtgttctactacgagatcctcaactcccctgaccgtgcttgcaaccttgcaaagcaggcctttgatgaggcaatctccgagctagacagcctgggagaggagtcctacaaggacagcactctgatcatgcagctcctgcgtgacaacttgaccttatggacttccgacaccaacgaggacggcggggatgagatcaaggaagcagctgctgcccccaaagaatccgcccccgagggccagtaagacggatccgatctcccgacctgatgcgtgtctgctgatgtcggggagtttaccaggactgtgccgttcttgatttctgatagcttatcttctagtacacctcgtgttgttctcttcgtcacggcgccggtgcgcgtgcgctgaagctgcctgccattgccattgcctttgccgctgtttttaattaagcacacactctagatgttatgcccgcatgctatgtttcgattctcaagttgataaatgatggctggatgctggttttcgtgctccaagcctgctgcttcttccagggaaaaaaagacctgcccttgttgcagcgttgttgtttagaatgacctatatttgactggtattctgttacggtggctttgc

SEQ ID NO: 1561 - DNA, 764 bp, Zea mays
  Clone ID: 700157911_FLI
gccaccacctaccagacagaggctggaagcgacggcgctgccggagatggagacggagacggaggcggcagcggcgaggcgggcgaaggagtctctggagctggctttccagatgtcccagatcctcgacaccggcctcgaccgccacaccctgtcgctgctcatggcgctctgcgaccgcggcgccaaccccgaggcattggcagccctcgtccgcgagctctcctctgctgctcccccaacctccgccgcggcttcctctaccgtgagcaacggcgccgcggggccggcctcggcaattgcgcccacgttctcctccggccttcgccgtccctagggtgctgctaaaaagtctgaatggaaccggtgtagttttccaagcaagacaagatctcgctgctggaatcgctggatgaaaaggattgcctttacaattccatgtgcgcgctgctgtggtggtgtggttcgaccacaaaacatgtggctgggttcatagagccacagaaatacacgcgcggcgcatcctctcacgacttcttgggtttaaaacagctgtatgcctgtataatcttgtggattgaggagtcattgtctcttgacgcccatgattggacatttggacagttgcttgtatcagttccacgcctggtccttcgttaaattattctcgctttgacgccacagccttttgcactggcatgtgcttatcctctgagggaacgtgccatgtctacctttcctgcagtgacttctttattatctct

SEQ ID NO: 1562 - DNA, 504 bp, Zea mays
  Clone ID: 700157968_FLI
cagggtttgtatgaggattccattcgatactatgtaagggcagttgcaatgaacccaaaagctgacaatgcctggcagtacctgaggatctctcttagcaatgcttcgcgagcggacatgattgctgcatgcgacgcccgcaaccttgacgctcttcagaaagagtttcctctgtgagccctccggtccaaggcattagagcttccatggaaggaagcagcacactagcaagccgagtgactgcacctgtggtcatggaaatggaattggaaaccagtagcgttttgtatttgcctgttgattcttatatttatttttaggaagtgggggaatgtgtagcaactaggaagcgagggaacaacatccagttgatgtgaagcattcatggcacagtaggcaatagtggcaaaggggtactatacatacacacttacgggacgcacaacataaataaagaatggttgattaataaactatttattttggggacacacccctaggatc

SEQ ID NO: 1563 - DNA, 1287 bp, Zea mays
  Clone ID: 700158019_FLI
ctcatccgtacccgagcactgcacagcacagcacagcacagcacaccacctttagtatatagcaatagcacactcggcccccctcctcttcaactcccccggccgtcctgctcgccggcttctggctggcccctgcatccgcccagtgtgtgtgacctcagggaatcgattcgttcatccaagtgaaggcaaccagactccaggatggagttcaaagccggcgttttcaccgtggcaatgctagccatcgtcgtgctctccacaccagcagccccgcagaagcccaagagccctcccgctccgcgatccccagtcgtcctggcgccggcgccagcgcccgcaccggcggcgccgcaccacgtggacctcgcggacctcctcagcgtggccgggccgttccacacgttcctggactacctgcagaagaccggcgtcatcgagaccttccagagccaggcgaacgacacgaagcggggcggcatcaccgtcttcgtgcccaaggactcggcgttcgcggcgctgaagcagaccacgttcgccaacctcacccaggaccagctcaggtcgctgctgctgtgccacgcgctgcccaagtactactcgctggccgagttcgaccggctgagcgcgctcggcccggtggccaccctcgccggctcgcagtacacgctgaacctcacctacgacatgggcaccgtccgcgtgaagtccatgtggtccgaccccaagatcagcagcagcgtgtactccacccgccccgtcgcggtgtacgaggtcggcaaggttctcctgccgatgcagatcttcaagagcgaccccccgctggcgcctgcccccgctccggcaccggatgccaaggcatccgacgtcgctcccagcccggcgtcggggaaatcatcagcgagtgcgaaggcgaaggagaaggcgggagagaagagctcgtcgtgccgagccggtgtcgtcgcccattacttggcgatcgctgtctccggcggcctggtgctcttgtggtgaggatcgacgagttcgtcctcaccgtgtgtccgtgtcgaaggagcaagtacggggttcagcttagggccccccgtgtttaatttatatatgggtgtttatggattcattcttttggacatatggtaggccatttgtgtttaggactgagctgttgttgagtgtttgcgtcatatgcttctactaggtgtatgcccgtgcgttgctacgggaccaacatgtattgctaagatacattaagataagaaaacactataataaaatatattgatatac

SEQ ID NO: 1564 - DNA, 478 bp, Zea mays
  Clone ID: 700158052_FLI
atcgcgcagctggagttcttctacgaagaggcgccggaaaccatgaagagcacgtgcacgtcgctcgcgctgctcaccatcgccctgggcagctacctcagctccttcatctacgctatcgtggcagcattcacggccacggcggacagtcccggatggatctccgacaacctcaaccagggccatctcgactacttcttctggaccatggccgccatttcaacgctcaacttcgtcgtgtacagcgtgttcgccaggaactacaagcccaagagtcaagactatgctctcatgacgtgactacaaacagctctgctcccttaatttctcgtctggtacattcgactcggttcctgtgttgcatgtttgccaatttgtggcttgcgaagggtaatttgcgagttcttgttcaaccgctagtgcgtctgtcaatatgagactgtacataacatatgtatggtaagcaggattttcccct

SEQ ID NO: 1565 - DNA, 507 bp, Zea mays
  Clone ID: 700158183_FLI
tgaaagacagggcaccggcagcgacgatgtcggggcgcggcaagggcggcaaaggtctgggcaagggcggagcaaagcgccaccgtaaggtgctccgtgacaacatccagggcatcaccaagcccgcgatccgtaggctggctcggaggggcggcgtgaagcgcatttcggggcttatctacgaggagacccgcggcgtcctcaagatcttcctcgagaacgtcatccgcgacgccgtcacctacaccgagcacgcacgccgcaagactgttaccgccatggacgtcgtctacgcgctcaagcgccagggccgaaccctctacggcttcggaggctaggctggatgcctcttctccttgctgtcgtggatgcctgtttgttgttagggttacttcgtttagttccttgtctgtgacgtgttggactattgttagtagtattcttgaagttgtgtttcgaatgtaatccaatcttatcgttcgagaattgaaatgattcctgggcaac

SEQ ID NO: 1566 - DNA, 1641 bp, Zea mays
  Clone ID: 700158261_FLI
ttcaaaccgtcgccgccgtcgccgagagagttgtgactcccccagcggcggcctgcgaccacccgttccccagtcgtctcttctctccagaccgcatttgcgcccgtcccgtcccctcccctctccctcggcgaggtccgagagcagagctgcctcgggagggtcgtagtccagtccacccgtccgctgcggcggcggttacgaggcggggaattccggcgcgggttgccgcgatccccgcagtgatgtgcggatcgggtcatgggtgtgacccagccgggaagtagtggaggctgctggaggactagggccgggacctgcggccacgacgatgtacgtcgcccgggagtctaccaagctgtggaggagggtgtgcgcggagacgacagcggagctgcagcttctgttcgagaagtggcaattgctccttgcagggttggtgtttcagtacatccatggattggctgctcgaggagtgcattacttgcatcggcccggaccactgctccaggacttgggatttatggcccttccagagcttggccaagagaaaggttatcttagtgagagcttattcactttcatcttcatttccttttttctgtggagttttcacccttttgtttatcacagcaaacgcttttacactgttctactatggcgtagggtgctggcatttctagtggcttcacagtttttaaggattatgacattctattccactcaacttcctggtcccaattatcactgtcgtgagggctcaaaactggccactctcccaccaccaaataatgcacttgaagtgctcctgattaactttcctcgtggagtgctttttggttgtggcgatctgatattttcatctcacatgatcttcaccctagttttcgtgcgcacgtaccataaatatggctcaaacagattaattaagctcctttcttggctgatggctataattcagagtcttcttataattgcttctcgcaagcactacactgtggatgttgttgttgcttggtacactgttaatttggttgtgttctttgttgataagaagctgcctgaaatgccagatcgtacaaatggattatctttgcttccagtaagcacaaaggataaagacgggaggatgaaggaagaactccataagcttgagaaggacgggaggatgatggatgagttccataaattattaaatggaaacactgtcgatgctacagattggcgacaacgagtgcagatgaatggaaagcatggagaagacacgaaccacactgtctctgatgccacccctactggaacatgatcagtagcttttctttgttatatcgtttttaacatccacaggggagtctgcgatgaaaaaggaaattgcgtgttgtgcctctgtatctgaaaggcttctcaggtacccgcaaggctgcaacatcatatcagaatgttttgttgtgctctccatggcacgatgacaggaaaaaacgaggtgttgaagtagtggtagaaactaaatcaggatctcttcgcttttctaagaggccgcagctacagttttgcatccttcagacatttcaaaaacgacggtactagagagaaatttatgtttgatgtaaatgttgattagattcagctagtcctcactac

SEQ ID NO: 1567 - DNA, 682 bp, Zea mays
  Clone ID: 700158310_FLI
cacaaattaagtagtggagtgtcagaacttgggaggcacaaattaagtacaaagcagtctaattaatgacgggcccgatggagattccggtgatcgacctcgccgccgccgacctctacgaggacgacgaagaggaggcgctcgagaaggtcgccgacttcttccagtccaagtacttcaagccgggctccgtcgtcaccttccacttcccggcaccggcctccgcctccccgggacccgcggcggagatcaccttcgcgacggagggcaagggcgacgccaggatcgcggtggagaacgggaacgtcgccgggatgatccagacctggtacctcggcggcgactccgcggtgtcccccagcaccgtccgcagcctggccaaccgtttcgccgcgctgctcgccgtcgccgcgtgatttataccggtcggcgggccggttggtcgagttgcgttggatttgagttcgtgaatgtccgtcctgtacgcgtgttgtctcgtgtgtgttgtcgtttgcagcgaatttgcaagtaataataataaaaattatgtccggtaggttgtgcagattgtcgttgtggaaactgtaatatgagatagaaaatttgacggtctctcgacctcgaatccatggatcatggatgcactacacttctcaataaacgctcttcataattttgcctc

SEQ ID NO: 1568 - DNA, 219 bp, Zea mays
  Clone ID: 700158338_FLI
accttgcttataacagcttgaagggtcttatccttagcaaggctttgatggctcagaaagatgccgaagatgaaagcactcggatagccttcgaaaacctacgctcggaagttatatcacttcggaatgaggcccttgagaaggacaaaatcttgctttctttagttgagaggttaaagtctagcgacgctagattggctagtctttctgaagtggaac

SEQ ID NO: 1569 - DNA, 487 bp, Zea mays
  Clone ID: 700158360_FLI
cgcctacatcctcacgcaccccggcaacccgtgcattttctacgaccacttcttcgactgggggtttaaggacgaaatcgccgccctggtggcggtgcgcaagcgcaatggcatcacgccgacgagcgagctcaccatccttgagcacgacggcgactcctatgtggcggagattgacggcaaggtcatcgtaaagatcgggtccaggtacgacgtcggccatctcatcccggcgggttttgaggttgccgcccacggcaacgactacgccgtctgggagaaagccggcgccgaacaagtgactcgagcataatagagtgctcgagataccgatttgattctcagtacaatgtacacgggactgcattgataaaataagtggtttctcctctaataagtaagggagcgtaaaagggcaattggagccatgcatatgtaaccttaaaatattgttgagtaaaatataaaggtgatccctaaattctcc

SEQ ID NO: 1570 - DNA, 637 bp, Zea mays
  Clone ID: 700158369_FLI
acggcgcgcggcgaggaaggcggagtccggcggctgacggagggcgagtggatcgacacgatgcccagctggtccccggacgggagtctgatcgcgttctcgtcgaaccgtcacgacccggcgaacccggccgtgttcagcatctacctggtgcggcccgacggctccgggctgcgccgcgtgtacgtggccggggcggagggcagcgcggaggcggacaaggagcggatcaaccacgtgtgcttcagcccggactcgcagtggctgctgttcacggccaacctgggcagcgtcgtggcggagcccatctcggggcccaatcagttccagccgtacggggacctgtacgtgtgccgcctcgacggatcggacctgcgccgcctcacctgcaacgcctacgagaacggcacgccggtgtgggggccagcaagcgccgggctcgggctggagtcgctgtccatgggcccgcccgccggggaggacgccttgggccagttcgacgagccgctgtggcttacctgcgacgtctgatggtccttttgtaattaataatgtaagaataatgacgctgcattgctgttgaggacggccttttgtttgtttcgttgctgaataaaaaaggacgtgctgtacgttc

SEQ ID NO: 1571 - DNA, 1288 bp, Zea mays
  Clone ID: 700158374_FLI
cgacccgtcccacgtctccattggcccgtaccaccacatcaagaacccaaagctcgtcaggaagcaggacaagatccggagcctcaacaccgttatgtcggcggcggcgagagtcgacgttgagtcctacatcgatgtggtcgcgggcatcgaggccaaagccaggagctgctacgccaacacgttcgataaccacatagatagcaacgactttgtgcgcatgctgctgctcgacgcatgctacgtgcttgtcaatttcggcggcatcggcggcggcgggcaccgcggcagcgacatgatggaggacgtcggggtggtgcgcgacgtgatctacctcgcggagaaccagataccgttcttcgtcgtcgacgagatccgcaagctcaccattccggacggcggcggcggttctgcgcctgacgcgattacggtctacgtccggaatctcctgcgggagctgcagtactcagtggcgatgccggcggtggctgagcctccggggccagacaaccttctgcatctgctgcacatgcacctgatgcccaccgtcgcactcccgtcgtcacgatcgaccgtaggcaccggcaagccgcgtcggttcggccggtggcgctcggcgacggagtactactgtgccggcgttggattcaggagccggcctctcggcggcaaaggggctcgctcaatcctcgaggtgaagctcgactactacggccgcacactggagatcccccacctgaagatcgacgccgagacgtcgcggctcctgcgcaatctgatggcgctggagcagagcaacccggaggaggtgggcagccacgtgacggcgtactgcgtcttcctgtcgcagctggcgggaacggtgcaggacgtggagctgctgtccaggcgagggatcatcgcgcacggcctcggcagccacaacgaggtcgccacctccctggcgaacctctgcaagggcatcgcgttcgggggcgacgaccccgagagcaactaccttcgtgcgacatgggaggggctggaggagagcttccggagccggccgcgccggtgggcggcatggctgatgctcaagtacttcaggaacccgtggctcgccgtggggctggcggcggccggcgtggggctggtttgtaccgtggtgcaagcagtgtacgctgttttggcttacacatcaaatccttagcaggaattcgtagtcaaatattgggctgtgctgtgctgtgcttgtgaaaaagtagtcaatattggtgtgcctagtacgtccagcaatgatttcgttactatt

SEQ ID NO: 1572 - DNA, 513 bp, Zea mays
  Clone ID: 700158450_FLI
ggcggaaacgccagttcagccacgtggagagggcagatccgagaagagccggcgcgatgagctcgccggcgaggtcgaccatctcggccgccgaagacgtcgctgattccatcgacgcgctctaccgcaaggacgaggccctggctgaactcaagtctgaggtgatggaggcgctgcagagggaggtgaggtctctcgacgaagacaactggatgttcgccgcaccgcggtcccgcatcaacctcgtctccaggcctggtgcttacctgcccaagcaaaacgggaagctctcagagttggggcaagcatccaagaaaacaaggaacttctagggtgtacatgcttgtgcttgcaagaagcctggtccatgactccatgatggtagtgaaggctgtagcatcaaggatgatttgttcatgtttcaaatcaatctggttgcttcctgctaattcaatttcagacacatgtaaggatttttcaagtgattgtgacttcaatgtcatggtattgttt

SEQ ID NO: 1573 - DNA, 716 bp, Zea mays
  Clone ID: 700158512_FLI
gtcacgccctacctctccctccccacgccggccaatcttctactcatcgtggctctagctgctcctcttgccaccacactatcttccaccacagccacctacaatccactcccccatcagccaatccgctcgatccggagaccacaatggcgcctgggcttaaagctgcagcaaaatcaaccaaaccatcagaagtgccactaacagaatatgacaaattgagagccgagaatttgatgaggaataaccaaaagttgcaaagattcgatgttactaaactagcgtcaatactaaccatacttctgcaaagagcaaaggtgacactcgtgaaaaatctggatctttgtatgaggtctatgaaggtgaaggttctgaagatgaggaagtcaatcagtgtgcaacaagacaaagaaacaaattaaagagggtcttggcacatgtgcaacaagatgaacctacaagagtgactaggtagaatacaagggatttggctttaactttcagtccagaactgcaacaagtcaaaaccttaggcctctctactgccacatccacccctccacagggccagaacaactccagtgatcaagcttcttatgatgatgcaaaagtgccagacatggaggaaataactgagatgatgaatatgttgtcgtaatcattgtcctacatgggtggtgttctaatgtcatgttgcttatgtgttgcttatttct

SEQ ID NO: 1574 - DNA, 563 bp, Zea mays
  Clone ID: 700158526_FLI
ccatgatgcccatggtgtggatgcacccgaggacgttgagaaaatcgaagcactgatgcgaacgagaaacattcagtagaaaacgaagagaaagcaagtgctttgcattgctatcggcgttggcttggtgggatacttttggttgtgctttcccgtcttctgaatagcatgataccaagtgaagttggtgcatcacttcttgaagttttgtgcttgctaaaacgttcagtgattggatatgtcacttgcattagtcctcaatcagcagttcagcgcgcaggtggattgtatctgtacttcagtagttagtagcattactttcagtcttctttacattgaaaaacaaatcgtttctggagatgaagcaattggacagtgtaaaacaaaaggctaaagacccatccatgccgcgaggcgtgattgatataaggccagactcatcggaactttcattagacttccatttacatgtaataagttttcatatatacaatgttgatgatgtatacaattttaatgacgtgacggtgtttttttttaaaaagtgaaaattggttttaaac

SEQ ID NO: 1575 - DNA, 1296 bp, Zea mays
  Clone ID: 700158577_FLI
caccgccgccgggaacttgttcatcgagccgagaggatagatagatagatagatagatagggtaaccgatcgaatccgccaaccaaacaatggcgtccgacggcagtggcgtggtgacggtgtacggcaacaacggcgcggcgctgctggagccgccgaagcagcccaagtcgtcgactttctccgtgaaggtgggcctggcgcagatgctccgcggcggtgtgatcatggacgtggtgaccccggagcaggcccgcctcgccgaggaggccggcgcctgcgccgtgatggcgctggagcgtgtccccgccgacatccgcgcgcagggtggcgtggcgcgcatgtcggacccgggcctgatccgcgacatcaagcgcgccgtgaccatccccgtcatggccaaggcccgcatcgggcacttcgtggaggcgcagatcctggaggccgtgggcgtggactacgtggacgagagcgaggtgctgaccccggccgacgacgcccaccacatcaacaagcacaacttccgcgtgcccttcgtgtgcggctgccgcgacctcggcgaggcgctgcgcagggtccgcgagggcgccgccatgatccgcaccaagggggaggccggcacgggcaacgtcgtggaggcggtgcgccacgtgcgctccgtcgcgggcgccgtccgcgcgctccgcggcatggacgacgacgaggtgttcgcctacgccaagcgcatcgccgcgccctacgacctggtcatgcagaccaagcagctggggcggctccccgtcgtgcagttcgcggcggggggcgtggccacgcccgccgacgccgcgctcatgatgcagctcggctgcgacggcgtcttcgtcggctccggcatcttcaagagcggcgaccccgcgcgccgcgcccgcgccatcgtccaggcggtcacccactacagcgaccccaccatcctgaccgacgtcagcgcggggctcggggaggccatggtcggcatcaacctcaacgacccaaaggtggagcgatacgccgccagatccgagtgaacacttccctttcctactccacttatatttatcagtatcatctccgctccgccggctctgccaacaaatttttttgcactgcatgcagtagcttaagtaataatggaatgagtgaatgaaatggtgagaaacgaagctagaagctctgtaattttgtgccgttcttataaagtttgcataggctcccctggattatgaatcagtcactcagcctgcttatgacttatgaatcacatgctcttcatctggtcgg

SEQ ID NO: 1576 - DNA, 625 bp, Zea mays
  Clone ID: 700158854_FLI
catgaggaggatcatgtgaatgacccacaggaggcatggcaagaggttgatccagacgagtactcctatgaggagctagttgcattgggtgaagtagttggcacagaaaacagaggtctctctgctgatgcacttgcttctttaccttcagtaacatacaagatgcaaagtgttcaggatggcaacacagagcaatgtgtaatttgccgtgtggaattggaggagggtgaatctttgattgcacttccctgcaagcacttataccatcctgaatgcataaaccagtggctgcaaataaataaggtatgccctatgtgcagtgcagaagtatcaacctccagcaacaaggagccatgattgctctcggatggccatcttgggcatttgatgggattaactagcggcaccactgcagcatctttatgcttcaagcaaaagcataaaggaacgtcttacatacatgcaaggagatcaggaaataatcctcttgtcaatctaaagttttgtcctggttttctgctcactggatttattggccctgcagcttatatggtcttagttcccttcggacgccttatgatccataaaacatgccaattatattatattgttagttattcttttt

SEQ ID NO: 1577 - DNA, 706 bp, Zea mays
  Clone ID: 700158908_FLI
tgaggaagcacagcgaccgcaaggactgctggctcatcatcgccggcaaggtacgtatatttcgtcaccggccgacgatcgactccgaccgtgtttgacgcccccggcctcgctcctgctgctgctgctctgctcaggtgtacgacgtcacgccgttcatggaggagcaccccggcggcgacgaggtcctgctggcgtccgtcggtaagtaaagtagtctcagactccagaccggtggtggtgactggtgagttggtagcgcttactgatgatatgtccacgactcaccgccgccgccgccgtcttcgtcgtgcgtgcgcaggcaaggacgccaccgcggacttcgaggacatcggccacagcgcctccgccaaggagctcatgccccagtactgcatcggcaaggtcgacgcggctaccttcccggccaagcccgcctacgtcgtcaccaaggacgacgccaggtcgtccgagaaggccgcgacgagcgccggcgcttgggccacgctcctgcagctcgccgcgcccgtcctgctgctggcgctggccttcgcgctgcagcagaactatgccagggccaaggcggagtagacaagatacagatagataccatcgttgattccgctgagtcgcggccgtgcggcctctttggaagcatctgaattacattttcttcctggcaaaattaactactcgtggtttcgtt

SEQ ID NO: 1578 - DNA, 636 bp, Zea mays
  Clone ID: 700158919_FLI
acaagggcgagaactgcagcatcacgctaaccggccacagcctgggcgcggcgctctccacgctcaccgccatcgacatcgtcgccaacggcctcaacgtccggggccccaacaacgacacggtccccgtcgccgccatcgtcttcggcagcccccgcgtgggcgacgaccagttcaagaaggcgttcgactcggcgcccggcgcccggctgctccgggtccggaacgcgcccgacgtcgtgcccaccgtcctgcccaacgccttctacaaggacgtcggcgtggagctgctgctggacacgcgcaagtcgccgcacctcaagaggcccggcccgggccccgccgcctggcacaacctcgagtgctacctgcacggcgtcgcgggcacgcagggcgccggcgacgccgccgggttcagcctggaggtggaccgcgacgtcgcgctggtgaacaaggaggtggacgcgctcagcgacgactaccccgtgccggcggcctggtgggtggaggggaacaagggcatgaccagggacgccagcggacgctgggttttgcaggatcatgaggagggtaacctcgctatgtgatgattttgataacttcattaaagatggttattaatgaattaataatacg

SEQ ID NO: 1579 - DNA, 722 bp, Zea mays
  Clone ID: 700158922_FLI
tgttgccagatcccctgatgtttagctttaagcttgttacgaatggaactgtggtcaatgtcgattctccaaaggattctggcaatgttctgaggtgcaaagatcctatatctgctcatgaaatgacccatatggaagttcagattcgcaacaacacaaaggaaattatccggatgaaccttagcatttcatgcaaagatgttgctggagagaattgcttcgatgaaaatagtgctactgtcctctgggctggtgttcttagcgatatacacctggaagttccaccgttgcaagaggtggtacatcctttctccatgtatttccttgtaccgggtgactactcgctccaagctgcttctgttataatcgatgccacagacgttcttcgtgctcgtgcaaaggcggagtcaccagatgaacctatactgtgtcgcggatccccattccatatccgggtagtcggtacagcataggcagttcttctgagttactcctagtctagaggcctcattttactgtgacaattgtaggtgtggaaaatcttgtacaagagtgatccctggcgccctgcccctcatgcgatatgttttttgtcctttttgttggcttctttgtaagtcatgtcatgtacagtgtacaagcatagtgagtattgtttcaagcacagaaattgtatgtcgatgattccacaatcttaatttctggttagcttatatgatttt

SEQ ID NO: 1580 - DNA, 926 bp, Zea mays
  Clone ID: 700158927_FLI
ggattatctaccgattcttgccgcctgactctgaatggtcataccaacgagaagaattttgtagggctatctgttcatgatggatacataacttgtggctctgaaaccaatgaagtgttttcttactacaaaactttccccatgccaataacttctcataggtttggttctattgacccgataactggacaagtgacaaatgaagacaaccagcaatttgtgtccagtgtttgctggagagggaagtcaaacatggtagtggctgccaactccagtggtagcatcaaagtgcttgagcttgtgtgaatgaacgagagtcatattggagaagaaggttctagtgttgccatgcgggcctgcgatgctttcgtgcccttggtgatgctctgatggccctgcttatccagtgtctgcaccctcaatggaagcactaaccattggtctgcatttcactgttttgacagggcactaaaagactagactgctctatgcaagcatcctacaacaccgatcattggttattggaagctttgcttgaaactcacaagcaaactaaagttttttttttccaagagtatgatggcctcacctccatttttgtgtttggcattttgagacggtacctattcatcgtgatgcaaacttcttttgggctagaggtgcgcgggacttgctatgactgttaagagcaaacgatggaaagaaagggaaaaaaatgatcatgtagctcgaagaagttaatcgtgctgtgtgaatgtttcaaggagaatgtctcaaatagttttatacccccttcattattgtacatatatctagggctgcctaatgaaaggccttgtaagttgtaactagagtagaatgctgatcatgagttaagtataatgaatggtcttcacaaaagattaatcaatggaagattcatacat

SEQ ID NO: 1581 - DNA, 699 bp, Zea mays
  Clone ID: 700159157_FLI
ggaggactgagaccagaggaggagacgtcacgcctgcgcggctgcgcccaccatggacgaggatgagtttcggcgcatgctcgacctcttcccggtcgtccgctcccgagactactgctgctccgatcttggaacatccagcagaggaaccagacagcgatcacgagttcaggaggcaactaagggcgataataaggactcgtccggtggacgagatatgtttatgcagaaattgaagatggctgcggagaataagattggagcgacaaaggcagagttcttctgcaagacattcgaagaagttcatgagaaacttgttcacagagagctgaatttggatgctgctaagaagttcctgagcgcatatgagagctgatgatgaacaataggtagatgctgcttaagggtcggtagttgccaatgatctggaaagttgttgatgctgttgagattttgatcacaggcaaacttttaacaacaggtagatgctgttgagcgcatactgataccgcctgattggttcaccgatcgcccgtagccagctcgtatgcagccaggctgtccagagactgttatttgggccgtagaagtggatgcactcaaaataaatgttgcgtttactcgtgcagcctcacgtcttttacgtgcatgcaattaaacatatgctcaataaaatcaatgcatgtgatggtttagaat

SEQ ID NO: 1582 - DNA, 610 bp, Zea mays
  Clone ID: 700159177_FLI
gtcgggccgccagaactctggcccagaatctaccgtcgaccagaagagccctagaaaaccctagtagcatccacaattccacataacctcgcccgcgccgcctcccccacgagacgccttcttgctctcgcttccggtgacgcccgccacttcctccccgacgagatgacgaaacgcaccaagaaggcaggaatcgttggcaaatatggtaccaggtatggtgccagtttacgtaaacagatcaagaagatggaggtctcgcagcactccaaatacttctgtgagttctgtggcaagtttgccgtgaagaggaaagcagttggtatctggggatgcaaggactgtgggaaggttaaggccggtggcgcctacacaatgaacactgctagtgcggtcactgtgagaagcacaatccggcgcctgcgggagcagaccgaagcatgattgcgggcagcttgaaaaggagtacctggatttttgtagttcagccaagagccgtgaaccattttgcctttttagctaaatgaacaagaaatgtttatctatctgtagtgaccactttgtactcatggtttgtcatgctaaattgatggtatgcactatgcaatgc

SEQ ID NO: 1583 - DNA, 665 bp, Zea mays
  Clone ID: 700159184_FLI
tccaaattgtgggtgatgatttactcgtcacaaacccaaaacgtatagcagatgctattgataagaaggcttgcaatgctctgttgctaaaggtaaccatttactaaacaatctgaaatggagtactatatacccttaattttttttgcttccttccagttctcaacatcatgactgcaaaacagtatctagctcgagataagcttgcactgcaaaactaaatgtctttgttaaagttggtgtacctttttccaggtcaaccagattggtactgtcactgaatcaattcaagctgctctcgattcaaaagctgctggttggggtgtgatggtcagccacagaagtggtgaaaccgaagacaacttcatcgcagatttggctgttggcttagcaagtgggcagattaaaaccggggctccatgccgcagcgagaggctggccaaatacaatcagcttctgcggattgaagaggagcttggcaacgtgcgctatgcaggggaggcattcaggtctccatgagaaatacagacttcagagtttcagtaaagcctaaagtatgtgtactgcccagtagaagaaataaaagaactagatcatgaccagtcatgctttcatccttgttaccacgagttatcccaattttttgcggttttttttttcttgat

SEQ ID NO: 1584 - DNA, 647 bp, Zea mays
  Clone ID: 700159205_FLI
agctcatccctggagaatgagccttccaatgtagtaggttctagtgagggggcaaataactctctggagctgtggaaagcagaaagtgatggtagcataccttgcccaccaaaggagctaggaggctgtggcggttcgattttggatctcaagtgtttttttccagaaaagatgctttcaaatttagaagaacgagctgacagaattatgaggagcgaagtatttgcaaaagcagtagccaaaagaagtgaccagtgcccttgttatgaccattcaggaaacataagaactcaggacgtgcgagagactgcaaatacgaaaggctcaagtgataaccatctctactgcccagttgccactgctatcaaggaggatgacttggcgcactttcagatgcactggacaaaaggcgaaccagttattgtttctgatgttctgcatttgacttctggtctaagttgggaaccattagttatgtggcgggcattgcgagagaaaaagactaatggtgacgtagaagatgagcactttgctgtcagggcattagattgccttgattggtgtgaggtcaggagttatatttcattgaatgtttgagtgcattctgtgaccttttatatttatgtatatatttaaatgtttccgtt

SEQ ID NO: 1585 - DNA, 1004 bp, Zea mays
  Clone ID: 700159514_FLI
gctgatccaagcgagaaagaggctgatgatggtgtatcaggtaaagatatgatgagaaaacatcgccggcaagtgctattcagtggtattatcactgctgttggaattagcttgcataatcttccagagggaatggctgtatttcttggatctgtcaagggtcttcatgtgggcctgaacttggctgttgctattgccttacataacataccagagggggttgctgtagctcttccaatctattttgctaccaaaagcaaaaaaaaggcattttatacggcagcattctctggtttggctgaaccactaggagtggttgctgtagctttgttgtttccaagcagtttgaatcctgacattcttgaaggcctacttggatctgtgggtggtgtcatggctttcctcactttgcatgaaatgctgcctcttgcatttgactattgtggccagaagcaagctgtcaaagctgtctttgtgggcatggcctgcatgtctgcaagcttgtacttcttggaagtcagcttaccaaaggagataagcttgtagcatcgcgctgcaggtactgggaggccatagcctgtcagtagatcctgaattctaggaggaggaacagcacaataaaaccatgaacagtgactactggtgtgccgccattgatattgtccatcttaccgtgaaaggagggagaaactgcatttccccagaatgtattccccagattcctcgtgggaccatatgaaagaattgaaaaatgtactgtagtactctgtcgtccggcaatggaagcttcgaagtcgtcaactaaactatttctagcactctcgtcggttgacaatggaagattctatgtaaaaacccatcagatagatgttaacctttaatctttaatttcttaaaagtacattgaaataagatactttgctttcaaacaccccctatatttagtttgaaccagtacacatctcccttgtctgaattgaaacacgtacaagctgccaaaggtc

SEQ ID NO: 1586 - DNA, 594 bp, Zea mays
  Clone ID: 700159538_FLI
gcttctcaaccggataggtagcaccggagcaggtagaacgctgcacaatccccttcgccgccgccaagatggtgaacgttcctaagaccaagaagacgtactgcaagaacaaagagtgcaagaagcacacactccacaaggtgactcagtataagaagggcaaggatagcctgtctgcccagggaaagcgccgttatgaccgcaagcagtcaggatatggtggtcagaccaagcctgtcttccacaagaaggccaagaccaccaagaagattgttctgaagctgcagtgccagagctgcaagcactactcacagcacgccatcaagagatgcaagcattttgagattggtggagacaagaagggcaagggcacatctcttttctaagcttctcgtccacctgtctggttgttgagttgaagctgtgggtctactactactgttataaaaacatgtcgccaaatttcaatgttaatgtagcaatgaaagcagaccatgctatgtatccaaattccaatgcctgacatttgttctggggtgttggtcgacttttggctaaatgaaagttttgtagcttgaatctgttttgtgtttg

SEQ ID NO: 1587 - DNA, 695 bp, Zea mays
  Clone ID: 700159574_FLI
tcaccggtgggcctgagattcccttccaccccggtagggaggacaagcctcaacccccacctgagggccgccttcctgacgccactaagggttctgaccacctgaggcaagtttttggcaagcagatgggcttgagcgatcaggacattgttgccctctctggtggccacaccttgggaaggtgccacaaagagcggtctggtttcgagggggcctggactacaaaccctttggtctttgacaactcttacttcaaggaacttctgagtggtgataaggagggccttcttcagctcccaagtgacaaagccctgctgagcgaccctgttttccgccctcttgtcgagaaatatgctgcggatgagaaggctttctttgatgactacaaagaggcccacctcaagctctccgaactggggtttgctgatgcttaaatagaccctatcttggagtgatacattctgctgcctgtatggaatcatgtggtcttttgcatctggagtcaatgtgaacaagcagattgtcgtattgtctttctcgtaataaatttgtcgatgttgagcccttaggctgttgttggtacattggtacttcgtcgatgcttgaattgggaccctttgtccgttttcctagactctgatgctgtatgcaactgaaacaagtaaatctatgatcttaaggctgcagtatgttct

SEQ ID NO: 1588 - DNA, 499 bp, Zea mays
  Clone ID: 700159644_FLI
gggttcttcagcctcagccacgacggaggtaaggacggctcaaggaccctagagatagagatcgtatggtccaataggccatccaacgactgtatgtagcgtacggatgatttacctgacgccaattcttgtactcttggcttccatgtaaatcagcccccccataatcatccgaattcatttatttgtacgtagaaagttaagacacttagataactcgcgccatcattcaattattgaggtcatttccgggattgtggccctgctgctgtaaactgattttgcacccgggtattttttttttgtacaggtgaatttatttcatgtagttatagcttagtgtagattggtggtgagtacggactagccctagtgacagtaacattgggtgtgatgtgtggcgtgatatttgctcccgtgggtgtgtttccggcacttgtagcctcaggatacacatggctgagcttggcactgttctatttgtcaggcatgtttgttt

SEQ ID NO: 1589 - DNA, 1191 bp, Zea mays
  Clone ID: 700159716_FLI
agatcatgatgccgtaccctgaggacgtcacgctctcggtgcagctgctgtccttcgcgtgcggcggcttctccgtcgtgtgggccaacaacaacctcctcaacgacggcaacgccatcaccatgtgcgtcaggatgtggtccgagctggcacggaccggcgggagcatcgccaccgtgggagcggtgtcagtgaaccacgaccgctcgatgttccgcccgcgcaacccgccggcctacagcgacgcgctcgacgccatgttcgccacgtacgacgaccaccggacggtgaacgccctgacggccgccgccagcttcgtggagcgcctctactacgtcgaggcggccgacatcgccaagctgcgggacatggccactgtcaccgagctccagcgtccctcacgcgtccaggcggtgtccgcctacttgtggaaggtcctcgccgccgtcgtggccgcgtgccgcgtgcccgaggagcggtgctgcatgggctggatggtggacgctcggcggcgggtgaagtcgcccgagctgatccccgcgatgcgcaactacttcggcaacgtcacggcctacgcgctgggcggcgcggccgtggaggagatccggcggaagccgctggccgaggtggcggccatggtgcgggataccatcacgtccatagactacgacgagtacctgcaggagctggtggactgggtggaggtgcacaagacggagcacgtgatggagaagggcgtcctcgggctgggctcgccgacgttgaaccagaccgtgttcgcgtcgttcccgctcgacacgaacttcggcttcggcgacgccgcgctcgcgctgcccatctgcgactatgggaggctttgttcgggctacctgtccgtcggagcgcggcctggaggcgacggctcctggctcctcagcgcctacatttggccgcagatggcggcggcgctggagtcggacggcgtctttaagcctctcacggcggagtatctcggtctcacagtcacaccctagcggcgacgtggtcgatctacatgcgctgcatgcatatcagatcagaatcagatatcgttcgtattgctcattgttgattgcatgattgcgcgctaccttgtattgtgtacgtcgttcgtgtaataatgttgcatggtctcgggccagtgctaaataaaaatctctgttaattttcttc

SEQ ID NO: 1590 - DNA, 942 bp, Zea mays
  Clone ID: 700159730_FLI
ctaacttcaagagagttgaaattactgaagatgcaaaaccagattggacagacaaagaaactcttcacttgcttgaggctgtcttgcattatggggaagactggaaaaaggtgtctgaacatgttagtagtcggtcagaaaaagattgtattgcaagatttataaggctaccttttggagaacagttcatgggacacaaggaggatagaatgaggtttgagaatactgatgagcctggagcaaatgtctcaaaacgactacgtctcactccactagcagatgcaagcaatccgattatggctcaggttgcatttttatcagccattgtgggttccgatgttgcctcagctgcagcgcaagcagctatttctgcccaatcccgtgttgaccttaatgacggcgagattgaaacttcaataaatagcatcaagcaagaagaatcatctcacacaaatgggctctcagccaacgtgttactgaaagaggcagctgctaatgcacgggcacaactcgagaaggaaaggaacagcatagagcaatctttatcaaacatagtagacgtccagatgaaggaaatccaagataaaatatgccggtttgagcagaaggagatgctgatggagaaagagcggcagcagctccattttctaagggatctacttttcacagaccaattggcagtcatgcagcatcaacaaaggagtccagctgtagccacagagtgcaagggtgatgagaagccaaagcccgtggctagcatgagttgatacgagtagatcctcagcgtagcatggtttcacttcagatgtagcattggagctgcgttcatccgcatctgccgttgctgttaaatttgatggtgtttattggatggtgtttctgtccctttcccttcttgcaccacagatgcctggagtgcaagggaagttacgactaccgatt

SEQ ID NO: 1591 - DNA, 334 bp, Zea mays
  Clone ID: 700159743_FLI
agctgcaaatctgatggtcctaatggcttgagttgctacggtgtttggtaaagctggttgtgatggctgtacccggatacatgcgcatactgtttcgacgccatgtagggggtatctgatcaaagttcgctgtctgatgcctgttctaatttagtggagtattactggcaatgtggtacaagcatcttgtcttgaaaatcgaaaactgcacggtatgtgtgcgccattttttgtctgatgaggtgtgttccatgcgtgtatttcatatgtagctacaccaatcgcgtgtccaccgaacgatgctaacttgctatgccgatggagcatgctttct

SEQ ID NO: 1592 - DNA, 896 bp, Zea mays
  Clone ID: 700159794_FLI
ctcgtgttcctcatctttctatcgtgactgaatttctgccaaggggtagtttatttcggttaatccataggcccaataaccagttggatcaaaaaggcgtttaaggatggcacttgatgtggcacgtggtatgaattatttacacaattgcaccccagtcatagttcaccgagacttgaaatctccaaatctacttgttgacaaaaattgggttgtgaaggtctgtgattttggtttatcacgtctgaaacatagtaccttcctttcgtcaagatccgcagctggaacagcggagtggatggcaccagaaatacttcgaaatgaaccatcagatgagaaatgtgacgtcttcagctatggggtcatattatgggagctctgtacattgctgcagccatgggaaggtatgaatcccatgcaggttgttggagctgttggttttcagcaacgacggcttgatattcctggtggtgtggatcctgctgtagcagagataataaggagatgctggcagactgatccaaggatgcggccatcattttcagagatcatggctactttgagaccattgttaaaaaacatgcctgccaaccaacctaccaggaagcgggcacaacaaacagatgattaagaatatattggtcagtatcagctgaagacacaggccaaagagagactgcattggtttgtcttgctcttgccttcccagcttcaagcaattggccatctgtaactattaccattgttttgtacagtacgccaaatgcgtatttgatgaagaacaggtgaattttggtccttttgccttcagcgtttggttctccattggagccagcggaatgctgtctatatctatctgatgaaagccgacccaaataacacagatccatgaagcc

SEQ ID NO: 1593 - DNA, 1276 bp, Zea mays
  Clone ID: 700159881_FLI
ttcttatgcgtggccattgggctttgggctggtctcgccatcggcttcaccaccgagtacttcaccagcaacgcctacagcccggtccgggacgtcgctgactcatgcaggacgggcgctgcgaccaacgtcatcttcggcctcgccctcgggtacaagtccgtcatcgtgcccgtcttcgccatcgccgtgtccatctacgtcggcttcacgctggcatccatctacggcatcgcggtcgccgcgctcgggatgctgagcacggtcgccacggggctggccatcgacgcctacggccccatcagcgacaacgccggcgggatcgctgagatggcaggcatgagccgcaggatccggcaaagaaccgacgcgctcgacgccgccggcaacaccacggccgccattggcaagggattcgccatcggatcggctgcgctggtgtcgctggcgctgttcggcgcgttcgtgagccgcgcgggggtcgaggacgtgaacgtgctcaacccgaaggtgttcgtcggccttctcgtgggggcgatgctcccgtactggttctcggcgatgacgatgaagagcgtgggcagcgcagcactgaagatggtggaggaggtgcgccggcagttcatcaccatccctgggctcatggagggccgcgccgcgccggactacgcgcgctgcgtcaggatctccacggacgcgtcgctcaaggagatgatgccgccaggagcgctggtgctgctcgcgccgctggtcgccggcaccttcttcggagtcagcacgctcgcgggactactcgccggcgcactggtttccggtgtccagattgccatatctgcttcgaacagtggtggagcatgggacaatgccaagaaatatatagaggcaggtgcgtctgatcacgccaagtctctgggccccaaggggtcggacgctcacaaggctgccgtgatcggcgacaccatcggcgaccctctcaaggacacctccggaccgtccctcaacatcctgatcaagctcatggccgtcgagtctctagtatttgcgccattcttcgccgcccatggaggcctgatattcaagtagacagggcggaggattattgtacaacgtgattctgtagtaaaggcgcactggttgaacaaatgattctgcatcgtagattgagtagccatgacctgtgtattgttttcacatctcatgaatctgttttgcagacatgtgtaatttagtgaaagatattacaatcctaacaagagcaagaatgttttttgattgt

SEQ ID NO: 1594 - DNA, 907 bp, Zea mays
  Clone ID: 700160012_FLI
ccgaatcccaagctttctcctctccgtgcaggtgcagcagccagcgcgcgcgtctctacaggaaacagagagcatccgagtcccaaagctcgcagctttgccagcaaagcaagaagacagttgcggcatggagctggagcttgggctggcgccgccgagcgcgcgccgtcccacccccatgacgatcgaccagcagcagcagcagcagcaacgccacctcgccgaggacgagctgagcagcacctcgtcggaccatcacccttgcgctgcgcgctccgggaagagaggattcgcggaagcgttccaggaggcggcggcgacgacgacgacgctgccgctcttcgacgacggctcgtcgtgcggcgggagaagcggcggcggaaagaggccgctggtcgggtggccgcccttgagctccgcgcgcagcagggcgtgcggcggcggcgccgccaagtacgtgaaggtgaagaaggaaggcgacgccatcggcaggaaagtggacctgtcgctccacgcctcctacgacgagctcctcgccacgctcgcccgcatgttcccgaccaacaacggcagccaagacgacaaggaaatcagcagcaagtccaccgccgccgccaccaccaccaccagccatagggacgtggtggtcacctacgaggacggagagggggactggatgctgctcggagatgtgccgtgggatgattttgcaaggtccgtcaaacggctcaagctactgggatgattggagtactgatactacatgttcttaattggagtataagcttcttttttgctgatgttttttaagagcacttggtgttaagaatcaaggcaatagtttggtggtgtacctgggccgggttacctcttgtgacaatacttatacgaacaggttttctggtct

SEQ ID NO: 1595 - DNA, 629 bp, Zea mays
  Clone ID: 700160026_FLI
ctgatggaacatgtgaagcagagttcttttgttttgatagcatagccagaaaaatagtaggaaaaccttgtgacaaccttgttacagcagttacaacttctcaaggtcccccggtagacctagccactgttatgtgactgaaatttaccctttgcagttgccatcaatatgtcagcctactctgtcacaaacagtcttctctattctgtctattttaacaaatcatgtaagacatgccttcatgccatctaacatgcctaaccatcctcaagagttgtatacacaagatgaagaacctagccttccggtcacacaaaactctccaacaacatctttggcgaaactatctacctgtagcaacgaaagaaacgagggtgatgaccaacgtacaagtgaactcaacaagcaagagttatcatcaccaccgaaaaggtatttgctttttgtgcacctatcactatcaggatcaccatcacttttgaaccatgaatgcttccctttaaatatgaactagctgttagcctatttgtggatctatacatatagacttaacacctgcaagcacactgttgctaggtcttgatgtacggtggttgaatgctacttactatatttttttattatagtct

SEQ ID NO: 1596 - DNA, 525 bp, Zea mays
  Clone ID: 700160060_FLI
cttctgggcctcaaggaggtttatcctatgtggcaggacaggactctcacatgttgagttcaacacatcaaggagcttttccacctaggaatccatttgagtgagactagtaaagagagttttgctggatagtggtggacagaagaggaaggcaatcagcaccggtcgaaactcaaatggatactcaggtctactatactagatgcattgaaagcaactgtgcatcgaatctgaaaccctgaggtaaatatgtgtcttggatttcattgtctatggtctctcgtgtatcagaaaggactgcatagaagtctacatggcaggagtgctggaatttttgcccgaagcaaaagctgtcctctactcccatggactaatgtatctctggcaggcagtgctggtccagcatcaaaaaatttctttcatttcgacatttgcccaatagttgtgttcatgttcttgttaaaccctgttgtgaatgagaagggacgacatttacctccttaatatagtaaaaacatgttcgtc

SEQ ID NO: 1597 - DNA, 200 bp, Zea mays
  Clone ID: 700160135_FLI
cgttgtatcaaaacggttctgagctgtaatgttatttcccaacccccagtgtaatcttggtgctatgggattagttcggtgctaagcagaacaaaaatgttgcatactacgcgtttttcagtcaaacgacatcctcttgcattaggaactgaattccatcctcttgcattaggatctgaattccatggacaacttttaac

SEQ ID NO: 1598 - DNA, 753 bp, Zea mays
  Clone ID: 700160159_FLI
cgtattttgcatatagacgaagcacaatagatatgtctagtcttggagacttgtgggcacttgcacctgtcattgttgtaaatatgcaattggccatggacattattaggtggaactggataatacatgcgtttgtatggggcacaatagccgcaacaacagtttgtctctttgtgatagattcgatatgggttcttccagggtatggggcaatttttcatataatggggactggtctgttttggtttttgctgcttatcattgttgttacagcaatggtcccacattttgtgttcaaggctttcacagaacactttaggcccagcgatattcaaatcgcccgtgagatggaaaaatttgcaaatgtcaatcaggtgaaccggttggaatttccaacgagaggactttcatgacaatagtagggaaactatagtatttcgttcttttcttattttcacgtctttcccccctactggtgtgaataggagctgattcatttagctgtaaggtgataggtttaatctctaatgtgcatgtatgtattcgtataaaatttacagaaaaggaaatagaagtccacgtacaagttttcatctgtttgttgcagcattattgcaggctaaatttgtggagagtgtattgtaaatatgggatactgatgcttggagattcaattttcaagtttgtagagagaatgtagatttgggaacacacggatgccaggaaatttaagttccagttttgtttcttccg

SEQ ID NO: 1599 - DNA, 562 bp, Zea mays
  Clone ID: 700160175_FLI
tgcacgtggccggcggcaacatcctgccgctacagctgccggagctgacgacgtcgcgcgcgcgccagaccgcgttccacctcctggtcgcgctcgccgaggacggatccgcatccggggagctgttcctcgacggcggcgagttaccggagatggccgggccgcggggcgagtggagtctggtgcggttcagctgcacgcaggggcgcgacggggttaagctcatgtcgcacgtggtgcacgacgcgtacgggccgagccggaagctggtcatcggcaaggtgatgttcctgggactgccctcgctggcgccaccgggagagttcgccgtgtatgtcaacggcgttaagatggccaactcgactggcgcgacgctagggtatcaaaggcgcggagcactcggcgccgctcaagtggaggggttgtcgctggtcgtcgtcgaggaattcgagctcaaggtggtcacgtcgtcataacgtgacactcgtgctcgttctgaataaaaaatgatcaaaagtctaaatttaaattggaaataaaggaattgtgagagcaatatagc

SEQ ID NO: 1600 - DNA, 745 bp, Zea mays
  Clone ID: 700160217_FLI
cgcgcctcaccacggcgccatccgctgcggtcgctccggcggcggcggcgggatccacgacgacgatggccgtggcggcctcggcgggcgggtcgtaccagcaggaggccagcgccgccgtcgtctctgctgactacctgcagtaccagatgatgcttctgcagggggccgccaccagcggccaaggcagcagcagcagtcatggcggatatcctctgtactacgactatggcggccacggcggggctggcgctggcgctggcggtggtgccatgagcagctcctactctttccccgcctccacggttgttaccgtggcttctgtgccgtcgtcctctgcctcctctgctcccagctatggcgaggcggcgcagtgggcaggcggctggccggagagtagtgcgtggagctatccggcgaccacggcttcttggtctggatcaagccagtatgagtatccaccgtcaactcgtccacctcaatagtccatgctccatgtttcatttcatataagacgtacacggccttccttttttccccctctactccacaaagaacaaagcttttgtggttcagaagacacagatagatagatgattttgttcaagatgcatgcatccgtgcaagatccaagagaagaggttgcgagattgtgtttcttctttgcttgtggtggtgttgaatcctgtatcgatcatgtgataatgattctggttgcaactaaatcgaagacgcacgtgataat

SEQ ID NO: 1601 - DNA, 699 bp, Zea mays
  Clone ID: 700160234_FLI
ccgtgtgtcgaacacgacacgcgataatggcactcatgcaggagagcagccaggacttgctcgaagcgcacgacgagctcttccaccactgcctgtgcttcgccaaatcgccgccgcattcccgcacgtcaagtgcagcgtgcttgacctcccgcacgttgtcgccggtgctccatccgatgcctgcgtgcagttcgttgcgggcaatatgttccacagtattccacctgcaaccgccgttttcttcaagacaactctatgtgactggggtgacgacgagtgcatcaagatattgaagaattgcaagcaagccatatctccacgggatgagggtgggaaggtgataatcatggacgtggtagtcgggtatgggcagtcaaacatgaagcgcctagagacacaagttatgtttgatttggttatgatggcggtcaatggagtcgagcgcgacgagcaagagtggaaggagatgttcattgaagctggattcaaagactacaaaatccgaccagtagctggcctcatgtcggtcatcgaggtctatccatgaattctttgtgaacaaaaggccggctgccataatataaactgaagaccccgacgtcgtcatggagctgagcgtgttgttttttagactactaggcacttgagcctctgagaatttgtaataataaataagctgagcaacagcgttctgtt

SEQ ID NO: 1602 - DNA, 446 bp, Zea mays
  Clone ID: 700160263_FLI
tcttaaccctgcgtgggtctgcgaggactgcacaataagttcgacggtacccacgttcttaaccttaagaacgtgggtacccacgttcttaacccttttccagaaaaaaaataaaaaatacaaaaatgaaaaattagacacacataatatcacatgcaacacaatatatcacatacaatacagatttcaaacacattgatatatgttcatatcacaaattcacacaagtccaaatatataagttcgcaaattcacataagtccaaatatataagttcacaaattcacacaagttcacatccatagttcacaagttcaaacattagctccatcgctctcgatcaggacatcggattgttgttcctagctccatcactagaattgagacatctgtccgcaaagtcaacgtgatggggaggagtcacttgatgagagccggaatcctac

SEQ ID NO: 1603 - DNA, 1101 bp, Zea mays
  Clone ID: 700160276_FLI
cgtcgacgaccccatgttcgtggaggccaccaggttcaactccgagcgcagccgcctcgcgcagagcttcgactacaactacggcgacttcatccccgtcctgcgccccttcctgcgcggctacctcgccaggtgcaaggacctgcaggccaggcggctcgccttcttcaacagcaactacgtcgagaagaggaggaaggtcatggacgcgccgggggacaagggcaagctcaggtgcgccatcgaccacgtcctccaggcggagaagagcggcgagatcaccccggagaacgtcatctacatcgtcgagaacatcaacgtcgcggccatcgagaccacgctctggtccatcgagtgggcgctcgcagaggtcgtcaaccacccggcggtgcagcgcaaggtccgcgacgagatcaaggccgtcgtcgccgaccacgagcccatcacggagtccaccatccaccgcctcccctacctgcaggccgtcatcaaggagacgctgcgcctccactccccgatcccgctcctcgtcccgcacatgaacctcgaggaggccaagctcggcggctacaccatccccaagggctccaaggtggtggtcaacgcgtggtggctggccaacaatccggagctgtgggacaagcccgaggagttccggccggagcggttcctaggcgaggagaagagcgtggacgccaccgttggcgggaaggtggacttccgcttcctgccgttcggcgtgggccgccgcagctgccccgggatcatcctcgcgctgcccatcctcgcgctcatcgtcggcaagctcgtgcgcagcttccagatggtaccaccgcccggcgtggagaagctcgacgtcagcgagaaaggaggacagttcagcctgcacattgccaaccactccgtcatcgccttccaccccgtctctgcatgatagattgattgatagccaaccacgaatgctgcgcgtcgttttctgcatatcaatgttaccctacatacccagtcatttttttcgcttttatttactagccatttctcaggtataagtatctccaacaacaacagtgtgacctataaaaacatcctataatttgtttg

SEQ ID NO: 1604 - DNA, 467 bp, Zea mays
  Clone ID: 700160279_FLI
cacaatcattcccatcccaccttcttgcgagcacagagagtgtgggagagcaggcctccgaaatcgttgtccgcagagctaaacttgcacgggtgtgtgggcgatcaggtttttggggagcgtactcgtgactgctcacttcgtccgtttggccaacgctgatcaggttcctcgtcactggcgctattcgagggactgcactgcgtacatctgtctgcatcgactgcatacgactacattgaacatacacatgagatgtctcgtgtgaatggagccactgttgccttgagcatcggtccctccgcacggtacactctgttcttagtatttgtgcatattttactgttgtttactgtttatgtgagtagtgatacacatatgcacatatatatcgtcacatatatcactgtgattttctggattaaattaaaactgaaaatgcatatttctctaacagtttgtacttc

SEQ ID NO: 1605 - DNA, 561 bp, Zea mays
  Clone ID: 700160356_FLI
gcatcacatatggcgatggcgagcagatcctccacgaccggaacggcggtgctgtgctttcttgtggtggtctccctcttcctggccccgtcgttgttcgttgccggaactgaagcagcagcggcctacggtgcaggtgcaggtgcaggcaggaagatgaagcaggcagctgcgggagctgtggcgacgaagcaggatggctacggctaccctgcaaccagttcaccagcgggatacccggcggtgccttgttgccctcatccacctgagggcggtcggggttaagagagagcccagctgcagctagacttcatgtgcatgatattgcagaattaccgtctctgaatacagatacagaaactagcatttatatacgaatcatatattatctatatcctcatgccatgagagatgtgtatcactctcgctaaataattagcagctacgacgcgcctgcctgtcacactgtgctactattctatattcctgctccctctctctatatatacatacacacatatgtgtgtgtgaaataaagattagcttggagcaccgcgcatc

SEQ ID NO: 1606 - DNA, 612 bp, Zea mays
  Clone ID: 700160362_FLI
ccggcgttcggcggcctccccggcggcagcattcctggcagcagcattcccgggttcagcatgcccggcagcggcagcagcctacccgggttcagcttgcccggcagcggcagcatgcccctcttcggcggcggctccccgggcttcagcggcttcggcggcatgcccgggtcgcccaccgccggctccgtccccgagcacgccaacaagccctgaacgccaacaagcgtggtagtagagtggtgctactgttactgtagtacgtcgtcgtcttcatgcatgcatggttcgtggtttcccctagctccatacgagcagtagttgggccttgcacgtaccgtacgtctagctagctatatatatagcttgtgttctactgctttttagtttaattacctgcctgcattggagagttggatctgtttcatttggtggtgtttgctttactattaggtcagtatctgtttgtggagacttggtgtttaatttatttagccgtttgtgactggttgtagctagcggtggtgcggtggtgatgttcttgaggcatgaataatgctacatgcatgtgatgtatccatgttttgtgtgtggtaaacctgttgtttgtat

SEQ ID NO: 1607 - DNA, 922 bp, Zea mays
  Clone ID: 700160414_FLI
gcggcgaggagcgtgtcatggtgttcaccatgcgcgggggcaaggacgccgtggacgccgcggtggtgcgcccgggccggctggacgtgcacatccagttcacgctctgcgacttcgaggccttcaaggcgctggccagcaactacctggggctcaaggaccacaagctgtacccgcaggtggaggaggggttccacgccgccggcgcccgcctcagcccggccgagcttggcgagatcatgctggccaaccgcgcgtccccgagccgcgcgctccgcagcgtgatcaccaagctccagcgcgtcgcgtccggaggcgccgcgccgccgcggaacccggcgcacaggcggaacacgagctggtccggcgcctggaccggacagcagtgggaggaccaggcccagccggcgcgagccagcgcggtctccgtggaggtcgacgagacggccgccggggcaccggcgacgtgcggcggggtgttcggaaaggaggcgcccatgagggagttcaagaagctgtacgggctgatcaaggtcaggagccggagggagggcgccggcgccgtgccactggaaggcgacgcgcacgggccgccgacgccgggcaaccatgacagggagcggtgatcgccgtggatggtagaattgtagtggtgtgcaaaaagaaagcatttttatttctttctctttttttttcttgttattgttacagtttatcacactactctactaatgtgtcagtgactgcaagtaggaatggcaatagatgaattggatggatcaaaaatccgcctccgatcaacctggccacggtctcaactgcgagtgtaattttaaacccacagtcgaacccgtcgagtttcaggtcacctcaggtttttacttagtgtgcacttttaaacaatataagcaattaaaacaat

SEQ ID NO: 1608 - DNA, 802 bp, Zea mays
  Clone ID: 700160602_FLI
ttcggcttcgatttgtggttccacgacttcctagagttcagctccaccggccgcctgctccggtacgacccgcgcagcggcgagacgtccgtcgtgctcgaccgactcggcttcgccaacggcgttgcgctgccgagggacgaggccttcgtcgtcgtctgcgagaccatgaggttcaggtgcatcaaagtgtggctgaaaggggataaggccggcgaggcagagacgttcgtcgaccttccggggtggccggacaacatccgtctcgggtcggacggtcacttctggattgccgtcctccagctgaggtcgccatggctggacttcatcacccgctggaccttcacgaagagagtggtggcctcgttccccgcgctcagcgagtggagcaagggggcggcgaagggagccatggtcgctcaggtgtccgaggacggcaccatcctccgcgtgctcgacgactcccaggggaaggtgatcaccttcgtcacgtcggtgacggagttcaacggggacatcttcctcggcagcctcgcgaccaacttcgtcggcaaactatctctggcgcgggtggcacaggaacaggagcagggtgcagtatcttcgtagacgtttgggttcttcatgtcagtttagccctgtttgtttatcctttatattatataatccagtttaaataagttaatatacaaacatacaaaacaggttattagatgtattatataatctagatacctagattatgataatacataaacagataattatgtgcttattatataatccataagctagattatat

SEQ ID NO: 1609 - DNA, 927 bp, Zea mays
  Clone ID: 700160684_FLI
acacctcgcttcactagaggaataatctagcagcttctgttgcctccaaattgtccggagaaaggagttgaagcagtgtgagagggccctgagacgatggcgaacctgttcctcaagcaggcaaagcagtacgtggcgacgcggccggtctacccgccggagctcttcgacttcatcgcctccaagacccctcgccgcgacatggcctgggatgtcggcaccggcaacggccaggccgcagcgtcgctggcgaagctgtacaagcacgtggtgggcacggacacgagcgcgcagcagctcgcctacgcgacgcgcctcagcaacacccgctacgtgcacaccccagcggacctgcccctggaggggatccacgccaccgtggccccgccggcctccgtcgacctcgtcaccgtcgcgcaggccttccactggctcgacctcccgcgcttctacgcgcaggcccgctccgtgctgcgccccggccacggcgtgctcgccgcctggtgctacaccgagccacgcgtcgacgccgccgtcgacgccgtgttctggcgcctgtaccacgggtcccagggatactgggcgcccaaccgccggatggtcgacgacgagtaccggagcgccgacttcccgttcgacccggtcgaaggggagaaccacacgggcccgttccagttctccacgcaccgccggatggacctcgatgactacctcatgtatatcacgtcctggtccgcctaccagactgcccaggataacggcgtcgagctgctcgatgcgcccaccgtccaggagttcgcggcggcgtggggcggcgatgccaaggaggtgaagaccgtcacgtaccccatcttcctcaggattggcaaggtcaggtcggagtgagctgcacggaaaaatgaaacttgacaaactatggatacacta

SEQ ID NO: 1610 - DNA, 736 bp, Zea mays
  Clone ID: 700160768_FLI
cccgtcagcccctctcgtttttcatccgccttcgcctccaaccgcgtgcgctccacgcctcctccaggaaagcgagagcttctgcataagaacaacaaatcaaaagcgtgatcagctcggtgccaacaaaacctcaacaaccaagtttcatgtctgatctcgacgtccagcttccatctgcctttgatccgtttgctgaggcaaatgctgaggactctggtgctggtcctggaacgaaggattatgtgcatgtgcgcatccagcagcgcaacggcagaaagagtctgactacagtccagggtctgaagaaggagttcagctataacaagatcctcaaggatctgaagaaggaattctgctgcaatggtactgtagttcaggacccagagctaggccaggtcattcagctccaaggtgaccagcgcaagaatgttgctactttcctagttcaggctgggattgcgaagaaagagaacatcaagattcacgggttctaagggacctgtaaatgcttgtgccctatattgtgtgcctcaacatattggggagcttgaagcatcgacagttgctagtcattgcttacttatataagaacataagtagtatttgctattgtcaagtgtgccttgcttgatgcaagttgtgttttcgtctcattattattatgcacggccatcgtacgtgtatggcttgtatgggttattgccaacttaataaaagcacactctgtttgcct

SEQ ID NO: 1611 - DNA, 718 bp, Zea mays
  Clone ID: 700160929_FLI
ggccgaggagctcgtcgcggagctcgcctcgcgcggcctccgcgccgtggccgtgcgcgcggacgtctccgatccggacgccgtgcgcgcgctcttcgaccgcgccgaggaggccttcgggtccccgccccacgtagtggtcgcctgcgcgggcatcatggacgccaagtaccccgcgctggtcgacactgccgtcgaggacttcgacgccacgttcgcggtgaacacgcgcggcaagttcctggtgtgccgggaggccgcccggcgcatcccccccaacagcggtgggcgcatcgtgacgttctcgtccacgacggttgccgtgctgccgccgggctacgcggcgtacgctgcgtccaacgccgctgtggaggcgatgacgaaggtcctggccaaggaggtggcgccgaaggggatcacggccaacgtggtggcgccgggccctgtgcgcacggagctcttccttgccgggaaggatgaggcgttcctagagagggtaaagaactccatgcgtatagccgagacgacagacatagcgcccgtggtggcgttcctggcgagcgaggcctcgggctgggtgaacgggcaggttatcagggtcaatgggggcgccgcatgagtgcggcgttgttattattacctcattatctgccatggctttccaaggatgttgttttcctgacgtgtctatctacgtgactgaatgaaaaaggttgtc

SEQ ID NO: 1612 - DNA, 2131 bp, Zea mays
  Clone ID: 700160959_FLI
ctgcagctccgagcattggattccgaccaactgaccgagcggcgtgtcagatgatctcgccggcgatgtgtcgttcggcgccgcggcgggccgcgcaggtccggcgcctcctgtcgtcggccgcgcccccggcgcacgccggcgctgccgtgcctgggccctgcatcgtgcacaagcgcggcaacgacatcctccacgatccgtggtacaacaaggatacggcgttccccatgacggagcgcgaccgcctcggtctccgcggcttgctcccgccgcgggtcatgtccttcgagcagcagtacgagcgatttataaactctttccggtcgctggagcacaatacccgcggcgagcctgactccatcgtcgcgctggccaaatggaggatcctcaacaggttgcacgaccggaacgagacattgtactacagggtgctaattgacaatatcaaggattttgccccgataatatacactcccactgttggcttggtctgtgaaaattacagcggtctgttcagacgaccccgtgggatgtatttcagtgcaaaggataagggggagatgatgtcaatgatttacaactggccagcagagaaggttgacatgatagttgtgactgatgggagtcgcattctaggcttaggtgaccttggtgttcagggcataggtatacctattggtaaactggatgtttatgttgcagctgctggtattaacccacagaaggttcttccaataatgcttgatgtgggaacaaataatgaaaagcttctggaggacaagctatatttaggactgaggcaacctcggctggaaggagaagaatacttggctgttgtagatgaattcatggaggctgtccatgcacgttggcctaaagcagttgtgcagtttgaagacttccaaatgaaatgggcctttgagactcttcagaggtatcggaaccgattttgcatgttcaatgatgacgtacaggggacagctggagttgctctagcaggcctacttggtgctgttagagcacagggccgtcctctccaggattttacgaatcaaaagatagtcgttgtgggagctggaagtgctgggataggtgtgcttagcatggctaaacaggcaatgttaaggatgcctgggatccacagaaccggggaagggcataatcaattctgggttctggacaaagatggccttattacgaaagctaggaaggacctggattctgcagtggcgcgttttgccagaggctttggtcctgatgaggtcccagatctctatgagggggctagtcttgttgaagtggtcaagaaagttaagccccatgtgcttttaggactatctggagttgggggcatatttaatgaggaggttctcaaagctatgaaagaatccgattcccctcggcctgcagtttttgcaatgtccaaccctactactaaagctgaatgcactcccgatgatgtattcaagcatgttggagataaagcgatatttgctagtggaagcccttttagtaatgtttctttaggaaatggtaaatctggttatgctaatcaagcaaacaacatgtatctatttcctgggattggtttaggtgcccttctttcaggtgcccggcatgtttcagatggcatgcttcaagcagcagctgagtgcctggcatcatacatcacagacgacgaaattcgaaaaggaatcctcttcccttcggtctccagtattaggcacatcaccgcacgtgtcggcgcagcagtcgtccgtgccgctgttgctgaagacctggctgaagggtgctgtgatgtgggtcctagggagcttgggagtatgtcagagtcggaagcagtggactacgtcgctcggaagatgtggtaccctatttacagccctcttgtgagcgacaaataataaatccgaagatctcgatgcctgcgcagaagcagatgttccattgaaggaatgtatcggatttgatatttttcttaaccatctctaaattagctgctcatctagaaagcatttcggcagagattggtgcccacgcatatggctaatgtatggctacattcatttgctctagacatgatttcgtcaccaggggacactcagttttgaaccgttgagcttcatac

SEQ ID NO: 1613 - DNA, 1004 bp, Zea mays
  Clone ID: 700160966_FLI
catgtactagctaattaattaagcaaccgagctctcctacccagttcagcgaattcaccgacgccgacgacgatgaccctgacggccttgggtcttggactagcactcctcgctgcggccagcccgtgcttggggttggggagcagcggcagcggcagcggcggcgcgtccgtgcctagcgtcgtcaccgaggcgttcttcgacggcatcaggtcccacgcacgggacggatgcgagggcaagaatttctacacgcggagcgcgttcgtgagcgccgccggcgcgttcccgggcttcgcgcacggcggcacggaggcggagggcaagcgcgagatcgccgccttcttcgcgcacgtcacgttcgagaccggatatttctgctacatcaaccagatcaacgggaggggccaggtctcgtgcgactcaggcgtgaagcagtggccgtgcgcgccggggaagcagtactacgggcgcggcccgctgcagatctcgtggaacttcaactacggcccggcggggcagagcatcggcttcgacgcgctgggggacccggacagggtggcgcaggaccccgtgatctcgttcgagacggcgctctggctctggatgagcagcgcgcaccaggtggtgccgcaggggttcggcgccaccatcagggccctccacggcgccctcgagtgcaacggcaacagccccgccacggtgaacgcgcgggtgggctactacaaggagtactgcaagcagttcggcgtcagcccggggaacaacgtcacctgctagagacgtgccggggaccctagataaaccctaaatactccagctcgtggtgaagaataaaaatggactcatgatgctgaaatgaaactcgctgctatatgcatgggtccacccgaataacgaagaagactggcgagaagctgtcgactcttagcgaagatcagaatatcaatctattctgtctatactatgtgtaaaaaaggttttttaataccactatatgctat

SEQ ID NO: 1614 - DNA, 526 bp, Zea mays
  Clone ID: 700160988_FLI
catacttgtacggacggaaagactaagaaccaaagatattacacaaaaggtgaaggcaaagaactactggcagggtggcgtttgccttgcctttgccgatgaagtcttatgttggttgtatgggactgtcaaagagaatgaagactatgttcttcaatttgtacatccatttaaccgcctcgaacttctgcgagcccagtccccctgtccggaagccataacgttgcatgtgcagcagctctcaggtgcagcggactagattctagcagtgacctcggcggagactacttgccttggagaaaaacccaattctagcagcagcactgaacaatggttgatctgccaacttactcaaccccaattaccaagcagatgtgctaatgcaccaaagaactgatgagatcgatcactggtctagctacatccatggtttacactcttgagtggccaaagagattttgaatccatcaaacatgtatttccattgtaacattattacataataaacaatacagacagagctact

SEQ ID NO: 1615 - DNA, 537 bp, Zea mays
  Clone ID: 700161008_FLI
gggaggacgacggcgacaccctcgcgcacctcgacctcggcttcaagttctacgacctcaccgacgacgtgcacggcgtgctgggccagacctaccgcccggactacgtcaacagcctcaacgtcacatccaacatgcccgtcatgggaggcgcgccggactacctctcctccgacctcttctccaccgactgcgccgtcgcacgctttggcggacgccgacaccagcaaggcaccgccgctaatattgccatgctcaccgacgacgacgacatggaatgaataacaaaggacacgtcgtacgcgcgatcgacgacttcaccgtaccattccattaccatctcggaggatatcgatccatccatcgttgtgtgtcttctacactagctagtgaatgaagaagcagcaataaacccattgaaattatatattatatattcaacaaataaggcttataaatacatatgcatgcatgtatactcctaattaattaattaaatactcctgattttattttacaatgcatggatgtttaagt

SEQ ID NO: 1616 - DNA, 618 bp, Zea mays
  Clone ID: 700161055_FLI
catggtcgcgctctctggtgctcacaccatcgggcaggcacgctgcaccaacttcagagcccacatctacaacgacaccgacatcgacgctgccttcgcgagaacgaggcagtcaggctgcccaagcacctcaggcgccggcggcgacaacaacctggcgccattggacctccagacccctaccgtcttcgagaacaactactacaggaacctcctcgccaagaaggggctcctgcactccgaccaggagctcttcaatggcggagccaccgacgcgctggtccagtcctacgtcgggagccagagcgcgttcttcgcggatttcgtggcgggcatgatcaagatgggcgacatcacaccgctgaccggctccaacaacggacagataaggaagaactgcagaagagtcaattagcagatagctagctagggtcactaattaagacccatgcatggctgttgaactgcaagctaagtaaacactatgtgagatcgtcgcgttgatgtgctcacatgtcgtctttttatttgggtgaaggatggatgcatgtatcagatcacttgttgtttaattaatgccatttcagtctttgtccaatatactttaatctgcatgag

SEQ ID NO: 1617 - DNA, 874 bp, Zea mays
  Clone ID: 700161056_FLI
tccgaaaggatcttagcggatttcggtgaggcggcggcggaccccgacgccgtggccgagctcccaccccttctccgggcgcgcgctttccttgccttggcgcaggccgcgacctcccttctcggagttcgtttaaggtgttcgggagttgaccctgacgagcaccccatcagaaaggagtttgaaaggttaagcctaatgcaggagaagttaaatcaatttgagaactgggacaaagcaccacttcgcccttctactacactaaatacacaagcagcagcaaggttcattggacactcactttcccatctgacatctgatcagaagaggagcatgcatgaaataagtagaggagaaaggcggagttggtctgggcagaagagaaagcctgaaccttcagtagaaaagaagtctgttcgtgctgctgcagaagagttccttgcaaaggcttctcaggaacttattggacatagtgatagcagggtcaagggtcctgttatactcatttctgatgaagatgaggactagatcaaaaaaatgggcgcttaccagattacatgcctgattcatcggctaggcaaaggaaggtagaagttcctggtgatgaagataaacttacgtacattgctgtggtgatgaagatgaatttatctgcattgctgtgttgttctacatgtaacagggaatggagcaaagctgcataggcttgcttaagtccccagttctgggagcaattggcctcgaatcttgagtgcaatttatctgagtttctttccggaaagaattttgacattctatttgctagtggaactggagcagcaacatatgatttatgtgctacagtacccccatataatgagtgctatctatctat

SEQ ID NO: 1618 - DNA, 1211 bp, Zea mays
  Clone ID: 700161168_FLI
agaattaagagataactgccagacaatcacctctcctgttgtcctaaaaacaaagtctggaagtattgaatcaaaaaatccgaaagtttttgattcatgggagtggattgaacgagaatatgtgcttgttccggaaaactgtacttctatggaaatgtcttcactcaacatcaagtccacaaaggatgatatggatacaagaacggtcagctatggtaggtccactggcaaagggtctgttcagaaccaaatcagagactttactgacacagctactggtgtacaaagccatggatgtgctcctgtggtcatttcacaggagtcagccactgtggattgtagacgagggaaaccacctgattatattacaagacttcattctctgaatcaatatgttcttgttcttgcggatcttgctcgggaaaagctatctaaaggcctgtacctggaggcgttatcaattgaacttgtattattaactatctggaaagaggcacttgatgcatgtagcttgctcatggatacatcagatggtgaaaaattctctaaatcttgtcaagaacatttccttgctaagagtggccactcacctatgaatgtagtacaaggattggatttcactcggacggcttctattttttcttggcttgaaagtgggtttatgaaggcatatgatcgtgcagagaagatatcacatgtattacggaaaagtgatgataacaccgagatgccagatgcagtggatgttacattccaaactgctttgtaatatgagaagagtagagctgcgaatgaagttttaggaaatcaaagcagatccgcagagctatattcgaagtctatcatcttgctcacgtttttagtacaggaagcatctatgttgccactaaatccaccgctttccctttcgcctttggatcagcaacgcatccgtaggtacatagctaatttgaacagccatctctgcagtgctcaggttccagggcaacggcagagatcagtccaccatgttgctttttgtctaggaggtggtgttcaatgctttggtgtcatgaacctttgtaaaattgtagttgccgaacaccatgatcctgcccccttttttgtatatatatagataataacaccacatgctctatatggtcgccccttaccatatgttcaaatgactctgaactttatatatttgcaagtgccttgtttgcacatgt

SEQ ID NO: 1619 - DNA, 808 bp, Zea mays
  Clone ID: 700161183_FLI
cgtagatcggtttgtgagaccccaacttgtgagcttaatcattcatccgcaatattctagattgtgttctttcttgttcttgcttgtgtcttcgattctcaggcaggaattagccctcgtggcgaggtcaatcgcgcagcgcacggttgataaccagaggagaagtggtgctgcgattgcggggttctagtcgtgttgattggaagccggatcgtttgtgtgacatctccaccaaatcaatagttatcttcacctgacggaagatcgaacaccccgttcctatcagcagatctcggatgtcagggcacaagaagattgctccagcagcaagcattagtagctccaagtactacatccgttatgttcctgggcccacatgccggggctcagtattcttgtacatacccccttagctataaaaggggaggtatgcagcgttacaagacaagctctctcaggaccagacttagacagactctcgattcccaagcttccacaacaatccaacccacagtggagtagggtattacgatccggcggcccgaaccactctaaatcctcgcgtgttcatgtgcttggtgatcgcttagcaagacagacaaaacgcttaagccccttcctcatattaggatttagggcgagtgcactctgccacccggtcggagaattccctctctgacactctctatatagagtttctctaaacgattctctattcatttgaatactttaaataaccggtttagcaaaactaaaatatgtacaatatatttgagagaatgacaaataatgtacaaaaataaaaaat

SEQ ID NO: 1620 - DNA, 941 bp, Zea mays
  Clone ID: 700161288_FLI
ctgaaataaaagaaaatcagtcagattctaaagaacaacacgagggttcaaaggcagcattaaagaagcaagggaaaagatagcaaaagaagcgatgggtcacctgacttcattcccatcgtcctgaaaggtatccggattcgatccaagcttcatgaacttcatcttgaatacgaaagaagagccgcacagcttcacgctcttctagaccaaatgctcacacggagaccagaccaccactaccagttgtaagaagcaagaactgcacagcacagcagcactatcccatacttgtccgcagcatcaacggcaaacggcccagagcagcgaagtagcagtgcacaagaacaagttgctgctgcgccgagaagaccgaatattacaacgtgccggagcccggccaggagagagatcgctcgtacaacgaaaccaaacaaataatgggatcggttcagacgcagcaacagcgctctcgtgcttgaagcgcactccagccctcccccccaacctacttatgcggccggtgccgctgctgctatcgtaggcagtgaggccaggaggggagagcaggagcacaagtacctcaggagaagtaaacaatatggagtgagagagaggggggcagtgagccagaggagggacacccacaaagcacaaagctgacacacccccacctccccctgctgctgcttgtttaattgcgtgtccttgttgatctgggaaaaagattagtataataggtataatagttccttgcaccctccagtccagctctcttcactccctcttctcataagaaaaaaatactgccaagattcagaggggatcttgcgtccaatgcgttgtcatattattaagcaactagtagtagtccacattcctcgccacagcgtaccgttccccgagtatgatctctcaacggtttctgcggcagcaacggc

SEQ ID NO: 1621 - DNA, 1250 bp, Zea mays
  Clone ID: 700161311_FLI
ccttgcacacttgcacttggttggagctcctctaccttttccatcgctctgctctgctccgcgtctccgtccgccccggcaaaagcaaaacacagccatggaggggtacgaccgcgagttctggcagttcagcgaccagctgcgcctgcagacgaccgccttctccggcctctccctcggcgactccatctggtctccggccaccggcgccggcgggcggcgcaacaacaacaccgacctactcgcggcctccgcgtcggcagccgacgccggcaagcacaacggcgtgggcctcagcctgaatgatggagggcccggactcattggctccgggaagctcgccttcggcggcagcaaggccggccgctacaacaacctcccatccgagaaggccgcgcccgtctacaaccacagcggcgccacgatcaacggcggctacgccaggagcgacaacgccggcctggcggcgttcaacaagatggggagctacttccacaacagtaacggcaacggcggcggcggcggggaggtgaagagctacttcaacaagtccgccggacgggcggcgagcaacaacagccacgggcacgccggcggcggcaagaagggcggcggcggcgggaagcacggcaagaacgagggcaacggcggcgcggtggcggccacggacaagcggttcaagacgctgccggcgtcggaggcgctgccgcggggcgaggccatcggcggctacatcttcgtctgcaacaacgacaccatggacgagaacctcaggagggagctgttcgggctgccgtcgaggtacagggactcggtgcgggccatccgcccggggctgcccctcttcctctacaactactccacccaccagctgcacggcatcttcaaggccgccagcttcggcgggaccaacatcgacccgacggcgtgggaggacaagaagtgccccggcgagtcgcgcttccctgcacaggtgcgagtggcaacgcggaagatctacgatccactggaggaggacgccttccgccccatccttcaccactacgacgggcccaagtttcggctcgagctctccgtcgccgagaccctcgccctcctcgacatcttcgctgacaaggatgacgcctgagccttccttgccgccccctcgccgccagtgccaatccattaatgcacagacaataaaatggctggagggacagaccaaactatccacctttgtttgatatgataaagggctatgtatgagg

SEQ ID NO: 1622 - DNA, 881 bp, Zea mays
  Clone ID: 700161348_FLI
atcaaggcgttcgtcatcgacgtggtgacgtctggttcagacacgtcggcggccatggcagagtggatgctggcggagctgatgaaccacccggagacgctgcgcaaggtggtagaggagatcgacgctgtggtcggcggcggcaggatcgcgagcgaggcggacctgccgcagctgccgtacctgatggcggtatacaaggagacgctgcgtctgcacccggcggggcccatcgcgcaccggcagtcgacggaggagatggtggtgcacggtttcaccgtgccgccgcagtcgacggtgcttatccacgtgtgggccatcggacgcgacccggcctactgggaggagcccctgttattccggccggaacggttcatgccaggcggcgctgccgagagcctggagccccgcgggaagcacttccaatacattcccttcggcagcggccgtcggggatgtcccggcatgggcctcgcgatgcagtcagtgccggccgtggtagcggcactcgtgcagtgctttcattggtccaccgttgacggcgggatggacaagatcgacatgtcggagtcggacgggctggtgtgtgctcgcaagaagccgcttctgctccgacccacatctcgcctcacccccttcccgcccgtcgtatagcgtgcatatgcgtgtcttccattgcaataccagcgtataccaacctctaccgtaccattatagcgatcgcacttggatctcggtctatctctagcccctttacctgtccccgtatccatattcaaaatctactctacaaaatgtttatggtttagaaggcgaacagttggacataataaactttattatgatgttattaagtgtgcaaaattaatatggcattgtct

SEQ ID NO: 1623 - DNA, 724 bp, Zea mays
  Clone ID: 700161458_FLI
gaggtgaagagctacttcaacaagtccgccggacgggcggcgagcaacaacagccacgggcacgccggcggcggcaagaagggcggcggcggcgggaagcacggcaagaacgagggcaacggcggcgcggtggcggccacggacaagcggttcaagacgctgccggcgtcggaggcgctgccgcggggcgaggccatcggcggctacatcttcgtctgcaacaacgacaccatggacgagaacctcaggagggagctgttcgggctgccgtcgaggtacagggactcggtgcgggccatccgcccggggctgcccctcttcctctacaactactccacccaccagctgcacggcatcttcaaggccgccagcttcggcgggaccaacatcgacccgacggcgtgggaggacaagaagtgccccggcgagtcgcgcttccctgcacaggtgcgagtggcaacgcggaagatctacgatccactggaggaggacgccttccgccccatccttcaccactacgacgggcccaagtttcggctcgagctctccgtcgccgagaccctcgccctcctcgacatcttcgctgacaaggatgacgcctgagccttccttgccgccccctcgccgccagtgccaatccattaatgcacagacaataaaatggctggagggacagaccaaactatccacctttgtttgatatgataaagggctatgtatgagg

SEQ ID NO: 1624 - DNA, 939 bp, Zea mays
  Clone ID: 700161508_FLI
ggctagctgtgtcctgcctacctagcggtatcaatacccggctgcagctcaccaccaccaccaaccaaccaacccacagttcccatataggcagccatcggctacacagcctcgcctccgtaagcagagtgtgtcgttggaagagagacgacggcggccatggcgacctccttccaggggacgaccaccaagtgcaccgcctgcgacaagacggtgtaccttgtggacaagctcaccgccgacaaccgcatctaccacaaggcctgcttccgctgccaccactgcaagggcaccctcaagctcgccaactacaactccttcgagggagtgctctactgcaggcctcacttcgaccagctgttcaagaggacagggagcttggacaagagcttcgaaggaactccgaaggttgtcaagccagaaagaaacgttgggaatgagaatgctactaaagtctcaagcgcctttgctggcaccagagagaaatgtgttggatgcagcaagacagtctatccaactgagagggtcactgttaataacactatgtaccacaagagctgcttcaagtgctgccatggagggtgcaccatcagcccttctaactacattgcgcacgaggggaagctgtactgcaagcaccaccacatccagctgatcaaggagaaggggaacttcagccagcttgagaatgaccacgagaagacatcacaggctgggtcactggaggaggatgaacaagagtattgatcactgagcacaaccacagatgaataatgaatcctcttgcatttgcctagagcactatgtatttctgtggcgtggttcgatttcagttttaccaatggaggtcatgtgtgttcagagaacaatgatattgttgtcttgtatctgcatgtaaacgttgttatctttgagtcagatactctacctggtttcacc

SEQ ID NO: 1625 - DNA, 1392 bp, Zea mays
  Clone ID: 700161528_FLI
tttctccctcgaggaatccgacctcaaggcgctggcggcgccggggtgcttccgggccccgcggtcgtcgtgccttgaggtcgcggtgtactacctggcccgcttcggcgcttcacgctgtggtgtcctcgcctgcgggaggaagcggctggttggcgtgttcagggtggagctcgcttcgtcggaatggcgggacggcaagcccgtgctgctgcaccatgggtgggcgggcatcggcaagggggcggccaggccggagctccacctcagggtgaagctggaggctgacccccgctacatcttccagtttgacgacgagatcgcgctcaacccgcaggttgtccagctccatggcagcatccggcagcccgtgttcagctgcaagttcatccgcgacaggcggtgagtgtcttgctcgcgatcaatcatattgcaattgcacttgcacgcatgcatcaagttcatctgaatgcttgtgcctgcatgcaggccatctcagagtgaccctttgggcggcgggcagtactggtcgagctccagcagcgaggagcaggacatggagatggtgaggcgggagaggaaggcctggaaggtggtgatccacgacctgtccggctcggccgtagccgcggcgtttatggccaccccgtttgtgccggcgccgggcggggacacggtggcacggtccaacccgggcgcctggctcatcgtgcgcgccgacaccacggggtcctcggacagttggcagccgtggggccggctggaggcgtggcgcgaggcggcggcggcggcggcgagcagcggcaaggacacggtgcgcctgcggctgcacctgctcccggaccgccacgacgactgcgtgctcgtgtcggaggcgcccctgagcagcgacaagggcggggagttcttcatcgacatggacaggcgggcgccctccgccacggcggcggagcactgcgcggcgagcctgggcgccgcgtgcgccggcggcggcttcgtcatgagctgcagggtggagggggaggcgaggagcagcaggccgttcgtgcagcttgccatgcggcatgtcacgtgcatggaggacgccgccatgttcgtcgcgctcgccgcggccgtcgacctcagcgtcaaggcgtgccgcccgttccgcaggaaaccgaacaagaaggccgcctcgccgtcgcccgaccacctcgagctcgacacctaggaacgcagaacaggaaggccccgccgactagcacccatggccgcccatggatccatctaactcgacctgtaaattcacttaatttcaagagctggactgaatcgtttgccacaatcaaaactctgttgtttgactggcctcagcagttagtacatgtttggaagtaaattaattttacagtc

SEQ ID NO: 1626 - DNA, 570 bp, Zea mays
  Clone ID: 700161568_FLI
cacaaacaacgctcccagccacatgtatcagaaggatgctgctgtcacatccacagaggacctgctgaagcccagctcaacatccaagtcgccagaccccaggcacgacgcccaagctagcactcaacctgcaggtacgggggtctccatgaagccggaaccggttattggagtctcaacaatcaagaaagaggactcctccttgacagaaggtgaggttgatggcggcacggaagagtgcctggagaagctgggcgcgatcaaagccaggctcaaatacctcatgcagggcacgcggctggaacatgagcgcagcgccaccttccgtgggtagtcaggcagatgaagctgcatcaaaggtgcaacttcacgcaggggtttagggtttagggccatctaacgcctgttgtggttgctgaattttgtgtcctgtggttacaggtattattgtcctgaataatgacgttgtgaataagtggtttgtttttttgagtgcggcaatttgtaggagctaagaggaatgtgttgctgagttaagttatgaattagaccgtgtccagcagttcactc

SEQ ID NO: 1627 - DNA, 744 bp, Zea mays
  Clone ID: 700161573_FLI
atgcgcaccaaagtttcttcttcaaacgagggcggcgttgctgcagggtttgccgttttggacagcgttctcctgactgatgagtgagacagcagcgaggtggcagagctatgggtgacacctgacctgcattagtgacagtgcccacagtcaactcaaacgatgacaatatcaactgcaatcgtaggggaaactatgaaattgcttacagaattgcggacagtcggagaagatggcagtgttacgttatgatatagtttcatgtttgtatgctggttgaaaatgtagggaaactcttgttttcactagaaaggaacccctggaggggggagtaacggtgtagaaggtttatgttgtcacagttggcatgcattcatcatataggaatagctaggagatggcaccgttatgccaacacagttataacaaatatcaattgtaaattttatgattggttatcgactaagcaaaacaattttataagaaattgttgtgcggcaatatcgtttgactaaatcttagtcagatgctcgaatattgctatggtttgtaaatataatatatcatatttatagattttgttgtaataaaacataaaaatatgtgttctattagttatgtgggtgtggaagtagggttaacagctaagattagtctgcatttggaggattgtgtaaagtaggaggcatagaactgtagataatatattttttatatattaattgaaatatgatgtgatataag

SEQ ID NO: 1628 - DNA, 1045 bp, Zea mays
  Clone ID: 700161606_FLI
ctaacttatgccagtcctgttataggttatcagttcctctgtatattagtcattatacagcacttgcccttgggaatgggagtgggggagacaaatgttcagttttatgtacttatgtgagaaatctcatattactatatgagataagtctcttactaattactatattagataagcttccaaccagtgtttattcataccattttctctctctgtctaatatgttgttttatgaactctgtttcccccttattagtgcatacatgattgtccattcttatttttgtccataggacaacattgcatctgaactgcattggatcctaagagatgatggatgagtcttttcttgataggatggtttcccaacttcggtcaacatgcaagtactacactggatatcccaaggacttagggcgatcaagaattataccattcacatctgagcgtcagtttgtgcagctattacatgaaggcaggcctgtagtcgttgcctttactattaagtgcacatatacacagcatcttgataaagttctggaagaggccgcagctaaattttatccacatatcaagtttgtccgagttgagtgcccgaagtaccctgggttttgcctcacaaggcaaaggaacgaatatccatttgttgaagtattttacaacccagaacaggctgcaagcccaggaaagagcgtggatcctaacatcaccaagtattctgtaaaagtgctaccgttcaactatgaccaaagcgtgtatggatttcgagaatatttcaagaagcatggtttcaagtattctgaaacgaactagatccgttgttaaagatctgcctcaagagtagtcctagggacttgagtagcatgtggaggcagttgttgtatggagttgaaatggcgtgaggctctaatgtggggtcttgactagttcattcgagaatgcctgtcatgtattcatttgtatacgggctactgctcatgcctagagatttgcttttccatacctatgaaccattggatttggtaatgttttacctctcaaagcc

SEQ ID NO: 1629 - DNA, 788 bp, Zea mays
  Clone ID: 700161721_FLI
cacctgtccggtggacatgagtcatttgttgctggttcttctgcctttgttttatgttactgcattgctatttctctaaactagcttgtctaaatcaaagggtatttcctaagtctgtttaccgcagaagatattgtaaaatcatatcctttacagcaaaggtctgcaacaaaagtgacatttccacttgtctggacaaacacctgctgtagccatcctctctaccgcgagtcagagttgattgaggaaaattgtgcaggggtgagaaatgcagcccagcgcaaactatttgatgagctgggaatagtggctgacgaattacctgtcgaccagttcattccgcttgggaggatgctttacaaggctccttcagatggaaaatggggcgaacacgagttggattacctcttgttcatggttcgtgacgtgaagctcgacccgaatcctgaagaggtggccgatgtcaagtacatgaaccggcatcagctgaaggagctgctcaggaaagccgatgccggggaagatggcgttaagctctccccttggttcaggctggtggtggacaactttctcatgggctggtgggatcatgtcgagcaagggactctgcagggggcagcagacatgaaaaccatccataaattgtaaatcttctagatcgcttaagcacgagtcttgccctgttgaggaataagcgcttgtcctgctgtttggtgctggaggaataatcgataaaattataacagagtgatcttaattctggaacgtaactattaacattgaacccc

SEQ ID NO: 1630 - DNA, 1013 bp, Zea mays
  Clone ID: 700161731_FLI
tgcacgccgacccggccgacctcagcctggtggtcaaggacgggtaccagtggcgcaagtacgggcagaaggtcaccaaggacaacccctgcccgcgggcctacttccgctgctccttcgccccggcctgcccagtcaagaagaaggtgcagcgcagcgccgacgaccccaccatcctggtcgccacgtacgagggcgaccataaccacggccagcccccgccacaggcgcaggcgccgcacgacggctccagccctggcgccagcaagaagccgccgtcgccgccgaggccggtcgccgccgctccggcgccgctccaccaccagcaggtccagcagcaccagcagcagcaggcggttggcgcggtgaaatgcgagccgcccgtggccgcggcggcgtcggagctcatccggcggaacctcgcggagcagatggccatgacgctgacgcgggaccccagcttcaaggcggcgttcgtcaccgcgctgtccggccggctcttcgagatgtcgccgaccaaggactgacggaacggatcggatggattgggagattggcatcgcaggagattctggatcagattgtcttcgagcgcacgccgcaatggtcaactgcgcagcgctggcttggctgctgcctccgttcactcttcgctgtcagagcgaaacagcggtaacagagcaagacacgaggggtctgcactctgcagttgtgcaggaggaggaacagacacagggagaggagggcgcgcggccggacatggcgtggaacagagatcgtcgtcaccgccggcgggggtgtggtcgacgacgcgacatgcgaaacactacgtgctagctagcataggaaaaaacaacatgaaatcgtacaaccaaccaatccctcgcactgttttagttgttagctgtaggcgaaactgttcatccaattgatcaaatgaaaattatttttccctagcactatgtttcatgagaatgagaccaggaatgaaccaacttgagtttgaaattttc

SEQ ID NO: 1631 - DNA, 793 bp, Zea mays
  Clone ID: 700161739_FLI
caaccaaagaagactgaacatgcttgatatacccgtacccaaactgccatacatgagagtagatagacagagaacatgaagcaacacagagacacaagctgcagcggcacacatggggcaccgcgccccactaccaccaccagaccagacgacgcacactttatttagcccatgtcactcgcagtccgcaccgggcactgctatagctacgacacacacactgtcacacacggaaagatggagagaaaccgtcgcgttcgcgttgtactgaacagtaggcgccagcgcgcgcgacgcgactggcacgccacgcgcgcacgctgagacatcgatctcccgacccgctgtccgccgccgcagtgcgcgtacggcgcacggcctcactcgctggccttctcggccacctcagcggccggctcggccttctcgggctcctcagcggccggctcagccgccgcgggctcctcagcagcagcagcagcctcgggctcagcggctgccggttctgcttctgtctcggcagcgggcgctgccgcttcctccttcacctcttcagccgccgccggctccggctccggctccgcctcctttgccgtctcttcctcctttggcgtctcttcctccgccgccacgggggccgcctcgggctcagcggcggcagctggctcggtctccgccggggcagctggctcctccaccttggcctcggcggcgggggcagcctcctcgggcacgacggcgggcggagccggggtctccaccaccggcgcttcctcggtcgccacgacggtcg

SEQ ID NO: 1632 - DNA, 571 bp, Zea mays
  Clone ID: 700161746_FLI
cctgcgcctgcgagctcaggagatggttcccggaggaaagatggtgttctccctccttgggcagcgccccgacgacaaaccggagaacgccctccagcttttcgaatttataaatgccgtcctacacgaaatggcgtccaagggtttgatcgacgaggagagactccactctttctacataccggtgtatgggccatcagagaaagagctgagggagatcgtagaagctgagggctcgttttcgatcgacaagatggcgatccatgaacctcctccttctcggaatgccaatctcactcccaaggcaagggcgggcgggttgagagctgcaatggaaccgatcatagtgcggcatttcggagcatctccaccagccatggacgagttcttgaggatcgcggagaagctcatcaaaatgtcacatgtagaggatgagtatccaaacaaacccagggctttcgttgctgcgtccctcaccaggagggcatgaccgcatcacgggaatacatgcatgcatataaactatggtaataccattgccatgttttgccgaataaattttatatcatgt

SEQ ID NO: 1633 - DNA, 454 bp, Zea mays
  Clone ID: 700161773_FLI
ttcacgctacgcgaccccgccgaggtcaaggagttcctgcgcaagctcgtcggcgccaacgacgacagctgatgatccggcccgcgattcgtttccctttcccgccgtgaccagctccgatccgcctgtgtcaagccgctaactcaacctcggctacctacctgctgcaccggcagagggcttccttgttgttgcaactgcatctccatcgaacagcttgctttgggacaagaacagacctagctagtagtacagtagagcccttttgtatcttcgtttctttttttttgtttccatctctcttgttcatcatgcctgctgttgtttaccatttgcctcggctgaaaaggcttgtattttcggcgcccttcccgcgaggcactgtaactagttgctttgtctgctgaacgtacgcgtaccatgttgaaataatatgtcatgttgaggagctact

SEQ ID NO: 1634 - DNA, 924 bp, Zea mays
  Clone ID: 700161808_FLI
ggattatctaccgattcttgccgcctgactctgaatggtcataccaacgagaagaattttgtagggctatctgttcatgatggatacataacttgtggctctgaaaccaatgaagtgttttcttactacaaaactttccccatgccaataacttctcataggtttggttctattgacccgataactggacaagtgacaaatgaagacaaccagcaatttgtgtccagtgtttgctggagagggaagtcaaacatggtagtggctgccaactccagtggtagcatcaaagtgcttgagcttgtgtgaatgaacgagagtcatattggagaagaaggttctagtgttgccatgcgggcctgcgatgctttcgtgcccttggtgatgctctgatggccctgcttatccagtgtctgcaccctcaatggaagcactaaccattggtctgcatttcactgttttgacagggcactaaaagactagactgctctatgcaagcatcctacaacaccgatcattggttattggaagctttgcttgaaactcacaagcaaactaaagttttttttttccaagagtatgatggcctcacctccatttttgtgtttggcattttgagacggtacctattcatcgtgatgcaaacttcttttgggctagaggtgcgcgggacttgctatgactgttaagagcaaacgatggaaagaaagggaaaaaaatgatcatgtagctcgaagaagttaatcgtgctgtgtgaatgtttcaaggagaatgtctcaaatagttttatacccccttcattattgtacatatatctagggctgcctaatgaaaggccttgtaagttgtaactagagtagaatgctgatcatgagttaagtataatgaatggtcttcacaaaagattaatcaatggaagattcatac

SEQ ID NO: 1635 - DNA, 374 bp, Zea mays
  Clone ID: 700161843_FLI
atggtaacgcggcagctgagagatcttccatgctcaatgttgacccgaacgtgctctggtaattggtagttttaatgctggaggtcatggttaaaattggcagagaaacaagtagtggctgatattttagcaaaaaatagacacgttttgattcttagtttttgttctcttgtgagtcttgagcacattcctgaaattgtactattcaggtggctctcaaaagctttcaatggagtgttttttagcctatctaaataatttgcatttaaggtttaaatgaaagttacccttaaaaacttgcaagttttctatgtacatgtaacggataaaagtggatatccgaactgtttgaataaatttaatattttaatatt

SEQ ID NO: 1636 - DNA, 683 bp, Zea mays
  Clone ID: 700161851_FLI
cttcgtgctcgggtgcgccaggtccacggcggcccagctgacgtccccgtcctgcggctcggccgcgcgctacggggtgcggctggtgcaggacgccaaggcgtgcgtggacgacgactacgtgcgctccatggtcgacctcctggaggagcggcgcggcgcccgcccggacctggcggccagcctggtgatctcggcgtggacgcgcctgggcctcgaggacctggacttcggcgccggcaaggccgcgcacatgggcccgctcaccagcgagatctactgcgtcttcctgcccgtggtcggcgacccgcacgccgtcactgtgctcgtctccgtcccgcaggccgccgccgacaagttccagcacttctgcctcgggttcctcaaggacgtcgaagtggacgcgaagctcacctgagctactatggctatgatgtatgatccagcttgctagctcgtcgatgagtctcagtttgattttccaccgtgcattctgctttctgcatgctatatgagaaaatgatggagtattatgctaattactcccggtcaatataattgtgtcgaacggatgaaatgaaagatcgtctggtgatgatcatagtcatgcatgtatcggctgcggtccgatccagtagtaatatcaatcaatcaatcggtgatgaggtcctttttgtggtgtc

SEQ ID NO: 1637 - DNA, 680 bp, Zea mays
  Clone ID: 700161882_FLI
cctcgttcctgtcgcgcagccacgacctccacttccacatctcccccggcgtcggcgcggtcagttgaaccatggcggactccaaggccacctcggcggtcaccctccgcacccgcaagttcatgaccaaccgcctcctggcccgcaagcaattcgtgcttgaggtgatccaccccggccgcgccaacgtctccaaggcggagttgaaggagaggcttgccaaggcgtacgaggtgaaggaccccaacaccatctttgtcttcaagttccgcacccacttcggaggaggaaagtccactggtttcggcctcatctacgacaacctcgaggctgccaagaagttcgagccgaaataccgcctcatcaggaatggtcttgctactaaggttgagaagtcccgcaagcaaatgaaggagcggaagaacagggccaagaagatccgtggtgtcaagaagaccaaagctggtgacgccaagaagaagtaaacgttcgtttacatttgtattactgttctgggctctgggtggtctagctgcaatgtcataattatggtcgtgttaggttttgttccacccttggcactgaagtgattttttttgtaattcctcggcactgaagtgaagtttgtctgaatattgcctcgtaacataattgcccggtccctgttctagttgtggcgc

SEQ ID NO: 1638 - DNA, 1558 bp, Zea mays
  Clone ID: 700161929_FLI
caaagcttcgagcaacaacagcttgctcgactcagcgcccatctatctctcttctcccccgcctgtctagccagcggcggccaccaccaccgttcagttattatagcaagcatgacgaagcacggcgtggtgatcggcccggaggacgtcgcggcggcgcggcatttctcgttcccgccgccgaggacggcggcgggcggcgagtcgtgcaggaagctggcggcgcaggtggacctcggccccgccgtcgtggggtcctggctcgactccatgaaggcctcgtcgcccaggcacaggctcatggcgcccgtgcccggcgccgccgacgcggagcacgacgactggatggagcggcacccgtcggcattggaccgcttcgacgcgctggcggcggcggccaaggggaagcaggtcgcggtgttcctggactacgacggcacgctgtccccgatcgtggaggaccccgaccgcgccgtcatgacggacgagatgagggacgcggtgcgcggcgtggcggcgcgcttcccgacagcgatcgtcagcgggcggtgccgggacaaggtgttcagcttcgtgcggctagcggagctctactacgcggggagccacgggatggacatccgggggcccaccgccgacgccaaccaccaccacggcaacggcaaggcggaggcggaggcggtgctctgccagccggcgagcgagttcctgccggtgatgcaggaggtgtacgcggcgctggtggccaaggtggagcgcgccatcccgggcgccaaggtggaggacaacaagttctgcctgtcggtccacttccgttgcgtggaggaggcgtgctgggccgcgctcttcgagcaggtccgcgccgtgctgagggaccacccgggcctgcgcctcacccagggccgcaaggtgctggaggtccgccccatgatccgctgggacaagggcaaggcgctggagttcctgctccacgccctcggcttcgccgccgacgccgaccgcgacgacgtcttccccatctacgtcggcgacgaccgcaccgacgaggacgccttcagggtgctgcgcgcgcgcgggcacggcgccgggatcctcgtgtccaggttccccaaggacaccagcgcgtccttcacgctacgcgaccccgccgaggtcaaggagttcctgcgcaagctcgtcggcgccaacgacgacagctgatgatccggcccgcgattcgtttccctttcccgccgtgaccagctccgatccgcctgtgtcaagccgctaactcaacctcggctacctacctgctgcaccggcagagggcttccttgttgttgcaactgcatctccatcgaacagcttgctttgggacaagaacagacctagctagtagtacagtagagcccttttgtatcttcgtttctttttttttgtttccatctctcttgttcatcatgcctgctgttgtttaccatttgcctcggctgaaaaggcttgtattttcggcgcccttcccgcgaggcactgtaactagttgctttgtctgctgaacgtacgcgtaccatgttgaaat

SEQ ID NO: 1639 - DNA, 1175 bp, Zea mays
  Clone ID: 700161930_FLI
caataggacgatcgagcaagaagcaagcagcagtaacaagaaaccatcatcgatccatgtatccaccaatggcggcgctcggaggacggcggaggagggcgtcgtcagcggccctccagctagccttgtttgcggtggccctggtctccctggccggcccagccacggccgcggggaacaagaccgggcaggtgaccgtgttctggggccggaacaaggccgagggcacgctgcgcgaggcctgcgactcgggcctctacaccatggtgatcatgtccttcctcgacgtctacggcccgcagcgcggcggctaccagtaccacctggacctgtcgggccacccgacggccggcatcggggacgacatcaagcactgccagttcgtgggcgtgccggtgacgctctccgtcggcggcttcggctccggctactcgctcccgtcgacgcaggcggcgctggacctgttcgactacctctggaacgccttcctcggcgggtcgaagccgggcgtgcgccgccccttcggcgacgcgtggctcgacggcgtcgacctgttcctggagcgcggctcgcccgccgaccgctacgacgtgctggcgctcgagctcgccaagcacaacatccgcggcgggcccggcaagccgctgcacctgacggccacgccgcgctgcgggttcccgcccgccggctacctgcgccgcgcgctcgacacgggcatcttcgagcgcgtccacgtccggatctacgacgacgccgactgcgaggccaggtggcacctcgcgtgggacgagtggacggcggcgtacccggccaccaggttctacgtcggcctcacggcgtcggagatgacgcacggctgggtgcaccccaagaacgtctactacgacgtcgcgccgtccgcgcagaaggcggacaactacggcggcttcatgatctgggaccgctactacgacaaactctccaactacaccagcatggtcaaggactacgcttgattggatttctcgactcagttcagagcagacatgcatgctagctgcgtcagccgcttcgatctagctcaccgacctatataagccgaagtactgtgtagtgtgtttgcattttattgtaagaaactaagaaggaataaattggcgaataaacaagagtaaaatacaccgggttgttgagtg

SEQ ID NO: 1640 - DNA, 562 bp, Zea mays
  Clone ID: 700162090_FLI
gggaaaaacaaccctgagcttgccaaagagatggagaagcaatttgtcgatcttcttaatgaggaactcaagctgcagcaggttgtagctgaggagcatagtcaccacatgaacgccactcttgtcgaagcaaaaagacaagctactcaataccagcgagaagccgaaaagtgtaatgcagctacagagacctgcgaggaagctcgggagcagtctgaagtagcaatttcaaaggagaagaaactcacagcaatgtgggaacagcgagctcggcaactgggttggcatgattctcgagccacgagcatgtgacagctttagttctgaaatttcaggtgaaattatttctggtagctgcatgggttatgccttgcagccaaaccaaccggcgacgtttgtctatgtaatatcagtttccacgacaacattgttaattttgagtctcaacattatagttccagcttccttacaaatgtgactagcttgctgccgcctagatatctgaattttgtcatagtactgttgaaagccattttattaaggacatgtttgtttttctcct

SEQ ID NO: 1641 - DNA, 856 bp, Zea mays
  Clone ID: 700162159_FLI
gaaaatagaaaataatgaaattataattgacgcaccagatgagaaaacagaaaataaagcagatgctgacacaccagctggggagaccaaagaaggtgaaattacagtagaggaaacagatgagaaaatagaatctaaagttactgctgaacctgtaatcggggagacaactgaaggtcaaactgcagctggagaaccagttgaagaagctagaacagctgaggacatggtagaagatgttaaggtgctagatgataaatctacagcagctgagaaacctgtagagaatgccacagttgtggcacatgagaattcgactacagttgagaatactctgaaggatgcgattgtcgcgccaccagatgcaaataccaccaacgccgaaaaaactgctattggtgccacaattgaaacacaaaatgaggacgctccagcggagaggactatagaggatacctcggttgaggcaccagatgtacaagcaggtgcaagtgagtaaaccagcttagcgatcctttgcattcctgtcagtttctgttgatatcgacgtagtttgctcaactgattctcttgtctagatgatgtgttctgtatagaaaacctggaaccactttagcatcataaggctgttaggttttaaataacttgggcatctatattttgccccttatttttcctatataaacttcatctagttgtattcgatgcgcacgtgtgagtttgtcataaacacaattttctcctatatgtcagttcagtgctcaggcgatcagtgactgagtggaagtctttgggctatctacttggatcaaatgattctggtaccatttgtcgtctgtaaccaactgtgttctcg

SEQ ID NO: 1642 - DNA, 482 bp, Zea mays
  Clone ID: 700162177_FLI
agttcttccccaacaccaccaccgacatggacctcatcacgcccgcgctgctcgacaacaggtactacgtcggcctcgccaacaacctcggcctcttcacgtccgaccaggctctgctcaccaacgccacgctcaagaagtccgtcgacgccttcgtcaagagcgaaagcgcgtggaagaccaagttcgccaagtccatggtcaagatgggcaatatcgacgtgctcacgggcaccaagggggagatcaggctcaactgcagggtcatcaacagcggcagcagcagctctggattattccagcttcacacggcaaccgcctctgacgaggaattcgcccacgttgcaactaactagcagctactatatctctatccgtagaggatctagtgatctactgctactcagtgaccatgttcttcgatgttacaattagttccactacctgaatccagcttttacggagtgctcgacgctttgccg

SEQ ID NO: 1643 - DNA, 492 bp, Zea mays
  Clone ID: 700162283_FLI
ggggccaactggagcattgggtggtagcagcgtgcaggggatgcaaggtggttatatgggtggctacggtggttctggtgggtatgggggtgcttcttcaggaggccctggaagacattacatgggtcattaggatgattataactattttactgtggccagaatgccagatgattctacatgttcctgcttggcacttataaacttgctgttttaagctgtttctggctactcaattatggctgtggtcaaagttttcataggaactttggttccctccacctatcatttcaaaacgaaattaccgtttagattttcaaaagggcatcttatggctgcaagactattgtagaagacttcatgtggatctaaagcattgtggtatttaatgatattactgtttttgtacggttttcaaaaggccaaattaaggcttgcaaaactattgtaaaagacttcctgtgggtttaaagcactgagctatttaatcac

SEQ ID NO: 1644 - DNA, 638 bp, Zea mays
  Clone ID: 700162367_FLI
ctcctgttcaccccgcgtcgtcttcgctctcacgatccctcggcagtcggcgacggctgggcgaccgccacttccgccttctcttcctactgagcgtctccaggcacgcttctgaattcggagttgccagcattcgctcgaggtgccggaccagatctcaccatcatgcaggctagcgatagattcaacataaactctcagcttgagcatcttcaagccaaatatgttggtacagggcatgctgatttgtctagatttgaatgggctgtaaacatccagagagacagctatgcctcttatattgggcactatccaatgctagcatattttgccattgctgagaatgaatcgatcggaagagaacgttacaatttcatgcagaaaatgctgcttccttgtggcctccctcctgagagagatgaagattgaggagctgttgcatagtttcagtgtttccaatgaccatttatgagattgtaacctctatggtactatgtgccatttgtgttaaagctcgtatgcctttgacttgtcttgcatcggtctctatcgtgatacataaacattcgtaacttgtatgcattgtaaacgaaatgctggttatgcccctttgtcatgtttttgtgatgcgttctcac

SEQ ID NO: 1645 - DNA, 805 bp, Zea mays
  Clone ID: 700162436_FLI
ctcaatgtctcctgcgattcctgtcctggtaaaggatgcacaacgccagcctctcccagttcagacgaaggatgtgcaaacccaaacccaagccccaaaggaatcacttgcagatccaattccagcaatcaggcctgcagtcaagattgatttgcctgctcaaggcaagaaggaagcttcagctggtgctaccagcgaagcgccatcttctgccactggcaataatggtgctatggaacgtggtacatcatcagacgttctcttggcaaggcgatcaagggctgctgcggacggggatggcgacaaggtggaagcaaagcacgaggccgaggctcaagcggtggcagaggcagccatcaggcagctggagatcaattgacttcagaaaatgcgcgccaccatcttctcccagattttgtaattagctgccttgcctcctgtgcacattccgttctgcttagtccgtgtatgtcttgttcgggttagggctgtctgggcaagctgcattgtggtaggaacacctaggttttctgttgaggagaaaaaaaaacatggagtggtggtaggcggtttgcccagtgtttagttggagacggttattacttcgctggatatgcaattggtctgcttttacccccgaatgatgaggtggactgcgaggtgcctctaagggaaggattctgaattccttgttattgtcgaaccgccgtaatcctatccagcttcttttttactagtagtactacaatgcaaatgatgatgcattggtggttggtgtatgatgaaaagtggagatgggttattt

SEQ ID NO: 1646 - DNA, 644 bp, Zea mays
  Clone ID: 700162819_FLI
ctaccaccgtttcagtgctataggataggattttcttttgacggccatgaaaccccctcagctgccggccggggagcgctcctgggctcacgaggtcaagcaggccctccgtgagaaactccggcgctcctacggcgccgcctccgccacaccggcggccggtgaaccgagccgtggcgccgactgccgtggctcggccgccgaggaccccataaggagagtcatgttcttggctccctggggccacacataaaacacagacccagatctgggcttgcaagagcatggccggatctgcagagaactgctcaaccatacttaaaaggaactggagcttgtcttgtaaactatggagcatgctgcttgcaccacgaacatgaacgcatggctggttaactaggtagatatatgggtgtggatgggggagagagaaaaaaacaaggtatgtagtccaccgacgtctctgatcttggatggagaggcatgagatcttgggatgctcatgcatgggccatgggtgtggctgagatctgtaacttttgtagccatcaacttgttttccagaaaccatgtaataagggggacctgtgtatagctatgagacatcaacaaatctttctgctttgtgtgtccacctttgcttc

SEQ ID NO: 1647 - DNA, 1158 bp, Zea mays
  Clone ID: 700162821_FLI
ccacgtcctcctccggctactcgctcgttccgccccggcgtcccgccctcagccgccgccgtcgccccctccctcggttcgcctcgtcgtcgtcatgggcaaggcctccaaggacaagagggacatctactaccggaaggccaaagaggaaggctggagagctcgcagcgccttcaagctcctccagatagaccaggagttcaacatcttccatggagtgaagcatgtggttgacctgtgtgctgctcccggaagttggagccaggttttgagccggaacctgtatgtaccagcaaaacagtcttctgattgcaaggaaggtgatcttcctctcatcgtcgcaattgacttgcaaccaatggccccaatagaaggtgttatacaagtgcagggcgacatcaccaatgctcggacagcagacgtggttattaggcattttgatggatgcaaagcagacttggttgtttgcgatggagccccggatgttactggccttcatgatatggatgaatttgttcagtcccagcttatactcgcggcattggctatcgtgactcatgtactcaaagttggtggaaaatttgtggcgaagatatttcggggtaaagatacaagtctcctgtactgccagctaaaactgttcttctcgcaagttacgttcgccaagccaaaaagtagccggaactcaagcatcgaggcgtttgcggtctgtgagaactactcacctcctgaagggttcaaggaggaagacctataccacctgctagagaaagtgggtactccctcaggagctggcgatctagattgcagaagcggatggctggagggaccaaacaaggtgtacatcccgttcctggcctgcggggatctcagcggctacgactcggaccgctcgtacccgctgcccagcagcacggacggtggctcgtaccggagcctggaccccgtgcagcctcccatcgccccgccttacaagaccgccctgcagatgaagaaggcttccagccacggcgccggcgcggacgccgtcaagccgtccgcagactcctgagccgcagcccgtttccgtttaccaccttgcgcggtggaagttgctttcgctgggtcctggacctggctctctagtctctctctacagaaccttcatctactaaactc

SEQ ID NO: 1648 - DNA, 704 bp, Zea mays
  Clone ID: 700162852_FLI
ggaaaatgtttaacctgaacaaagttaagctgcactttactgatggtgcacttagattgttagctaagaaggcgatagctaaaagcactggtgctcgtggtttaagagccatcttggaaactgttcttttggaggccatgtatgaggttccagacgaaaaaacaggaaatgagcgagttgacgctgttgtggtggatgaggaggcgattggttccgttgataggccaggttgtggggctaaaattctccgaggggatggtgcattggaccagtacataacaagaaccaatgtgatgaatttacaggaaactaacgatggtttggccggggagctcgaggaagcgtacatgctgtctagaattgttagcttgtaatttgaaaggctggggaggaagcgtatatgctgagttctgaccaacttcgtacatcgtgtaacatgtctaccccaacacaggccggctactttttgctcacaaaatcacctgtactctgtctccattcctgttaagctctaacgagcagatagatccggggcaccttttccatgtaaacaggagttgccttttgattgagcaaccgtcctgcggagtaaattgttgcccatttttccccgctgcccccaactgggcagctcgattgtggttgacagagttgtaaagatcatcaatttactgatatgatatgataagaaggagcactttcac

SEQ ID NO: 1649 - DNA, 917 bp, Zea mays
  Clone ID: 700162853_FLI
agctactgctgctcgcctgcttcgggacggccgattgggtgccggtttgccaaggacatggaggatgcgagcggcagctcgtcgtctccagccgtcctacggaacaagtattgggtcctccgccacggccgcagcgtccccaacgagcgcggtctcatcgtctcatctctggagaacggcacgaagccggagttcgggctggccccgcagggggtcgagcaggcgcgcgcggccggcgaaaagttccggaaggagcttgacgagattggtgtgccggtgggttccgtcaagattcgttactcgccgttctcacggaccaccgagacggctagagtggtcgccggtgtgctcggcatcccctttgaagctcctagttgcgaagcggtgctgggacttcgtgagcgctactttgggccatcatatgagttactttcacatgataagtatgcagacatatggtcagtagatgaagcacatccctgtatggctcctgaaggtggcgagagcgtcgcagatgttgctagtagattttcagctgtgctgttatctgcagagacacagtttcatggctctgcaattcttattgtcagccatggggacccactacaaatctttcaagctgtcctcactggagccaaggagaacatgtctttccttgacgatctcaccaacctgaaggtgaaagatactgacgttctcaccaacctggaagtgaaagacacgatggtggcatccattctgtcacagcatcgtaagtttgcgctcatcacaggagagctgcgccgagttgtgtaacttgctgctgcttgggtttaacgtcgcctgttaattgaccatatgtaaacctgcaatgattgcctagcacattcctccgtaacttgacagggatatgaaattcgtctcctatggaatgctat

SEQ ID NO: 1650 - DNA, 472 bp, Zea mays
  Clone ID: 700162863_FLI
ccaattccagtcgcccccatccgttgctcatctcaccagaagcgaagccggaggagggaggaaggagatcgcgagcagccggagccggaggccgagaggatgaagacgttcgacccgtggccggtcttcttccgccgggagtggaagcgcaactggcccttcctcacggggttcgccatcaccggcttcatcatcaccaagatgacggccaacttcaccgaggaggacctcaagaactccaagttcgtccaggaacacaagaagcgctgaccaaccgggagtcgtccgaatcgcctgcggatgaaaaattagccccctatttatcttgtctttttttttatctagatgcgtgcactctattgtaataatgtaataagaggcaattggattgatccaacagcaaccggcttctgattttgatccgcttcgctgacataatatgtgccttttttctggatgttggattgcatct

SEQ ID NO: 1651 - DNA, 633 bp, Zea mays
  Clone ID: 700162917_FLI
cgatgatcccttcaaatttggactgttttgggtggtgcacatcggatgcattttacaaagctgctgaaccatgtgggattgaggaggaccttcaacgtcggcgtgaaggtggtgtgccaccaaggtttctgattatagatgatggttggcaagagatagttgactattatccagagacgttgcatcagatgtttgttgcgaatgcaggttccagtttcaagctaccagggaattctgtgaaagactttcttgactctaaaactgcttgaagatacatgttttgggaacaaagtttcagaacaagcttcttgaagtaatcgatgcaagatcctgcatgtgtttagattctgcgtcgacttgagggcaagtcgaattttaaggaggagggaatgttacaccgccattgtcagatactccatagaaggaagtccgtcctgagtgggtactaactgcagccttgttgttgcggtcctatctaggagtaagtctctagcgtgtgaggctgtgtccctcggtcaccggttggtgagccatgttcctaagtagtcgtatatatgttgttggcttgggcagtaggaaggacaggtatgaactttactctgaatcaatacaatctgtccctgtttcctctcc

SEQ ID NO: 1652 - DNA, 1539 bp, Zea mays
  Clone ID: 700162926_FLI
gaaagttcggagccgccggcccgtccgcctccctctccgcctcccgtccccaaggccaatagttttcaagtggcaatggcggaccaggctaaccaacccactgtccttcataagctcggtggccagttccacctgcgctcgatcatctctgaaggtgtacgggcccgtaacatatgcccatctgtctcatcttatgaaaggagatttgccacaaggaactacatgacccagagcctttggggcccttcaatgtctgttagcggtggcatcaatgtcccagtgatgcagaccccgctctgtgctaatgctcctgctgagaaaggaggcaagaacttcatgattgatttcatgatgggcggtgtttcagctgctgtttcaaagactgctgctgctcccatcgagcgtgtgaagctgcttattcagaaccaagatgagatgattaagtctggtaggctatcagagccgtacaagggtattgttgactgcttcaaacgtaccattaaggatgaaggtttctcttccttgtggaggggtaacactgctaatgttattcgttacttccctactcaggctttgaactttgcatttaaggactacttcaagaggttgttcaacttcaagaaggatagggatggctattggaagtggtttgctggcaacctggcctctggtggtgctgctggtgcttcctctttgttttttgtgtactccctggactacgcgagaacaaggttggctaatgacgcgaaggctgccaagggaggaggtgaaaggcagttcaatgggcttgtcgatgtctaccgcaagacactcaagtctgatggtattgctgggctttaccgtggatttaacatctcctgtgttggaatcattgtttatcgtggtctgtactttgggctctatgattccatcaagccagttgtccttactggcaacctccaggacaatttctttgccagtttcgctctgggttggctgatcactaatggtgctggtcttgcatcttaccccatcgataccgtccgcagaaggatgatgatgacatctggtgaggctgtcaagtacaagagctccttggacgcgttccagcagattcttaagaaggaagggcccaagtccctgttcaagggtgctggtgctaacattcttcgtgccattgctggtgctggtgtgctttctggctatgaccagctccagatcctcttcttcggaaagaagtacggctccggcggtgcttaaatggagaaatatgatgacgaacaagagcagtgtgtgttcccggtcctttccaatcaggatctggtgaagtttttgcctttcatatcgaagaaattaataattcatgtagagggaggattcttccaacaatttgttttggatggagacttagatctccaaacactcgtaactatcctactaggtggtgacatcggtccccaaaaacatttatggtcatagagtctgcccttcgtttgtcagtcgggcaatttttcttgcatacaatgccttcgtttaagtatcggatgagttgctgcgact

SEQ ID NO: 1653 - DNA, 1276 bp, Zea mays
  Clone ID: 700162971_FLI
ggatctagactagggctgaatggaagctatggataccgttttgccttcagtgtgctccaagaagcaacaaacaatttcgacgagaactgggtcattggagttggaggctttggaaaggtctacaagggggtgatgagggatgagagcaaggttgcagtgaagcgtggaaacccaaagtctcagcaaggtctcaacgagttccgtacagagattgagctcctctcacgtctgcgccaccgccatttggtgtctctgattgggtactgtgatgaaaggaacgaaatgatcctggtctacgagtacatggagaaaggcactctcaagagccatctctatggctccgataacccctcgctcaattggaagcagaggctggaggtttgcatcggagcagcaagggggttgcactaccttcacactggatctgcgaaggccatcatccatcgtgatgtcaagtccgcaaacatcttgctcgacgagaacctcctcgccaaggtcgctgactttgggctatccaagactgggcctgagctcgaccaaactcatgtcagcactgcagtgaagggcagcttcgggtacctcgatcctgaatatttccggaggcagcagctgaccgagaagtcggatgtctactctttcggtgttgttttgcttgaggttctttgtgcaaggccagtgatcgaccccacgctgccgagggagatggtgaacctggccgagtgggggatgaagtggcagaagagaggagagctgcaccagatcatcgatcagaggatctcgggcacaatcaggccggactctctgaggaagtttggcgagaccgtggagaagtgcctggcagactacggcgtggagcggccgtcgatgggagacgtcctctggaacctggagtacgttctgcagcttcaggacgccgattcgacggtctcggatgtgaacagcatgaaccgtatcgtggaactcccgtcacaggtccagaacgtcggggccctcgagagcatcagcgtgacgatggcagaagccggagcgtcaaacgagcctgaccacgacctctccgatgtgtccatgagccgcgtcttctctcagctgatcaaggccgaggggaggtaaatgtgcgtgacgcagcctgtagggtgtgggtggtggggaggaagccttcaaagtcatctcttgctgaagtttacgtgagagagatcatgtgtgattttttttcttcttttcgtctacaaatgtactactgaagtgaactatggtttcgagttacagttttagccat

SEQ ID NO: 1654 - DNA, 917 bp, Zea mays
  Clone ID: 700163016_FLI
ggagctcaagtcgatcatacgtatgctgccgatctgtgctgccggcatcatcctggtgacatcggcgtcgcacaatcacagcttcgccatccagcaggctcgtaccatggaccgtgacatcacgccacacttcaagatcccgccggcctccatgctcatcttcaccaacttcggtatgctgctgaccctggccttctacgatcgcgtgctcgtccgcgtgctgcgccgcttcactggccgcccgaacggcatcactcacctccagcgcacgggcgtgggactgacgatcgccatgctgtccaacgtggtggccgcggtcgtcgagcggagacgcaagtccgttgccgctgcgagtgggctgctcgacgctcccaaggccaccctgccgatgagcgtcttctggctggtgccgcagtacgccatccatggcatcgccaacgccttcatggacgtcggccgcatggagttcctgtacgaccaggcacccgagagcatgcggagctcagcgacggcgctctactggctgaccttctcgatcgggagctacctcggcacgctgctggtgaccatcgtgcacgacaagacgaagcgaaccgggcaatggctcccggacaaccttaaccgagggaagctagacaactactactggctagtcgtggctctggaggtggtcaacctcgtctacttcttcatctgcgttaagtactacacctttaagccattggagatggtgagcggtgaggaggttgagctctaccaccatggcaatggcaccgacgacgccaagaagcaaggtgtggaagcttagagtgagcaaatccggatcccaacaagaaggcttgggtccggatgaaataattgtacttcgacatctctttaaaaaatagcacctatcttaaagcagttctgaattagtt

SEQ ID NO: 1655 - DNA, 913 bp, Zea mays
  Clone ID: 700163272_FLI
cgaattgtttgggaaagaccagctgaaagtagagctgaagaaggggcatctgtttgaaggatggaccgaaggggtcatcaactttcctccaacgtataagtacaaggttaactcagaaaagtacataagtgatgataacaaatctggaaggagaacacctgcatggtgtgaccgaattctttcccatggtaagggtatgagattactgtcatataagacagttgatctcagactatcagatcaccgccctgtgacagctgtgtacatggcagatgtggaggttttctcttcaaaaaaagctgcagagagctctgaccttcaccgatgcagaggctgaggaacagctctccttcgaggaagacagtgcttctggaatatacaaccttggactatatgaaagttcaaggtaatcttggacacacattgaaacagactttatgcttttctcaagtatccaaggaagaacaggcaagttggtagtaggtagtcctgtacaattttatccaaaatatggtcagagattacgacttagtcctgctgcccagcatgtgcctctctatttttctgagaccagcagttggtagtaggtaatcatgtacatttttatccatgctctgaccatattttgaaatcagatgacatgcatttgctgcttttgagtactgtgtacctcatatgtgcaaaaataatctctgaccatattttgaaatcagatgtcatgtattttgctgttttccccctccccctttttgaggtggtgtgcctcatatgtggaaaccttttagctgtaattaaaaatgttggatacagtaaatatttcacacagattgtgacattctgtaatttcacttccagtgtaatttttctttcctctttgacacccctacagcaaatgttgatatcagcttaactt

SEQ ID NO: 1656 - DNA, 846 bp, Zea mays
  Clone ID: 700163301_FLI
caagcatctgcccttgaagcccatgcagctcccaactgcaaggttctggtggttgccaacccagcaaacaccaatgctcttatcttgaaagaatttgctccatctattccagagaagaacgttacttgcctgacccgtctggaccacaacagggctcttggccagatttctgagagacttaatgtccaagttagtgatgtgaagaatgttatcatctggggtaaccactcgtcctctcagtaccctgatgttaaccatgccacagtgaagacttccactggggagaagcctgttcgtgagcttgtctctgatgacgagtggcttaatggtgaattcatcacaactgtccaacagcgtggtgctgcaatcattaaagcgagaaagttctccagtgctctctcggctgctagctctgcttgtgaccacattcgtgattgggttcttggaacacctgagggtacatttgtttccatgggtgtgtactctgatggttcatacggtgttccttctggactcatttattcattcccagtaacatgcagtggtggtgaatggaaaatcgttcaaggcctcccgattgatgagttctcaaggaagaagatggatgccactgcccaagagctgacggaggagaagacgcttgcttactcatgcctcgagtaaattctaccacatccagagagcaattgccaccccaatgttttgaataaaaaaagaaactccaactccattcatagattctcactcagaactgctgcacgtcgcagtgcaggcgtgttgctggcttcgcccagcttctttttttgcctgtgatttgcacgacatttatatttattgaaatcttgc

SEQ ID NO: 1657 - DNA, 783 bp, Zea mays
  Clone ID: 700163335_FLI
cgagcgcgcggccccgtctgcgtcggcgtcacccgcgcccttccccaagtttctgagcgtaaggttggaaaacttgaactggaagctatccaagaaggtcgttatcttgcagatttcagatatgcatgcattggctattcaatgtacttaaatggcaaggaaactcctacgggggtacgagataagccacgtgcccatctgcctgtttgtgctggagtcgagctgttgatagatagaaaagtcccaacaaacgttaagaaagaagctccaaaaccacgtcaatataaaccagggcatgcaggagatgatttcttaacgaaatttcagaggaatgcaggtcttgtggccagtggtgtggctaagaacctgaatagagttgggacctacatcaaagacactgtcagtgatatgatgcagcctcaccgcaagcgtcccaaataaaacataggcctgtctctcctaaatcctgtatggaagtaaacattagaaattagatgatcggggaacatcggatcaatcacttcctcccatacacacccagcgcagcagtagcttagctttctgttggtttcagaaactctagagaattgagaaaagatctatggttaggaaaaatagccacttgaaacatgttatccactagctcatggggcttcgattccccctgtctcgccccattttgggagccattgttgttttcactaggcccctcctccggcaatgtacaggatggcaccatgtaatgaaacatcaaaacaaccacgttccgccccttctgacaat

SEQ ID NO: 1658 - DNA, 983 bp, Zea mays
  Clone ID: 700163352_FLI
ctgactcgcctattacaattttcaaagagcagcttaatcaagccgtttcagggcagctctctcctgaagcaattgtggagctacgtctgcaagcatacaatgagattacaaaaaatattgttaatgataatattttctcccaatatatgcacaagattctgccaactggcaactacctgtggaccttcaagaaacaatttgcaatccaagtggctctctcctgcttcatgtcgtatatgctgcagattggcggcagggctcctaacaaaattctatttgctaaaaatactgggaagatcttccagactgacttccatccagcttatgatccaaatgggatgattgagttcaacgagcttgttccatttaggctgacacgcaacttgcaagctttcttctcgaattttggtgttgaaggtctcattgtgtctgccatgtgctctgctgcccagtcagtggtttctcctaaacaaagccagcacatttggcatcatttggctatgtttttccgagatgaactgttatcttggtcgtggaggcggcctctgggcattccatcagtccctgtcgctgctggaatgatcaacccatcagatttccaacagaaggtggtaaacaatgtggagcatgtcatcagtcgtatcaagtcaatatcgccacattgtctggctgaggaggaggagaatgcaaccgagccacctcagtcggtacaaagaggcgttaccgagctggtggaagcggcattgtcgtccaggaacctgtgcatgatggatccgacgtggcacccatggttctgaaggcatccagcacctctgtagcctgaccaaactgacggcgtgtacagattttcatgtccggcaacgctggttgagactagaaaactcgttgcgttatgtagataaagccagggtgtcatcatgtgttcgctggtgtaatggagcagattagcttggtaattaatgagacattgcatttcttaactt

SEQ ID NO: 1659 - DNA, 887 bp, Zea mays
  Clone ID: 700163363_FLI
gcaaaccctaagcagggagttgatttatccgctgcagccatgagtaagttgcagtctgagtctgtcaaggatgccatctcccagattgttggggatgccaaggagaagaataggaagttcactgagactgtggaacttcagattggtctgaagaattatgatccacagaaggacaagcgtttcagtggctctgttaagttgccccatatccctcgtcccaagatgaaggtgtgcatgcttggtgatgcccagcatgttgaggaggccgagaagatgggacttgactacatggatgttgaggctctcaagaaaatgaacaagaacaagaagcttgttaagaggcttgccaagaagtaccatgctttcttggcatcagaggccatcatcaagcagattccccgtctccttggtcctggtctcaacaaggcaggcaagttcccgaccctggttactcaccaggaatccctcgagtccaaggtgaacgagactaaggcaaccgtcaagttccagctcaagaaggttctttgcatgggtgttgccgttggcaacttggcgatggaggagaagcagatccagcagaacatccagatgagcgtcaacttccttgtttcccttctgaagaagaactggcagaatgtgagatgcctctacgtcaagagcaccatggggaagccatacagggtgttctaagtatgctcttttgtgaagtctgctaggttctggcaccgaggttttattgaattaaacttttgttaagagtatgtttttggacgatcctatatttcgtcctggcgctactatgtttcagaatggtggtactactataagtatcctggcgctttaagtattgcttgaaaggatcaatataatttgcgtgtcatacccac

SEQ ID NO: 1660 - DNA, 805 bp, Zea mays
  Clone ID: 700163369_FLI
gcggtacgactctcattccaagactctccagaggtccgaaccgcagtcgtctcaactgcagtcacatatggatgacggcacttgtgcaaggctaaaggaggaacttgctgaaacaagccttaagctcaggcagatgagaggagaggagctccagaggctgagcgtcgaacagctgcaggagctcgagaagaccctcgaatccggcctcggctctgtactcaaaaccaagagccaaaaaatccttgacgagatcagcggtctggaaagaaagagaacgcagctgatcgaggagaactcaaggctgaaggagcaagtgacacggatgtcgaggatggagacgcagcttggcgccgatccagagttcgtgtacgaggaagggcagtcgtctgaatccgtgacgaacacgtcctatccgcgcccgtccaccgacaccgacgactgctccgacacatcgctcaggctcgggctaccactcttcagctccaagtgacggagatttgacatgtccggtagcggagcggtgccgattgcttgcccttctccactctagataggtctggattgggggagagcaagcactgctggatcgggaagacccaagtgaccaacgcgtcgcatcagaataaggcattttgagtgctgtatgatgtgtgtattctggctctgaaagtaagacctgcttttgttataatacatacatacaggcagcatggcaatacgtgacggggtatccgctgcctgcagtccgtgacctgtctgtcgtctctgtttctagtacccgtataatcaccctgcaattacctgc

SEQ ID NO: 1661 - DNA, 1038 bp, Zea mays
  Clone ID: 700163438_FLI
gtcaatggaggaatcatggcattctactttgtcttatggggtaaaggacttcttgcttgtggcccactagttgctctactggcagagtatgcaggtgctgttcttggagttctctctgctgctttatatggaaggaaagttaacatctggaaaaagattggtggacttgctgctatgttagtagcatattatctattgtcaattggatggtctacaagaacacattctcctttatatagctttggaagtgaaccaattgagaaggcaagacaaacatttggagtgaaagaaatggtggtgccaattaccgctgggatcttatctgctctgaggagagtattagctcggcgtgtctctctcaagaatcaacttaaaaggcggctccatgctataactattgcttctgctacttgttttctttttccgtttgccatgtgggatacaatcctaggctcagcgtccgacagcatagttaaatttcagctaccaaattgggcatacttgagtactgttttgttcggaatggtgcttatattctatgtcgacaatgttactgaagaaaagttgcatctggtcttctcttctccaaggcacttaatggtttcaacagggtgcatcatcgtgttggagatagtgtaccaaatggatttctccctttttggatttctggtctgttctgttattttgggattaggtatttttgaaacaacctccttggaacgctcaaagaaaagccctttggagacccatgaactatcgaatggggtgttccacaatcaattgccaattacagaacttccaagctgaagaatatatgacctgggtgagtgagatgcattgaaaaaaatttgtgtttgcttaagtatgatttttgaatgatttatctgttaggtcgagattgtggtgcaagttaatattagatagcatgtttcaatggtggactgttacggtttgagcattagtatcgattgcggaagaatttcttcctgacatgtttatatagcccctcaaccaatagactttaagccccttttccct

SEQ ID NO: 1662 - DNA, 752 bp, Zea mays
  Clone ID: 700163486_FLI
gcttcaccaatggaattttctttctccttggcaattctttttcttctttaacgccatgcccggcagcgggttcgctatcgacggcacattccaacactctgtccttcttcctcttcagctgcttcctcttcaccccaagcgccaatttcttgtcctccttcgcttcccgcgaacccttcttgtctttggatttccccatagcaacagactagtaaccaatacgaaggaaagcagccaaacgggtagctccgcagagatctccgtccgtgacttgccccaggctgtggcggcgtcggagaggggtgtcggcttcggctgtcgccaatcggcgtcggggaactccgatgattgttttagggtttgggccttggcaattggtattgggccttccagagtccagacagatgaacccaaataaaggtggttcccacgtttcagtgacttgcaaaggtggcgcgtggacccgacctgccagtttttagtgactaggctttgcgccttctaaaaccctagcttcagaacgaactaaaacccgcgatctgaagcgactagtcgaaggcggcggcggcgatggggagcgaccaggagacggagaagaagaagaccccggtggcactaatgcccatcgcgaagcccctcgcaggaaagaagctctgcaagcggaccctcaagctcgtgcgacgaggttcgtgagacttccttcctcgccctcgccctcgcccaattagattacgtgtttgttctatttggtc

SEQ ID NO: 1663 - DNA, 925 bp, Zea mays
  Clone ID: 700163562_FLI
gacagcagcagcagcagcagcatcgagctcgaggccgctccgccaccccgcactcgcctgtcgcctcttctcgctttcgccaccggggcagcgctccgccatggctggacctgctgttctcaatgagcgtatcctttcttccatgtcccagaaacatgttgctgctcacccatggcatgatttggagataggtggttgagattcctagaggcagcaaggttaagtacgagttggacaaggcatctggtctgatcaaggtggaccgtgttctttattcctctgttgtttacccacataactatggcttcattccacgcacactctgtgaggataacgaccccctggatgtcctcatactgatgcaggtattttaatggcgagaaagatgataagattatagcagtctgtgctgatgaccctgaattccgtcactacacggacatcacggacctcccaccgcatcgccttcaagagatccgccgcttttttgaagattataaaaagaacgaaaacaaggaggtcgcagtgaatgagttcctgccagcgaaagatgccatcaacgcaatcaagtactcgatggacctgtatggctcatacgtcatcgaaagcctgaggaagtgatctccagctgcttgattgtggttgtggatgctacaccattttctcaacagctcatccagagtaccgtagtacagacttaacacgaacgaactgtaatcgtgaccaagggatattattaccttctgttcatgttgaaacaatcagcagtgcctttctttccattatatgccataccgaatcaaggcaacttggccctgaaatctttgtggttcaagttaaaccagcactttgacagaacaacgattgctggatgcctggattactgttacataaatgaccattactgaacttcatttcttgctct

SEQ ID NO: 1664 - DNA, 412 bp, Zea mays
  Clone ID: 700163594_FLI
cacaagccatggatcgagatggtaggacagcattacagtatgcaatcaatggcggaacaagtgacgaagacattcttgcgttattacaggatcatagtagataatcttgcaaccaataccttcagtaaatcgaggcactcttggtgtggtcgactcaactaacaaggcaccagccccgccaggccccagcttgtcgtgcagacaatcctaaatttatggcatgaaagcaacctatgtacatgtcgttatagggcttcagtatcatgacgcgcctgttgtttcttcccccaccttgtgcttgtttaggataagtcatccatatttagtcatctggcaaacggtttggttttgtttgctgcaggtgatgcatagtaagcctgtaaatggagttatttctctttattttctagtc

SEQ ID NO: 1665 - DNA, 650 bp, Zea mays
  Clone ID: 700163627_FLI
tctccttccagtgtccgccgtcgtgcgctcgctacccctctccctcgaggcctttgccggcgaagagcgcccagtcgcccaccaggatgaagtttgttgctgcctacctgcttgctgtcctcgctgggaactccagcccctctgccgaggacttgacagccattctggagtcagttggctgtgaagttgacaatgaaaagatggaactccttctgtcccaactgagcggtaaggacattaccgagctcattgctgctggcagggagaagtttgcttcagtcccatgtggcggtggcggtgtggctgttgcggcagctgcccctgctgctggcggcgctcctgcagctgaggcgaagaaagaagagaaggtggaggagaaggaagaaagtgatgacgacatgggcttcagcctcttcgactaagcctgtgcaatagtcaagagtattgtttttgagtcgcggaagcagagggaagaaaaatcgtagtcatgtttggactttaactttgttttatgttggaaagtacttgaaagacttttcctgtggtaattctaggcgtaggttgctgtgctggttggggtttactggtgaaccagagtttttctatctcccactatgaatttgttacctcaagttacctggatgttcact

SEQ ID NO: 1666 - DNA, 1617 bp, Zea mays
  Clone ID: 700163741_FLI
tagatcatgaaagagacaaatgaatcataggcttgtaccagcatttactgcatggtacacacatatcagactagtctatacaatatacatggtctagccagcaaaacatgtgtcattgtttgggactaaaattgtaaaaccacatacaggattacaacaataacacttgagcatctttgtttgcatctatcgaagagattcttgaaccctgtaccaaattcttatacagtgcccaggtccgtttggaatgcaggaatttcacaagaattggtccagtttcacagggaaagcacaggaatagagggggggggggattctgcattccaatataccttgatttcgggtacattgtttaacgtagctttcgtatattggtgttgtcttgtaggtggtctcgtgtagtaccacgtaatcttgggttgagttgtgacacaatctgtacaataacttatcatttgagttgtcttgtagtaactcacatttacttaatttgtgtatagaacaataggaatgttttgatttgcatctcgacaagtcatacaatggtgctgaagcagtctcatattcctaaattttagtttatgaggtggttgtttcaccaaaacaacaacctctttctctcaccctccctcttctcgtccacatcataaaaaaaatcatatgtggctttgtatgagaccatgtacttgccctaatggttctaaaaaaatcctatgtggctttgtatgacgtaatggtgtcattagtaactggtgagtaatgatttgattgctgtatcaacatggttgatacaaactccactgatttgtgtctgccaacagatttttcatactccagctgatcgagagaagatcaagtcatgtttatcagagctaggagagatcagtgcttcctttaagaagatccttcattctgcgctggagcatttagtggcatctgtggcgccacgcatccgtccaatccttgacactgttgctactgtcagttatgggttggatgatgctgaatatggggaaaatgaggtgaatgatccatgggtgcagaagctaatacttgcagttaacactaatgttgcttggctccagccagtgatgacatcaaacaactacgattcctttgtgcacttgatcattgacttcattgtcaaaaggctggaggtgattatgatgcagaagaggttcagccagcttggtgggctccagctcgacaaggaggtccggtctctgatcaaccatttctcagaaatgtcccagagaccagtcagagacaagttctctaggctttcgcagatgtcgaccattctaaactttgagcgggtatcagagatactggatttctggggtgacaatgctggccatctgacatggctgttgacacctgcagaggtgcggagggtgttaggacttaggactgacttcaggcctgaagctattgctgctttgaggctctgaatcgtgcgtctatatatacttgttaattcttcatatatgatagagcaacaagatgtcttagaattttttgttacaatgacaaacacctgcattgtaaagaaatctgtgaacatactttttgtctgttatgagcgaattgacgatgtttgggtccatttaagctttt

SEQ ID NO: 1667 - DNA, 836 bp, Zea mays
  Clone ID: 700163822_FLI
ctaaatatcggaggcacgaaatgcgtgtcagattgagtggtggtgaaccagaaaaaccattggtaatacatgtgggccgttttggacgtgaaaaaaatttggattttctgaaaagggttatggagaggctcccaggagcaaggattgccttcgttggagacgggccatacagggctgagttggaaaaaatgttcatgggcatgcctgcagtttttaccggaatgctccaaggtgaggagctctcacaagcgtacgccagtgcggatgtatttgcaatgccttcagaatccgagaccctcgggcaagtagtgctggagtccatggcttctggagtcccagtcgtcgctgctcgtgctggagggatacctgatataatacccaaggacaaggagggtaaaacaagctttttgtttacaccgggagatctcgatgagtgcgtgaggaagatagagcaagtcctcagttcaaaggatctcagggaaaccgttggaaaggctgccagggaagagatggagaagtgtgactggagagcagcctcgaagaaaatccgcaatgagcactacagcactgcgatatcgtactggcggaagaagatggacaagagtaactaggcttccgtgttccgggttcttctgtcgctgccctctccaactagttgctgttaataaccaaagaatttgtacattgtacccaaacagctcgcgagtttgtgtggctggttgcattcaaatgtccacagtttgactgacgacggcttgtatgcaattcgtgtacaattagacagctcttaagattgccgaactgctaactcaggaaggttcgacacaaaattctcc

SEQ ID NO: 1668 - DNA, 760 bp, Zea mays
  Clone ID: 700163870_FLI
atgatgcattcggtaggatactttggattgccagttatgccggcgacatgtattacaatttcagagattgtgtctggttcaagcgagcaaatatttcctgaaatatttctgcaaagcttacatgagtgcagagtttgtcttagtgaaaatactggcagaagtttactccagctcccatgccaccatttgttttgcttgatgtgtatgaagtctaattgcagaattcatgtaatagaagggaatttaacccaggtctggttaagagaagatgcagttgcttacttcaaaaatatgtttgatggtggcctgaggccaacctcaaatgcatttaacaaagttatagatcgctgggtgaaggttgatatgctcaacgaggcccatgggttctttgatatgatgcttgaaaaggacatagatgatgttacggtggtcattttctactttggaggacaacatgtgggctgggaaatgaagacaaaatggttgtctaatggttggctatgtttggtatgtggtgcatctgatactcaagagcttcctctacatttcattaaacttgcaaaggatacgtacacatttgactgcatgttcgaaaaaatcggatatggcactgtgaggctttggtttacatgctgtccttactatttgttcgaagagattattgcaacgaggaaccatttttttaggaatgtgcttgagcattatcaatgtggcattgagatgatacggagggatttatttactggccattggaaacatt

SEQ ID NO: 1669 - DNA, 559 bp, Zea mays
  Clone ID: 700163873_FLI
cgacgactaagatgcaggagcacgcggggagcgacaagtcgtgcgtgtggcacgcgctggacttcgccgacggcgagctcaaagaggagatgtttgctatccgttttggatctgtcgagaattgcaagaagttcaaggacactgttgaagagatagctgaacagcaaggaaagagcgaggagaaagaaaatgatgaagtctccactgccgcttctgatttggcacagaagttaacagtggcagagcccagcaaggaggaaaatgcagagaaagaggaggctcctgcatccgatgataagaaggatgctaaagagtgaaggttgaaggcaaacaagggtcaaatggatgccattccattcatttcgtttccaaggttcagcttccccgcaaattttcattgtgttttctccgagatgaatgtttgtgttcggtgaaatcagagtcgtcagtcatctacatagcttttcttggttgatagactgttattttaagtcgcatgtttatctgggatggctggggtcagcatgtttgtacaattatttggagttgcttttggaat

SEQ ID NO: 1670 - DNA, 1468 bp, Zea mays
  Clone ID: 700163879_FLI
cctgcctcctccgcatccgcgccccctcgcttagcctaaaccgcggggcagctagtctcgccaccgcaggccgcaccggtcatcacaccggagcgcacgcggggagcccccgtagagttccggggcgaccaggccaactaacgccatgaaggaggaaggcggcggcggggacgcggggttcgtgcgggcggaccagatcgacctcaagagcctggacgagcagctggagcgccatctcacccgcgcctggaccatggagaagcgcaaggaggaggcctccgccggcgctggcgccggcgccaggcagcaccagcagtcccggcgcccgcggagggaggactgggagatcgaccccgccaagcttgtcgtcaagggcgtcatcgcccgcggcacctttggcaccgtccaccgcggcatctacgacgctcacgacgtcgcagtgaaactacttgattggggagaggatgggcatagatcagaacaagacattgcagcactaagagcagctttttcacaagaggtctctgtttggcataagcttgaccatccaaatgtaaccaagtttattggagctataatgggtgcaagggatctgaatattcaaacggaaaacggccacattggcatgccaactaatatctgctgtgtcgttgtggagtaccttcctggtggtgcactaaaatcatttctgataaagaacaggagaaagaagctagcttttaaggtcgttgttcaaatcgctcttgacctcgccaggggattaagctatctccattccaagaagattgtgcaccgtgatgtgaagactgaaaatatgcttcttgacaaaacgagaaccgtgaagatcgctgattttggtgttgctcgccttgaagcttcaaatcccagtgacatgacgggcgaaactggaacgcttggttacatggcacctgaggttctcaatggaaatccctacaacaggaaatgcgatgtttacagcttcgggatctgtttgtgggagatatactgctgtgatatgccatatcctgacttgagcttttctgaggtcacgtctgcggttgtccgtcagaacctgaggccggagataccacgctgctgcccgagctctctatcgaacgtgatgaagcgctgctgggacgccaaccccgacaagcgacctgagatggccgaggcggtgtccatgctggaggcgatcgacacgtcgaagggtggaggcatgatccctgtggaccagcggccaggatgccttgcgtgcttccggcagtacagaggtccatgacagataggtggaaacctgttggagctgcggcctctagatctcgtggatgccgatcgatcgcgtgttgttttctggggaagcaaactggttaatggagctagcccgccttaccggctcgtgtaaatcctctgtccatcaattctgtaactctgttttatcgattaatgaaaagaaccgggcttgctcgac

SEQ ID NO: 1671 - DNA, 1500 bp, Zea mays
  Clone ID: 700163882_FLI
gttctgccgccaattcccttgcctccagacttcaaatccccaccaccatcgaacctccccaacccggcaaatcctaaatccaatataggctaaccctagccgcccatccgcccgccatgaaggcgtcgatcaagttccgcgacgacgaccgaccgctgctgcgcgccaaggtgccgattggcgtgctggggctgcccttcctctcgggcctcgcggcggggggagacgccaaggacctccgcttcgacctctccaccgccttctcctctggcccggcgctccgcctctcataccgccccaacgaacccctccagcctttcgccctctccgtccgcacggggctggggccgctggggtcccctgcccgcgccccattcgccctcgccgccgaattcaacctcacctcctccaacccgcccgccttctcgctcctcttcaagccccggatcggggacttcgccgtcgccagctccgtccgctccccgccgacaccgccgcccacatccactccgcccccgctagcgatcaagatggtcgacctcaccaccaacggcgacgaccacgactgcgaagcacacggtaacggcttctcctttaacgggaatgtattgggggcgaacgtggcggccgtcaccgggacggacggcggcggcggcggcgtaggcgcgctgctgtccgggatgcggctcacgaccaggagcatgctgccactgtggagtaaagcgagcctgcggttccagtgggggctgcgtgtgccgccggagatcaaggccacgcttgcagacaacgggtacgggcgcaaggctgggagcctcgccatcagcaagctgccgctgctggtgatgaacaagatcaccatcgagcacacgcccaaggtgccttcacagtctgaaacggacaagaagaggaagaaagatacaccaccggcagccaaggatgaagagttgtcattcatgaagaggcaactggataagctgaatgtggagaacacaatgctgcgtcgtgcagttgaggacttgcgtgcagagattggagccggcaaaggcgatgatcgtaagctgccaacagcagtgccacctcaacaacattctttagtgtcgaaaccagatcgccatttccacatcaatgcgaaggaattggtagacagtgggacgaaaccggcctcaaatgaagcaagtgaggagttgaagaaggtgcttgagggccggcggaagtaagaagcacctagctagggcttgctgttattgcaagccctacattatgacatagctgctgactgctgtgtcaggttttgtggttaataataatacttcctcgctggagaagattgctaaggtcagtttagcccctcgctggagaagattgcaagtgaggttgccattcgccataggtgtggtagtaattttgcctcaattctattttcattgcttgtcttaggatattctgttctgtataaattttcatcttttgatctaaaatgaatgaaggattagttttttc

SEQ ID NO: 1672 - DNA, 410 bp, Zea mays
  Clone ID: 700163910_FLI
caagcccctaaagaaggcatccgcttaagaatgtattgggaagttcactggacatgaggttcatcttcgtctggctctgctgatacctgcaaggattgctgctgctgctgccgcccctggatgtgtgtttgatcagtgactggctgctctgctccatagaagatgaatgaagagagagatggtgaagaaggctttggcaaatggcaattgccgcagcaagccatgtcggcgccactgaccggcttagtgattggtataatttggtgtggcagcagccaggattaatgcgctggtcttttatctttactactagtttggtctcgtccggtatcttatttttctttccccttttcgagtctgtactgaaactgctgagagatttgcagttttgatctatcatatcctttggt

SEQ ID NO: 1673 - DNA, 1285 bp, Zea mays
  Clone ID: 700163911_FLI
gggttttcatttgaaggtgagttatgcggatacggtgtgctgctatttgcccctgtatttggggactggtgtacgacatttgatttgctggtttttgtaggcaatttgttgacatatgaatgcgtgaagcattggatcccaaagaactccaaaatgcgataaggccttgaatggactagtatcaggattgggagaccatcctgagaagctccatcaagcatgccttgttcacgcgtttcttaagaggcccttttcctgcactgttgatggttgcccctttagctatagcaggaaggatcatttgaacagacatttacttactcatgaagggaaactatttgtgtgccctgtcgaaggatgtggccgtaagttcaatatcaagggtaatatgcagagacatgttcaggaaatccacaaagatgtctctccttgtgaaagcaagaaagaattcatctgtccaaaggttaactgtgggaaggctttcaaatatgcttctaagttaaagaagcacgaagaatcacatgtccagctggaatacacagaagttatgtgctgtgagccaggctgcatgaagttcttttcaaacatggaatgcctgaaggcgcataaccaatcttgccatcaatatgttcagtgtgatatctgtggtacgaaacagctaaagaagaatttccagcgccatcatcggatgcatgaaggttcctgcgtcactgagagggttaaatgccacatcgaggactgcaaatgttcgttctcgaagaaatccaatttggacaagcatgttaaggcggtacatgagcagcgtcgtccttttgtgtgccaattctctgggtgtggcaagaggttttcttacaagcacgtaagggacaatcatgagaagtcaagcgctcatgtgcacactgagggtgattttgtcgaggctgatgagcagcggccacgttcagtaggtgggtgcaagaggaaacccgtatctgttgagagtttgatgcgtaagagggtagccgctcctgacgatgggcctgctcatgctgatgcaactgaatatttgagatggcttctgtcggtttgattggacgttcaagtgcactttgtgtagttggaaacatcagcgatttacttggcatgtataggaagatgaatgtctctagtatgttatgtaaatgtttatgtacggtatcagaaatacagatcattggacctcaattataaaggcaatatgctgtattggcaagatcttgaatgtaagagcggttgctcatgatcattagatctatgtgtcttcagc

SEQ ID NO: 1674 - DNA, 571 bp, Zea mays
  Clone ID: 700163914_FLI
atagctttgttttttttctaggattagctgcgacgaggctgttttttcttggaacagttacattatcttttggtgtggtactgcttgatttaatttgtgttttaacacttcaataggaggtgattcgtcagtacaagaaatttgtatcctccttttcttgacagaatctatgacataataacatctcaagcatgcatggcaatgaggcacaatcaggattgagaacggatgggctacaaagttctttgaagatgctgctagaggtagagcgcccacacttatgttcatgacttttgttgataatttcccagcttgtcgacaattaaaggctctcccattcttggatccactgaagcattttagaggtgctctattctactatcaaacgtttgagagcacctagagggggggtgaataggtgatcctgtaaaaacttgaaacttgatgccacaaaactgattaggagttagcacaataaagccaagtggctagagatgagttcttgcaaaacacaataaccacaaagagatcaacacagagatgacacagtggtttatcccgtggttcggcc

SEQ ID NO: 1675 - DNA, 1180 bp, Zea mays
  Clone ID: 700163925_FLI
catcaatggataaaaccgtacggttgtggcacatgtcaagcacttattgtttgaaaaccttctcacacactgactatgtgacttgcatccagttcaatcctgttgatgatagatacttcattagtggttccctggatgagaaggttcgcatttggagtattccaaagcgtgaaatagttgattgggtcgaccttcatgaaatggttactgctgcctgctatactccagatggaaagggcgctctggttgggtcccacaagggcagctgccatctgtatgatacatctgatgacatgctttgctacaaaacacagatcgacctacaaaacaagagaaggaaatctagccagaagaaaataacaggatttcagtttgtcccaggggattcttcaatggtcataatcacatctgcagattcacggatcagagttcttgatggttttgagctagcgcataggtttaaaggattccgaaacacaagcagccaaatctcagcttgtttagctggaaatgggcggtatattatctcggcaagtgaggattcccatgtatatatctggagaaacaatgatggtccgaaaccaagtagaaagaagggcattgtttctgtcacagatagccatgaatacttccactgccagagtgtgacagttgctgttacctggccttttgccagcaccgcaatgacttgtttaatgaaccccgggaagcaagaagagcttgagcgtgggtctgagccgcaagatctgcaaaccaaacttgccaaggcacaggagatgccagatgttgagtaccggagcacaaatatcacgagtaacaactcgaatcataataatggtgaccggacatctccgacttggcctgaaaaacttaacacaccaccaaatcaaagtctcagggctactacctgccatgccaacgagggagatcaagctctgaatcggtcggcctggggcctagtgattgtcacagcaggccgtggaggtcaaatcagaacatttcaaaactttggttttcctgtaagagtatagcatgaatatgaatacctaaggtaatagtcactgccattcaggagtgtagtttgtgtatagataggagatagtgggtgagtttcacactattcagggattgggtctgattgttccttggcgtgcatgctagagatcagaatcttcatctg

SEQ ID NO: 1676 - DNA, 809 bp, Zea mays
  Clone ID: 700163948_FLI
cttcaatcgagtcaaaggaaagcgccctagtatggcactatttggacgcggaccatgatttcggttccttccaagcaaaggagctacaaggtcatcttgagagggtgctatcgaatgagcctgttgttgtgaagtgtggccattatattgtagaggtgaaaccacagggagttagcaaggggcttgctgtcaacaagctgattcacacactggtcaagaacgggaaggcaccggatttcctgatgtgcgtcggcaacgacagatctgatgaggacatgtttgaaagcatcaacggtatgacctccaacgctgtcttatcacccacaatgccggagctgtttgcctgttcagtcggtcagaagcccagcaaagcaaaatattatgtggacgacaccagcgaagtaatcagattgctcaagaatgtaacccgcatcccctcgcagcggcaggatgtcagtgccagccatgggcgtgtgaccttcagaggcgtgctcgattacgtggactaggcaccaccacttagttactcgaaaaattattagctgggaagcatgtaaattccaccgtcttctgcctctcaatggttcattctaggagggtgtgttaatccagaattgtagtgtagcctacatgaatcgtcaccattacacaaacagcgtaaatgtgttcgccgtttcagggttcaggtgatgtgtgtaggcaattttggtatggaggttcgcggtgtgaaagggaggcctcttgttcaaacagtaattggttgtctgaatctgttctcctgctgctatattgatgattgtgttagttct

SEQ ID NO: 1677 - DNA, 607 bp, Zea mays
  Clone ID: 700163949_FLI
ggcagcttgaaggaggccacagaacactagagtagaacaaaataaagaattagtgaagaacatcatcaagcagcagatttcaggaatatatgaggccttggagttgagggatggaggatctgattatcttggcaagggtattcttaagcttttggcttaaaatttgagaggaggagatggcggtcacgatcacgtgggtgaaggcgaggcagatcttcatcagccgcggcaaccccaccgtcgaggtttccacattgcagacacacaagagtccagcctgcgccaacgctcctgcagctatctgcactgaagatcaggacacgaagatcgcgagctttatcaaggctcgccatgtgcggaaggtgtattttagtgagatctccaagatgaagcattaggggggggtcaatcgacccagattttacgtgtatctaacttagtagggcacccatgatctataatttattctctgtagttgtagcaacgacctagagctgtcattctgtagcacattgtgtaacatgtaggagagagatgaacacatatccccattctttctactgaaacaccagaaatagttgctcttgctccataattcgttaatctg

SEQ ID NO: 1678 - DNA, 956 bp, Zea mays
  Clone ID: 700163975_FLI
ccgatccaagagcgagccgacgacgacgagcagcgagagagatgaggccgtccatcgtgctgttcggggactccatcacggaggaggcgttcggggagggcggttggggcgcgtcgctcgccaaccactactcccgctccgccgacgtcgtgctgcgcggctacagcggctacaacacgcgctgggcggcgcgggtcgccggccgcgccgtggccagcatcgccggcccagtctcggccgtcaccgtcttcttcggcgccaacgacgccgcgctgcccgaccgcgcctgtgcgctccagcacgtgcccctcgccgagtacaaggacaacctccgcgccatcttcgcgctcctcaagaagcggtggccgtcggtggtcgtcatcctcatcacgccgccgccggtcgacgaggacgggcgtctgcggtacccgtacgcgcacgacttctccggcctgccggaacgcacgaacgcggcggcggcagggtacgcgcgggcgtgcgtggaggtggcgcggcagtgcgggctcagggccatcgacatctggtccaggatgcagaggttccccggctgggagaagtcgttcctgagggacgggcttcacctgacgccgcgcgggaaccgggtgctgttcgaggaggtggtgttcgcgctcaaggacgccaacctcagcctggaggcgctgcccgccgacctgccgctcttcagcgacatcgacccggataatccggtcaagtcgttcgaggaccaggagtgaagaaggcccatgatggcaagacaacggcggcagcttcaagtctgggaactctattgttaattagaaaaaaaaatctgggaactgtgtcctacagtgcatggaatgttctggatggaatttttttagtcgaagcataattcttgaaatagtgtcttacgcttagcagtttgctactttgctgtataagtttgtttgaggtcc

SEQ ID NO: 1679 - DNA, 1806 bp, Zea mays
  Clone ID: 700164010_FLI
caagctcgcctcgcaccagaaacccgcgaatcaatcccgaatcccgatcgaccggcggcgcgggaggcgatgccggacaaggcggtggacgacgtcatggaggccgcggtgggggcccacttcagcggcctccgcctcgaggcgctgcgcctctccacctctgcgccctcttccccttcctcctcccccgccgccgcggcgcacacgcactccaacggagccgtctacgccaacggcaccaccgagcttccctctcctgccgctgcccggcagccattcgtcatcggggtttctggagggacggcgtcggggaagacgacggtgtgcgacatgatcatccagcagctgcacgaccaccgtgtcgtgctcgttaaccaggattcgttttaccgtggccttactgctgaagagtctgcacatgcacaagactataattttgatcaccctgatgcatttgatacagagcaacttctagaatgcatggggcagctgaaatgtgctcaacctgtaaatgttcctatatatgatttcaagaagcatcgacggtgttctgaaagctttagaaaggtcaatgcatcagatgtcattattttggagggcattttagtgttccatgaccagagagttcgcaatctgatggacatgaaaatttttgtagacacagatgctgacattaggcttgctcgacgaatcagacgtgatacagttgaaagaggaagagatatcagctccgtgcttgaccaatatgggaggtttgtgaagccagcgttcgatgattttgttttgccttcaaagaagtatgctgacgtgatcattcctcgaggtggtgataaccatgtagcagttgatctgattgttcaacatatccgtacaaaacttggtcagcatgacttgtgcaaaatctatccaaatgttcatgttgttcaatcaacttttcagatccgaggaatgcatactcttatccgtgatagggacatcaccacacctgactttgtattttattcagatcgattgatccgtttggtagtggagcatggtcttggacatttgccatttacagaaaagcaggttattaccccaacaggatctgtttatatgggagttgacttttgtaagaagctctgtggagtctctattgtgcgaagtggtgagagtatggagaacgcattgcgtgcttgttgtaaaggaataaaaattgggaaaattctaattcatcgtgttggagacaatggacaacagcttgtttatcacaaactgcccatggatattgctgaacgacatgttctacttttggatccggtgcttggtacaggcaactcagtagcccaagcaattgaccttcttataagaaaaggtgttcctgaggatcggatcatttttctcaatctcatctcggctcctgaagggattcagtgtatctgcaagcgatttccttcgctgaagattgttacatctgaaatcgattatggtctgaacgaggaattcagggtgatcccaggactgggagaatatggcgaccgctacttcggcacagacaattgatggatcataccactctatggctgtgtgaagatctcacttggtccctggatagggatggtatcttgcaagtaatatttaatatggaggcgtaattgtgtttaatagtcggcatgccttagtaacatgtagaaccttctgcataaagcttgaccaaggacagcgggatgctagagaaggacctgtgaacggagaacgtggtgtgtgttttgtcttgtacgggtgcagaaacattgatgttttcaaataagtgtgtttgatccaaat

SEQ ID NO: 1680 - DNA, 853 bp, Zea mays
  Clone ID: 700164059_FLI
ccagaccaaggtgttctatttcgatatcggggagaacaagaggggccgattcctcaaggtttccgaggcctctgtcaaccgaaaccggagtaccataattgttccagctggcagctctggtgaagagggctgggaagcattcaggagtgtactgctggagataaataacgaggctaccagattgtatgtcctaccaaatcatccaaatcagcaacacatggagccgccagagcgtcttcctggtctgtccgatgatgtgggtgctggatttatagcaggacatggtagccagtctgcttctgggccagaggtagatgtcgaacgcttggttgatctgcctcctcaagaagaaattagtggcatgggtatgtctaaggtgattagggcagatcagaaaaggttcttcttcgacctgggcagcaacaacaggggccattatttgaggatttctgaggtggctggagctgatcgttcgtctattatcttgccgctctcgggtttgaagcaattccatgaaatggttggtcactttgtagatataatgaaggacaggcttgaaggaatgacaggagctaacgtgcgcactgtcgagcccagccagagatgattacccttgactgtgggcctggcaagactgctgttatgcctcctgtaggtttgccatgtggtgtgtggtaatgtagatcacgccgtattaattcatctggtggggataataatgtctccttctctttattttttgaattcagtggcgaggattgatttgtttgggacttttttctttctttcagtcggaggaataatatgcagtgtattgttcgtggggtggtataattgtggttgctgcagtgtt

SEQ ID NO: 1681 - DNA, 476 bp, Zea mays
  Clone ID: 700164083_FLI
cgcaaagaaaagaagtaaaacgaggagaaagcacaaaagttcatcagagtcaagttccagctcatcttcagaatcttcaagcagcgacgatgagggtaggggttcaaggaagtccagatcacagtcgagatcaaagagaacaaggaaggaaaagaagagtcggtcaaggtccaagcacagaggcagtgaaagcgaggaggaaggcctggtacgcctctctaaattcttcgggaagtaaggagtagacgctgttgtacccaagacgcccttttcattttgaaacgtagattggtgggtttggatgtatcattcaacacagattacttctgaaggttgagcgagccgtttaccatggtgttctcaatatgatgctcagctgttaagagggtttggtcaagttgtgtggcttccaaaaactttgtaagcaactggtaagtcattattaaatcgctgtaccttggaggatttgatgccat

SEQ ID NO: 1682 - DNA, 1711 bp, Zea mays
  Clone ID: 700164115_FLI
cgttggggaagcccaccgcgccgctcatctccttccgcgtcgacctctctgggatcttccgcgagcagatgtacgtcggcttctcggcgtccacgggagtcctcgcgagctcgcactacctcaggggttggagctttcgcctcggcgccggcgccgcgccggcgctggatctctcgtccctgccgtcgctgccccagctcaagagctccaagaaccggacctcgctcatcctcgccgtcgcgttctcggcgttcgtggcgctcgtcgtgctcgccggcgccggcgcgtacggtgcgtaccggtacaagaaccgcgacatcatcgagccgtgggagctggactacggcccgcatcggttcaagtacgccgaactccgccgcgcgacgcgcgggttccgcgagcgcgaggtgctcggatccggcggtttcggcaaggtgtaccgcggcgtgctccggaaatccggcgagaccgtggccgtgaagcgcgtgaaccacgagtcccggcagggcctccgcgagttcgtggcggagatcgcgtctatcggccggctccgccaccgcaacctggtccagctccagggctggtgccgccgccgcggcgacctcctcctcgtctacgactacatgcccaacggcagcctggaccgccacctcttcggcgaccacctcaaagcgtcgcgcctgacctggccggtccgctaccgcatcctccgcgacgtcgcgtcggcgctgctgtacctgcacgagggatgggagagcgtcgtcctccaccgcgacgtcaaggccagcaacgtgctcctcgacgccgacatgtcggcgcggctcggcgacttcggtctcgccaagctccacgagcgcgggaccaacccgagcacgacgcgcgtggtgggcaccctggggtacctggctcccgagctgacgcggacggggaaggccacgacggctgccgacgtgttcgcgttcggtgccctggtgctggaggtggtggccgggcggcatcccatagagccccgcgcgccgcccgaggagctggtgctggccgagtgggcgtgggagcggtacgcggcgggggaggtggagaaggtggtggaccgtggacgcccggctcgccggcgcgtatgacttcgcggaggccgccgcggccgtgaaggtggggctgtggtgctcgcacccggcgccggcgacgcggcccaccatgcgggaggtggcgaggtaccttgacggcgcggatgccagcgaggtgccggagcctcctcccccgcctcccatgccgccggcatactctggcgaggtcgggttcgacgatttcgtgcactcgtacccgtcgtcgtcgttcgagcgcgccgccgcagctggcggcggctgggacggcgggacccagatgtcggtcgccacgttccccttctcgtctctgtccatgcggtcatctcacgtcagcacgtgatgcatcgaaattcatgggcccgcttgccagtaagatgacgacttcgtcaaacataatagtgtgaccttggagctaacttgtttatatctgagctgtctattcttttactgcactcagtaacggcaaatggctgagtgacagttggtagcctcttatttaatctttttctttggagtttttgaggagtgtttggttccaaattaagtatatgtaaaatcgaattttgaagggtaaggataagtattaaatatagtctaattacaacact

SEQ ID NO: 1683 - DNA, 616 bp, Zea mays
  Clone ID: 700164124_FLI
gaaacacaaactgatgaaaaattctgagatatgcattctgcattaggtccttcaacacacatctttgtgttctgtgctcaggtagttgctgctggagacttgtgtgcgatatgccaagaaaagatgcatgttcccatccttttgcgctgcaaacatatcttctgtgaagattgtgtatccgaatggttcgagagggagcgaacgtgcccgctgtgtagggcattggtgaagccagcagacctccggtcgttcagcgacggttcaacaagcctcttcttccagctattctagtccgagacagccaacagagcggcaagctggagcgctccacccgatgatgcagatgttagcggtgtgtgtgcgtgtgttgctgcttgcaacgcctgcgagcagtgcggccctgatgcggtgctgggagagtgtacaccaagctgaagctgatggcgtacatgattgtgtatcgtgactgcacatattttcatcatcccctgtataggctctcgcgttgatgcttgagcacctgaggattttacctgaccatatacggcacaaattattacataaatagaaatggtgagtatatacaacgataaatcaatacggtccttgtttgtgc

SEQ ID NO: 1684 - DNA, 176 bp, Zea mays
  Clone ID: 700164129_FLI
cttccttctaataagacttctctctcaccctcggccccaccttcacgtgtgattggaggtgtttgtcgcttttgtaataattataatgcaggatggcatgttgcataaattgctccccaaaaaaaatcttatctttcacaagaaatctataatcccttagcagccttgcctttcat

SEQ ID NO: 1685 - DNA, 756 bp, Zea mays
  Clone ID: 700164138_FLI
caattcagagcaatgaataagctgaaaaagatggccctaaaggttattgcttcaaaccttaacgaggaagagatcaaggggctaaagcaaatgttcatgaacatggacacagacaatagtggcacaatcacatacgaagaactcaaagcaggattagccaaacttggatcaaagctgtcagaagctgaagtaaagcagttgatggaggctgctgatgttgatgggaatggatctattgactatgtggagttcatcactgccacaatgcatagacacaagctcgaaagggacgagcatttgttcaaggcattccagtactttgacaaagataacagcggcttcatcacaagggatgaactggaatctgctttgattgagcatgagatgggcgacacgagtacaataaaggagatcatatcagaagttgacacagataatgatgggaggattaactatgaggagttttgtgcaatgatgagaggagggatgcagcagccaatgaggctcaagtagcctgttcccttaatagaaacggtgtaccactagttactgttcactttttttcttcatgtttggtacttggtagtcggataaagcttacaatgggtgttgcttttgtattgttgagagatgattgtctatacctttttttccctttttgctcgtgcttgttgcattgtagtatcttgaacgtcccttcctttttttaagtttgtttatgcaagtacatctaatacaaagtgcattttgtctctt

SEQ ID NO: 1686 - DNA, 1350 bp, Zea mays
  Clone ID: 700164210_FLI
ggcaagactatcacccttgaggtcgagtcttctgataccatcgacaatgtcaaggccaagatccaggacaaggagggcatccctccggaccagcagcggctcatttttgccggcaagcagctcgacgacgggcgcacgctggccgactacaacattcagaaggagagcaccctccacttggtgctgcgtctcaggggtggcatgcagatcttcgtgaagacacttactggcaagacgatcacccttgaggtggagtcctcggacaccatcgacaatgtcaaggctaagatccaggacaaggaaggcattccaccagaccagcagcggctcatctttgctggcaagcagctggaggatggccgtacccttgcggattacaacatccagaaggagagcaccctccacttggtgctgcgtctcaggggcggcatgcagatcttcgtgaagacacttactggcaagacaatcacccttgaggtggagtcctcggacaccattgacaacgtcaaggccaagatccaggacaaggagggcatcccaccggaccaacagcgcctgatcttcgccggcaagcagctggaggatggtcgcactcttgcggattacaacatccagaaggagagcaccctccacctggtgctccgcctcaggggtggcatgcagatctttgtgaagacattgactggcaagaccatcaccttggaggtggagtcgtctgacacaatcgataatgtcaaagccaagatccaggacaaggagggcattccaccggaccagcagcgcctgatctttgctggcaagcagctggaggatggccgtaccctcgccgactacaacatccagaaggagagcaccctccacctggtgctccgcttgcgaggtggtatgcagatctttgtgaagaccttgactggcaagaccataaccctggaggttgagagctccgacaccatcgacaacgtgaaggcgaagatccaggacaaagagggcatccccccagaccagcagcgtctgatcttcgctggcaagcagctggaggatggccgcaccctagcagactacaacatccagaaggagagcactctccacctggtgctccgcctccgcggtggtcagtaagccatgggtcatttaagctgctgctgtacctgggtatctgcgtcgtctggtgccctctggtgtacctctatatggatgtcgtcgtctaataaacatctgtggtttgtgtgtcatgaatcgtggttgtggcttcgttggtttaatggacctgttgtgtcctctgtgtgttgtacccaaaactcttctgcagcagtatggctcgaatccttatgaagtttgatgtttgaactt

SEQ ID NO: 1687 - DNA, 1100 bp, Zea mays
  Clone ID: 700164276_FLI
agagaaaggagggcctgaggcactctcagtcggagactgacaccaaacgagccaaacaacaatatgctcagagatctcgtgtccggaagctccagtatattgcagagcttgagagaagagttcagtccttacagacagagggaatagaagtaactgctgaaatggattttctcggtcagcaaaatatcatgttagacttggaaaataaagccttgaagcaacggcttgagagtctatctcaggagcatctcattaaacgttatcagcaggagatgtttgagagggaaattggccgccttagaacattgttccagcagcagcaacagcaacaacatgtgccgcagcagcaggctcctacccatagccgcagtaacagtagagacctggattcgcaatttgcaaacctgtctctgaaacacagtgatcccagttcagggcgcgacgctatctctggcctccgcatttaagatccctttgttccagcttttggatccctgagctttgcagaacctgctgcccctttatgccactctttgtggttgttagtagcatcatgagaggagcagcaccggtgaaccgggaatctcatcccacggtgaataaagctggaaaggttaataactgtggatctggtccttagttctttcagaatgtgcacctggcggtcatcgttagcttctgtccattattgatgcttgaccagtcggaggtgtttaggatctgtttgcagattgatgacttccatggatccttgtatcagtttgaatctagaacactaaggttctaatccattcctttttagtcgattctctgtcgagtttaggcgccatggcccttgtattagtgtggcacacgaatggaatgtgagctggtcctctttaggttatgccacatcctggaaaaccgttgcgtgaggagttgtcgggccatgtccattgtcctaataagatggtgaggttgaagggctggtgcagttcagtttcattttatttgtgatgtgcacagcaagatattggatactttgggttcttacatttatttgagcactgtatttttatcgcattgtgatgacagtatattccaagttcattttagctgcc

SEQ ID NO: 1688 - DNA, 674 bp, Zea mays
  Clone ID: 700164312_FLI
aaaatggaacaagggacgaatcatatgcttgaagtcccaactaaaaaggctgcagtcggccgtagactcctcaaatgggtctcttgcagctggttttgtcgacatgacaaactcccgtctgccggctcccggttccaagatatacacaagcgaggaccaattggataatggttcacgccatttgcctgacgaaccgttggcggaggaaaaggagtcggagcttctcgcactgtgagctgctgcccttcgcatctacagttgtgatgccattggtctgaacaaggggagacgagatgcaggataccaagcgtattttcggagttcgtccattcagatctccgtctcggtctcagttatccagggtgggtgctacatactgcagattcacatcttgcctggaatttatttggctggggcttgacagtcaatgctgaacttgagttgcatttcaggcaggattttagctcgttgtagggagaacgagcttatggatgttgttgactgtgtatggcatccttgtgcgtccagctcaagtgctcaactctgtaaaacatgatagcctgataagtctgttgatacgatctgaatcctgatgatggtaataatacaaatcacactacaggcactatccccatcatcaggattcagatcgtagtgtgatttgtattattacc

SEQ ID NO: 1689 - DNA, 704 bp, Zea mays
  Clone ID: 700164355_FLI
ggagtgttttccaggcggcggcgcggtagcgtgaaaccgggcgaccgagcaagcgacggccatggcgttctggcagacgcgcgattttctcttctgtggcatatgcggcaccctcctcaccttcgactccgtccgctccgcctcctgccctctatgcggcttcaagcgcgatgccaaagaaattgaagggaaagaaatacagtacacgatgaccgccgaggatattcgaagagggttaaagacacaaacggaggacgttgttgggcaaagaccagtgacaaataaagcctgtccaaaatgcgaccatccaaaagctgaattttacaacatacagatgcgttcagcagatgagggagagacgacgttctacatgtgtaaaggatgcggctgtaatttcaaagacgaatgaggagttatcctaccacttctacggatatatggcattggtgccgaagaaatttccagcgttgacagactagtactccctccgccctttttttatttatcatcgtctagttcaaaaatgaacggccgataaatattcgagaattgcaatctactccttgacattgttacattacatggatgcgcagatccatgcgttgtgcaaactttcttttgatggaacctgttttgtattttattcgagtgtgtagatgtctacttgcaacctttttacatttattccaaactataagacgttt

SEQ ID NO: 1690 - DNA, 442 bp, Zea mays
  Clone ID: 700164411_FLI
cgtcgccgagcaggaggcgtccgggtcgaagccgtcggccgtggccgacgtcgaggcgacaatggtggagagccacgccaacctgcgggtgctgtcccggcgccggccgaggcagctgctgcgcctggtgctggggctccagggccaccgcctcaccgtgctccacctcaacatgagcagcggcgcccacatggtgctctactcgtttagcctcaaggtggaggatgattgccagcttacctccgtgggtgagattgcggctgcggctcatcacatcgtcgagaagattaatgaagagcaaaacaaggctgcagcttagaaattagaatagaatcaagagtgctttcctgcacgcaacctttttagctcctgtagcaagtgaagtgattcctttttgtgagaacgacgaataatgtatactaatcagcttacctcgtcttcg

SEQ ID NO: 1691 - DNA, 861 bp, Zea mays
  Clone ID: 700164437_FLI
gtcgctgcagaagggagcaaacaaagggagatgaagctcagagtcgtgtgcaggaagctgtatgactatgtgcggtatgacctcaaggagatagccttcccgtcgtcactgccggaccctcctcacatcaagaagcggcccaagctctcatggcatgaacgctggtgcatcctcaaggaggccacccggctgtacggcgcgtcatgggtccgggacatcggccctgagctgaggcccaacgactacaagaaggcagccgaggacgtggaggagcagtcgtccaatggcagccaccccagctctggtagtgacaggaaggggaaggcgagcagcgagccaactgtgctggaggacctcgctgtcgccgctaggggtggcgcagagacgctgaagcctgccctgcggcggatttacatggcccgcgcgtccacgtacaccgacgcgatgaagaatttcgtggagacgtaccaggaggggctcaaggaccagctgcaggagaaggctcatggcggagaaggtggtggtggtggtggtcgttatcatcatcaggagcagaaggaacatggcaatgaggatgaggcatcaaagccacctccgccatgacatcatggttgtgttctgccagtgatggcatcaagtagtacttatttcagttcatccacccaaagtagaacaagatggttttggctagcactgtagagtgcagaccctgttggcactgcagtaggagtgcttgagaaggatcaccaattttgcccggtttatatttctaccaaatctcaatccgggtcctgccgaactactttacttgtaaactttggctggtgttgcctataatgatgtgtgatcctcgttactctc

SEQ ID NO: 1692 - DNA, 656 bp, Zea mays
  Clone ID: 700164440_FLI
agcaattttatatgcagtgtcggatcaggagggagcatctgaagatgacattcgtcaaattccaaaatacaaatttcggaagatggaagagcctgaaaagcagtcagttggtgtgcctggatcttctggtggaataatgatagaatgtggaaccaatcaacctattgaaaaagtacttgcagctgaagatgcggagtgctgcatttgcctctcagcttatgatgatggcgcagagctccgtgaactcccttgtggccaccattttcattgtgtttgcatcgataaatggctgcacatcaatgccacgtgccccctatgcaagtacaatgttcggaaaaacagcagcagcagtggcagcgaagaagtataaatctctatatgagaatattgagaattcatacccaacagttctggcttctcgcagcaaattttttatcccataatcccatgagttcgcattcgtatctgtggcagtgtgatgaagaaaatgatccatgtaaattctcttgttcgtaatacggctatagcaataattctgtgtcaactttgctcgtgctgttctcggtgtgtttagatttttatagtatgtgtacgtgttatagaatttctgtagagcagcttgtttgtgtagtctaatgttttataataatcatact

SEQ ID NO: 1693 - DNA, 608 bp, Zea mays
  Clone ID: 700164475_FLI
ggggtcgagatgtacatcaagcagcgccgcgtgccccgcggcagcaccaagtgggtctgcctccagacgctcagcgtcgcgtgcctggtcgtctccatcgccgccgccgccggctccatcgccgacgtcatcgaggcgctcaaggtttaccacccgttcagcagttaattcttgctgctgtggctgtgctggggcctggactggcctgggtttggacgtatgtgcatgcagcattcattgcggtgcgttcaactgtggtcaacaagggagggagacggatgcagatgtttgcatggaggcccctatagaacaagtgaaaggtttaggcgcccttgtgcacatgctggtcgcattccttgcaagaataccaggggtggggccagaatggcatgagctgggtgtttgttgtgatgacgagtctactgtaggtgtatgaagcagcaacaaaaaacatgttcctttctaactcttcttcttcttcttctattcttcttctttatttacaattttcttttatgtgttttcgtctaattaaggttctggttttgtagttctaccgtgcaactcattgtaccggaaaagaatatatgaacaggaaatcccgtatg

SEQ ID NO: 1694 - DNA, 694 bp, Zea mays
  Clone ID: 700164537_FLI
gtgattccgcatcccgttcgcgagcgcgacacacgctgacagctcacggctgaccttcccgagtcccgacggcctccagctccatcttgattcttgaggcgaagccccggtgcgtaagagtctgccatggccagcgagaataaggtctttgggttcgaggaagtcgccaagcacaacgtcaccaaggactgctggatcatcatcgccggcaaggtgtatgacgtcactccgtttatggatgagcatcctggtggagacgaggttttgctagctgtaactgggaaagatgctacagctgatttcgaagatattggccacagtgattccgcaagggacatgatggagaagtaccacatcgggcagatagatgcttcaacaatcccagcaaagcgtgctcatgtgcagccccagcaagcacccagccatgcagacaaggataatgacctccccatcaagatcctacagttccttgtgcccattatgatcctgggccttgcatttggtatacggcagtacaccaaatcagagtagtaactattcttagaggcttgcctttggagcctgtcttatggtaatggttcgaataaaaacagttcaataattgcgcattgtatttgtcaggtcgatgttgtctcattagtcacatgctactctgtattatggacatccatgttgaaatgtgcgcttttccccc

SEQ ID NO: 1695 - DNA, 853 bp, Zea mays
  Clone ID: 700164577_FLI
atagagacacgcaccactcgaaccagaaccaccaggctgctggtgctggaagggggcgcggcagctgggcagctggcaacggacatggcggcggccggcggcgagaccatgatgacgagggagcagctgctccacctcttctcccgcttctccttcgtcacctccctccccgaggtcaagcagcggattgccgacgccgtcagggacaagcaggaggctgtggccgtgaccactgaaatacaagaggagattcttcgcgagatgggagtagatccaagttttggtattggttgccttggaaaggtgaatgttgttttcaaaaatgacaaggagttgatgattaaattctatcaatttgttgccaaagaagaaatggctattgatgaagctgagcttgaacccagagaattggctgaaaaattacatgctcaacaaataatgcaagaacagcaactgaacatgctagttgaaatgaggaaatatagcccagagagccaatccgtcatacttgagaccttgcacaaagaattggaagaagctgattttgacatcaatgcatcgatcttgagcccagagcaaatccgagagattgttcagaagtgatatatttccaacagatgagatcagtacctgccttgtctacctttgtggtgcttgtgtctacctttgtataaattgctaaagagagcgagcactcctgtctatttggtttctggtgattgcacattgtatgttgagaagtgtagctgttacaagtaaccctgtagaacatattgcttgtgcaaagatagctcacagggatgtaaaacattctgaattttacaaatatactgatcgtggatgctcctttctt

SEQ ID NO: 1696 - DNA, 1164 bp, Zea mays
  Clone ID: 700164643_FLI
gttttggcggatctggtcgcgcgcagaggggtcggagtcggagtcggagaagatgatgggcgggttcctctccagggtcctcctgttggcttttggctatgcctatcctgcctacgaatgctacaagactgttgaactgaacaaaccagagattgcgcagctcatattttggtgtcagtattggattttagttgccttgttgacagttttggagagattcggagatttcacaatatcatggttaccgttttactcggaagcaaagctgatgttctttgtatacttgtggtaccctaagacaaagggaactacgtatgtttatggaactttctttaaaccatatatttctcagcatgagaatgaaatcgaccggaatctccttgagctgagagctcgagccaccgacacggttgtcctttattttcagaaggctgcttcggcaggacaaagtactttctttgacgttttaaaatatgttgctgcccagtcaccttctcagaaatccaggcaacgccttcatcgggaatcacagcagccgccacaacaacagcaaccacaagtgcaggtgcagcaggcgcaaccacaaaaacaagcggcacctgttatgcgcagagcatcatctattgctgctcggcaagcagcaatggcacaacaatctcaggagactaaacccatttcatcttcgcccaagatcaagcgtcaaacatcagcgagatctggttcagtggcatccacaaagcctccggtagctgcatccgcgctaaaacctggtggtagcccaaagaaaggcgaggtcaaacctgctgccgacccagttcaaactccaaccacaggtgccgattcaccgaaacccgagcctagcgccccatcactccctggagccgaaggggtggataagatggccatcgacgaggccagtggtgacgccctagagggtgcagaagagcttgaccctgcgctcgaagaggagacgccgatggaggagacgatacgtgtgacgcgcgccaagctaaggaggcgcacggccaccgaagatcctgctgggaattagctgcaggccattgtttttcctttccctgcacattgtgttgatcttttttttgggttttaggttgtcatgttgtttggtggaatggagatatgatgttgaattggttctttgtg

SEQ ID NO: 1697 - DNA, 1032 bp, Zea mays
  Clone ID: 700164668_FLI
cccacgcgtcgcgggagcagcagcagcaggcggcgccgacggagcggcatcccactcagtccttgcaaccatggctaggggattgaagaagcacttgaagaggctcaatgcgcccaagcattggatgctcgacaagcttggcggagcttttgctcccaagccatcttctggacctcacaagtccagggagtgccttcctctgatcctcatcatcaggaacaggctcaagtatgctctgaactaccgtgaggtcatttctatcctgatgcaacgccatgtacttgttgatggcaaggtcaagactgacaagacctaccctgctgggttcatggatatcatttccatccctaagacaatggagaactacaggctgctttatgacaccaagtgccgcttccgtcttcacccaatcagggatgaggatgccaagttcaagctctgcaaggtgaggtccgttcagtttggccagaagggcatcccctacctgtacacctacgacggccgtaccatccgctaccccgacccgctcatcaaggccaacgacaccatcaagatcgatctggagaccaacaagatcatggacttcatcaagtttgacgtcggcaacgtggtcatggtgaccggcgggaggaacaccgggcgtgtaggtgtgatcaagaactagggagaagcacaatgggcggcttcgataccatccacgtcgaggactccatgggccaccagttcgccacccgcatgggcaacgtgttcaccattggcaagggcaacaagccgtgggtgagcctgcccaagggcaagggtatcaagctcagcatcatcgaggagcagaggaggcgcgactttgctgcccaggctgctgccaaggcataagttctctgaatgtgctgcttggagctttttgctatgtctagttttatttttatctgcaaggatatagagctaccttcccaagacgttttatcatcatgttttgttgcttttggttcttgaacagcgtttgcagctagctgtaatgctttaattcgactatct

SEQ ID NO: 1698 - DNA, 609 bp, Zea mays
  Clone ID: 700164686_FLI
cggacggtgggcggacggtgggcggacggtagggtgtatggtgtgcttgtgaggagagaaatccctggaagtttggttgaatgaaagcgaagtctcgaggtgtcgttcattaggtactcgacgtatgggctaaattgtagctcgacgtggtgcttatagtctccgagctgaatttaattttgggtgtgttaatcgatcacgtgatgcggaggacaagaaccagatttctctcaaggtgatgctggtgaaagaacctaaagcttggataatctgataatatgatcaagtaccaggatgagagatgctccccaagcggacgtcatctaacaacactgacttagtgttatcccaggttataattttgttctgttgtggatgctgctaagtgccggtgggctcggccttcttatataggtgtatcccatctttaacttctttattgaggattgtcacttaagctagcatgtattttaaaacctataaatattttatacattttaaattgtaattcttttgaatcactttcttttgtaatcactccgataattgtataatgtaaacttattgtaacatgtaatcattttgcaataaagaatttatttccgctgc

SEQ ID NO: 1699 - DNA, 366 bp, Zea mays
  Clone ID: 700164732_FLI
caggatcttggtagcaatatggacctctggaccttcgatgacatgcccatcgctggcgatttcttctgaggaatttgaagcttggccataggactatgtacatagggactagggaataaagactgggagattgggaagcacctgcttggcaccttggggtagcatatgctcgtgtctagctcagatgcagaagtcgcattctgaaactctttggttatcgacctgttccctattttaactatctctgtatgagagccatttatgagactgaaccattttaccattttgttttcccccttctttcgttgttacagtatatggtttaacattatgatttatggatatgtggccaaacatgccttttat

SEQ ID NO: 1700 - DNA, 1534 bp, Zea mays
  Clone ID: 700164733_FLI
ctccgctgcttcgcgactcctctccggctctccgcacaggactccaaccgcctcgccgttgcatcgccgcgggcgtcaacctaggctgctgccggtaccggtgcgtccccagccatggctcggccgccgcaggaggcgatcgacaccttcgtcagcatcaccggcgccgacgaggtcaccgcagtccgcgtgctcgaggaacatggtcatgatctaaatgaagctgtgaatgcttattttaatgaaggagataggaccaccaccagaatcaatcagaatcctgtgcctgccactgccagttatgatgacatgatggagctggatgaaccacttgatcccatgttcaacagacctttgttccctagaactttgggcaacccttttgcccttttggatccaggttttgctgacataactgctggtgatatatttggacgtggaccccgagttacacaacctagggacgtgaggcagatacctattgaagttaaggacagcaatactcaaacaggcagttctggtcagggtcccattattgaggatgttactggacgtgaatctttctatggtccagaggtccatgggaccgttatagttgacgaagatgatgaagacttgccattaacactatctgctcaggatcctaagatcccaagcagtgctttgcacccaaaccatttcatgcctagtgcgcctccagtggttgatgttagtgaccataacaatgatatagaagaggagatgattaaggcagcaattgaagcttcaaaaagggaagctgacgggatgaaaaatgttctaagtagtggtcaatctgaaaacatgtcacgtggcagaggtgatcatgagcttgctcgggcggtttctttgtccttggagacagcagagcgagagagagctctgcgccaagagggaatgtatgtagcagatcactctcctgacttatctgataaagaaggcggtcaaggaggaagtgggataagcgaaaggcgaggactaactacaggagaagtgggaacttctgagcaaacagtagatgaagagaacttccaagaggacaatgaagatggtgaagaacaacctttagttaggactcgttctaggcgacttcgaggcagaactattgagccagcagaaactgttcaaagggctgacagcccgccctcaagtccccaacctcatgttcaaattggtcatcagcgtaatgtggggtttccttcagtagagtggggtggtatttcttctgaagagcgtgatgaagctcttatgcttgaggctgcaatgtttggtgggattcctgaaggagcaccatatccattttccttcccagcccatggcaggtcgactcactatcccctagtagcacgtcctccatcaccatcattaacggcacagcggttgttaagggagcagcaggatgatgagtatcttgctgctctccaagctgatcgagaaaaagagttgaaggctgtgcaggaggctgaacttcgcagggtagaggaagctgcagcaagagaggctgctcttgaacgtc

SEQ ID NO: 1701 - DNA, 1085 bp, Zea mays
  Clone ID: 700164760_FLI
ccacggtccgccagagctcatatttggtgccactgagtataccacagcgattgacatttggtctgctggttgtgttcttgctgagcttatgctagggcaggtatggtgtcttcgatatttattggcatgtttattttttcaagtcaacaaaaaaagtcttttgagttcacattttcttacaagaactatttcaacagcctttgtttccaggtgaaagtggtgtggaccaactcgtcgaaatcatcaaggtatcaattttacaaatttgtaaactatcttctgcatagacataaattttgatcacacttgatttgattttgcatcgcaggtccttggtactccaacaagggaagaaattaaatgcatgaacccgaattacacagagtttaagttcccacaaatcaaagctcacccatggcacaaggtgtaattttttctacattttttataatgttctaaaaaaactgttgctaccggtttactaactgcctttttggatattttatctttcaggtattcaacaaaaggatgccgccagaagctgttgatctggtctctcggctactccagtactccccaaatctgagatgcactgctgtggaggcgcttgtccacccattctttgacgagcttcgagatcctaatactcgtcttccaaatggccgcttcctgccaccccttttcaacttcaagcctcacgaattgaaaggagtcccagcagacattgttgcgaaattggttccagaacatgcgaagaagcaatgctcttatgttggatcgtgagatgaccgtgccttgggactggaacctgaggttgcaatcgtgcatttcccctgggatgttggatgatcttgaggcatgcgagcctgtcgttgaagatgcaaggttacctacttgtacgacgtacgccaatgcgacctgtgtagctgtgagtagtctaatgttgcagtgacatgtaatggcgcacccccgtcctactaacagatgcttactggagattgccatagctgatcttgtaatttgttatagggcagtatgaatatatttatggtagcttgaatctatttgtggattcacttcgtttt

SEQ ID NO: 1702 - DNA, 968 bp, Zea mays
  Clone ID: 700164808_FLI
cgacatctgcttgagaaggcaatggccgatgccacagtacaggtgtataaacgagggtggccctgcccatgccaaaagatttgtttatgcggtaagggtaaatacatctgacagtggatggactgacgagtgcattggagagccaatgccgagtgtgaaaaaggccaaggactctgcagctgttcttctgctcgagctgctgaatcgaaattaccgtggcaagcctgatggaaaataatctttggtgatgttctgtggtggtaggtagacgtggaagcatccatcattctgattatacccccatgcagtgcttttcagcaaagcaaattaatggcctttgttgatgttcttggtggcggtattggtgatatggaggcattcaatgcaagcataagcagagctatggggagtgggattagaggattattattagttttgtctgaggtgactactaggtattttactggcgaggtactgaggtcacaactcacaaatagcagttgcaaattgcaatagaggaaatgatgataggttgatataggatattggaggcctcttattcatcgattgtataagatgtttacagaacagtgcattgatccattaaatttatattgattgatatttttatagtggatgcgcctgcagctgggaactcggggttctctatcttggcctcgccgaccaaatatcacgtacgtcgacgtccgcgaacagtatatatatggtaggcttggcgggcgtgatccccttgcgcatggtacagagcaagacgctgagctggatattctgataatcccgtatactccaacagaaactacagaatggaatcaagttgtacctgcgtttctgctgctcaaaaattgcgagatggaccatggacgtgtgttgtttggcaacaacgacgcaaccagcacggacaagaaggggggacatgcagtctctcgaaacctgtcctatacaattag

SEQ ID NO: 1703 - DNA, 1492 bp, Zea mays
  Clone ID: 700164821_FLI
cagaagcgaggagcactacttgttggttggattctcttcagtctagcagctagtccagttaagtttcagacacacatggggagcattggcagaggcacggccaactgcgccaccgtgccgcagccgccgccgtcgacagggaagctcatcacgatcctgagcatcgatggcggcggcatccgcggccttatcccggcgaccatcattgcgtacctcgaggccaagctccaggagctggacggcccggacgctcggatcgccgactacttcgatgtgattgccgggacgagcaccggcgccctgctcgcgtcgatgctggcggcgccggacgagaacaatcggccgctgttcgccgccaaggacctcaccacgttctacctcgagaacggcccaaagatcttcccacagaaaaaggctgggttgctgacgccgctgaggaacctgctgggcctggtgcggggccccaagtacgacggcgtgttcctgcacgacaagatcaagagcctgacgcacgacgtcagggtggcggacacggtgaccaacgtcatcgtgccggcgttcgacgtcaagtacctgcagcccatcatcttctcgacgtacgaggccaagaccgacgccctcaagaacgcgcacctctccgacatctgcatcagcacgtcggcggcgcccacctacttcccggcgcacttcttcaagaccgaggccaccgacggccggcccccccgcgagtaccacctcgtggacggcggcgtcgcggccaacaaccccaccatggtcgccatgtccatgctcaccaaggaggtgcaccgccgcaaccccaacttcaacgccggcagccccaccgagtacaccaactacctcatcatctccgtcggcaccgggtcggccaagcaggcggagaagtacaccgcggagcagtgcgcgaagtggggcctcatccagtggctctacaacggcggcttcacgcctatcatcgacatcttctcgcatgccagttccgacatggttgacatccatgcgtcgatcctctttcaggccctgcactgcgagaagaagtaccttcgcatccagttgtactatgcaggatgatactttgactgggaacgcatcgtccgtggacatcgccaccaaggagaacatggagtctctgatatcgatcggccaggagctgctcaagaagccagtggcgagagtgaacatcgacacagggctgtacgagtcctgcgacggtgagggcacaaatgcacagtcgctagctgacttcgccaagcaactctctgacgagcgcaagctacgcaagagcaatctcaactccaactaataaatacctctctcagtcacagcatgtgctctttccgcagattcaccgtttcttatttttaatttaatttcaattctgtgtgtgtgtgattgtgtgtgtgactgtgtgtgtaccaataaacatttaagttcaatcatttgcttgtctatgatcaaaagaaccatttccttc

SEQ ID NO: 1704 - DNA, 795 bp, Zea mays
  Clone ID: 700164858_FLI
ggcttcttggttggtggtctattgatgaagggagcaaggaagaacaagcccggttattttatactgaatctactgggtacaataccttttgtggctatccgccagaggtggttaggaaaatgcctaaaaaggaccttgcagaagaggtttggaggctacaggcagctttgggagaacaatctgaaatcaccaagtgtaccaaacaggaatatgaaaggcttcaaaatgagaaggttctttgtaggatttgttatgagggggagatatgcatggtgctacttccctgccggcacagaactttatgcaaatcttgtgctgagaaatgcaagaagtgtccaatctgccgtgtgccaattgaagagcgcatgcctgtatatgatgtttaaacctcactaactcagcttaacaatacaaatttgtgcatgtgggttctgtcatgctgtgcatttagtctcgatcacaactttaagctgattgaggtttgcacttcagaaagggtctgcaatatatgggggaaatacaagtatatcatgtctaaccaaaagcatggatatgtggttgatgagcattgtcgttttggaccagttatctactgtaagtatgtggtcagtgtatttcccttccctcttgtgattggtagatgagtcagatagtcttgttcgcgtagcagcattttctcagggatatgcagttgttgagaagaaagtgaaacaaaaacagactgtaaataaaaacactgccttgtttgaatctagtccttgtttgagaagaaagtggaacaaaaaaaatgtaaac

SEQ ID NO: 1705 - DNA, 1086 bp, Zea mays
  Clone ID: 700164974_FLI
caccccccgagctcagcttagctccactccagctccaatcacagtcgtgaccagagcgcgagagctagctagagggccgtgaaaatgccgatcaataggatcgccctggggagccaccaggaggtgtaccacccgggcgccctcaaggcggcgttcgctgagttcatctccaccctcatcttcgtcttcgccggccagggctccggcatggccttcagcaagctgaccggcggcggcccgacgaccccggcgggcctgatcgcggcggcggtggcgcacgcgttcgcgctgttcgtggcggtgtctgtgggcgcgaacatctccggcgggcacgtgaaccctgccgtgaccttcggcgccttcgtgggcggcaacatcaccctgttccgggggctcctgtactgggtggcgcagctgctggggtccaccgtggcgtgcttcctgctccgcttctcgacgggcgggcaggccacgggcaccttcgggctgacgggcgtgtcggtgtgggaggcgctggtgctggagatcgtgatgaccttcgggctggtgtacacggtgtacgccacggcggtggacccgaagaagggcagcctgggcaccatcgcccccattgccatcggcttcatcgtgggggccaacatcctggtgggcggcgccttcgacggcgcgtccatgaaccccgccgtgtccttcggccccgccctcgtcagctgggagtggggctaccagtgggtgtactgggtcgggcccctcatcggcggcggcctcgccggcgtcatctacgagctgctcttcatctcccacacccacgagcagctcccctccaccgactactaaaagccgaagccgaccgacctaggggtgcgcagcgcagctagcgcatccagctctctctccccgctcgccgccgtttagtttctctcgtgcacgtgcatgcatcgtcgactgtctcaggccgccgctgcgccggcgccgctcgcatcgtttgcttccttggaccagcagtcgtcgccgtcaggctgaactgcttgtaaccgtgaattccggacccgtttgcttctgtaagatttgtgcatttgcctgagt

SEQ ID NO: 1706 - DNA, 1405 bp, Zea mays
  Clone ID: 700165039_FLI
atgggcttcagtggcctttggcgcattgtcgtcaggctgctcagtccgctgtctgctgctcccttggtcgctctcgtcggatttggactctatgagctagggtttccaagtgttgccaaatgtgtggagattggtcttcctcagattttactgctggtggcgctttctcagtacataccacatgcggcccccttgctgagtactgcctttgagcggtttgctgtcataatgtccattgccctcatctggctttacgccttcttcctgacggttggtggtgcctacaagaatgctgctcccaaaacccaattccactgccgtactgatcgatctggacttgttgggggcgctccatggataagtgtaccctatccgtttcagtggggagcaccaacctttgatgctggtgaagcttttgctatgatggcagcttcttttgttgcccttgtggagtccactggtgcgtttatcgccgtctcacggtacgccagtgcaacaccatgccctccttccgtcttgagccgtggcattgggtggcagggagttggcattttgctaggtggcatatttggaacagctaatggcacctctgtgtctgtcgaaaatgctgggttgctcggtttgacacgcgttggtagtagacgtgttgtgcagatttctgccgggtttatgatattcttctccatccttggaaaattcggagccgttttcgcatcaattcctggcccgattatcgcggctatatactgtcttctcttcgcttatgttggtacggcgggtgttggtttcctgcagttctgcaacctgaacagcttccgaacaaaattcatcctggggttctctttgtttatgggtttgtcggtgccacagtatttcaacgagtacacttccgtcgcaggctttggcccggtacacacgcgtgcaagatggttcaacgatatggtcaacgtggtattctcctcgaaggcgttcgtcggcggggctgtggcgtatttcctggacaacaccttgcaacggcgagatggcgccgtgaggaaggaccgggggcaccatttctgggacaggttcaggtccttcaagacagacccgcgcagcgaggagttctactccctcccattcaacctcaacaagttcttcccgtccctctgatcctgatggctggtaactgggcgactgaaaatgctgtccggtcaggtggttgtgaattatgattttggcaaaatgccacgcccaaacggctgtttcctctcctgcttctgttgtaaccactcgttgagttctgaatcttgtagagctcagcctgaactatccagaagtagtggaggagaaattggcaggtatttttggatgtaaattgggtctgtgttctcccatagatcgataaggtgggaagagaactttctgt

SEQ ID NO: 1707 - DNA, 866 bp, Zea mays
  Clone ID: 700165062_FLI
tgtttcgaagctgtggggtcaattcagacaaagcaaaagaaatgcaaagaaagatgggtgttttaagtgtggcgcccctgatcacctagccagagactgcgatcaagacggtgagcagaaaaacaaaggcccaagttatgttctaaaagatgaaaatacacaacgtggtggaaatcaccgtagaagctatgatctagtatttgacgaagacgaagctgattgttctgaagagagagatcatgaaaatggccacagaagaaagaatcgaagaatagatgatcgaaaatcagagctaccacctcgtggtggtcgtgatagaaatagccatgagagaacacacagtgatgagaaaggaagcaagcatgggaaagatgataggaaccgaggggatcggaaacatgatgactaccacagttacagtagatccggtgacagaagctctggtagaaacgatgatcgtgattatagcaagcgccacgacagaagcagaagtggggaggaagagaagggctacagacgaagggataagtctgatggtgagcggcaccatagagacgatggctacgatcgccgcaggagagatgaagacagccacaggaaaaggagcccagatagtaaacatagaagagaagacggagggcaccatgtgagaaaccagcagtctgatgataggtcctacaaggagagaaggcacagagatggtagataagaaagtttctgcacgactcggttttcttgcctgctttccactgatgtctctataagctggtattcttagctcaacttttttttttgtaagtcaatgtaactgcctggaatatgttgaattgttgtagtgtccagatctgaatttttttttgtgtgtt

SEQ ID NO: 1708 - DNA, 544 bp, Zea mays
  Clone ID: 700165080_FLI
acgccctggagttccatttgtacatccacaggaatccatgggaccatttgcacaagttgagatgctgaaggagcacatcttgccctatttgaatgggctctgttgtcgaaggactgatgacgatgatgaaaaattgggattcgcagtgagtgggcgatcagggaggagagcaaagattggggtggtccagtatgtgaacaggcgacagggatgtggccccattgtgcataggatggttgccgggttgaactgaggaggcatgaagaggacgttgtttcttgctttgcctagtgcgggcccggcaccattgttgatcaggtttagaagcagaggcatctctgttgacacaattgatggtcaggtttacaagcagactcatctggtagtcagtgttgtgttgtaaattaatgagtgttattgaattaccgaacctatttcttgtaccatgcatgacaagcaacgacactagttatgatcatgacgaatcatgtaacagacctgtttactgcagtgcagtgtttaatgttagaccgggttatttgct

SEQ ID NO: 1709 - DNA, 1390 bp, Zea mays
  Clone ID: 700165093_FLI
gttggcacgtgctggtcatttagaagaagcatgggattttattgaggaaatgcctggcaaggtagatgccgtcatgttaggcgctttgcttgctgcttgccggaaatgcaagaacactgaggttggtgagagggtcatcaataggattatgaagctggagccatcaaactcgtggaactacgtggtgtcatccaagatttatgcaacctcagataaaatggatgaatctgcaaggatgatagggctaatgagggagaggggtgtcaacaagactccagggtgcagctgggttgaggttaatggaaaagttcttgaattctatgcaagcactgaaccacagcatggtgcggaagatatgtatcaactcatgggcgtactggtaaatgagatgagactaaagggatatgttccaaaccttgatctggtgtagcacgtaataaagcatatttcctgttcttcttggagcaaaaggaatgacttatgctaattcacaggaggaggaaaatcgcaaaatgaaataaacagaggaacgacaagaacagcagcagccaacaatatgatgggataccatactataatataaaacgaaaaagagggaacacccaaatgctaaacctcaatagctgatactctttgcctgatttcaacttcttccttaatgcagtgaaccatttgcagcgtgctaagcaatcgttattgacaattatttaccttctcacttgttcaataaagtgtgccgcatggaatctctcatttggctattgggacctttttatggtctacttcctaccaccaccaccaagtcagtttgtttgtaagctgggaagataagagttcagttacaccatgtggctccttaaatatgcacatgatttttaatgttacaggacaaggtgaggttggcaactattgatggatccttacttctagagttgcgctgaagctatcttttgttcgcttgttttgttcttagaatactttgttttgtgctaattttgttcatccacttcctgcatatggatactaatggggaagagggcaagaagagcgtggagacgcacaagatctacatcgctgaagcaggtgcaccctggtattggaatcccctgcaaggtcatgtctgtcatgaactcgctcatcaacgacatcttcgagaagcttgccggtgaggctgccaagttcatcggctacaataagatgcccaccatcacatcctaggacatccaagggcatcaaggccgtcaccaagttcacctcgtcttaggcttcttctccggtgcttctgtgtcttcgtgtgagtaacatgttggttggtcggaggcttggctgttatggtatcgtgtaattgccgcggtggctttttggcagaatggaatgctatggttatgtg

SEQ ID NO: 1710 - DNA, 885 bp, Zea mays
  Clone ID: 700165115_FLI
cgagatcgtgcgcacctccgagatctccacgaagttgtggtaacatggggctcaccttcacgaagctcttcagccggctcttctccaagaaagagatgaggatccttatggttggtctcgatgcagctggtaagaccaccatcctctacaagctcaagctcggagaaatcgtgaccaccatccctacaatcgggtttaatgtggagactgttgaatacaagaacattagcttcactgtctgggatgttggaggtcaggacaagatcaggccattgtggaggcactatttccagaacacccaaggccttatctttgttgttgatagcaatgacagagatcgtgttgttgaagcaaaggatgagctccacaggatgctgaacgaggatgaattgagggatgctgtcttgctcgttttcgcaaacaagcaagatctaccaaatgcaatgaacgctgctgagatcaccgataagcttggtctccattccctgcgccaacgccactggtatatccagagcacttgtgctaccacaggagaaggtttgtacgagggtcttgattggctctccaacaacattgcaaacaaggcctgaatggacaattctgctgtttcacgaagcacatctgcacatggcgaggcatggtcattttgaccctcagacgattattgtttcattggaaagtatcgtatttctttgctaggcttttcagagagatctctctaagaaactgatccgaaattaagacactataattggcagtggcactagtagatcgtttactgagtaatgcagtttattttaatgtatcccaattgtgttgtaagatacaaatatctgtcggaattatccattcaatttgaatctagatacgtagtttttgttatat

SEQ ID NO: 1711 - DNA, 711 bp, Zea mays
  Clone ID: 700165156_FLI
ggttgcggcggcgcgctcctccgccacccccttcttcttcagtttccctcacattactgccactgacgttcattccgtttccttgcttgctccaggtactcccatcgctatcgaccgggtcctcgagcgcgggagatggcggatcaggagaccccagttgcagttgaggcccctaccccggtccttggggagccgatggacttgatgactgctctgcagcttgtcatgaagaagtcgggtgctcatgatggccttgttaagggtcttcgtgaggctgccaaagcaattgagaagcatgctgctcagctttgcgtgcttgcggaggactgtgaccagcctgattatgtcaagctggtgaaggctctttgctctgagcacaacgttcacctggttactgtgcctagcgctaaaactcttggtgaatggtctgggctttgcaagattgattctgagggcaaggcgaggaaggttgtgggttgctcctgtgttgtcgtcaaggactatggcgaagaatctgagggccttaacatagttcaggagtacgtcaagtcacactagatacagtgcatcggtatctggaacttgtgctctacactagctttaagacctgaatttaaatttgtgctggttcttgggcttttctaggagattatctcaattcttgttttaagtgatgtcatctggtgttaatacaaatcattaagcggtggt

SEQ ID NO: 1712 - DNA, 972 bp, Zea mays
  Clone ID: 700165179_FLI
ctgagcattgttattgaagcgtcgcttaaacggtaaaacacgattaaggattagaacgtccgcacgttttatgaaaaagggttagagcgtccgttttggacgttttactgacgttctatggcgttttggacgttttacggcgttttggacgttttctggacgttctagatgttaatgggccttcctgggcctttagctgtcctcattcctcaaaccctaaattctaagcctccacagccgtcttcagccgcccagccgacgtcctctgcgctgcccgctacggcgctaccgtcgtccagagactccatagccgccaggtatgccgccggtcgccggccccccctcctccctcctccctcttacctccgcccacagctcccagtgcccatagccgccgccagtgcccagttctgcttctgctgagtgctgacagtgaattaatttgtttgttgacagtgctgagtgctgacagtgcccagtccatagccaccgccagtgcccatagccgccgccgccagtgcccagttctgctgacagttaatttgttgaatcaatctctatttggtgacagtgaatttgaatggcaacaaatagcgaggcattgtctgccggttaaattctataacaagtctgaaaagacgtttcaacgttcgtttaaacatttaaacgttgaaaagttggttcataacgttttaacgttttaccgttttaataaccatgggtctgagtagcatccctcagatcctgagtttgacttttaggctggaggtaaaaaaaatcccatattaagatcttaatatgatgcccggggttatcttaccccgcaggtcgagtttttttttttttgatagactggctgcatgatatagggcaaacctaatttttcccctttaaacattttgttgttattgtgtacaccatttatgcaccttgcatgcacttctaacattcattactcatcctactgggaat

SEQ ID NO: 1713 - DNA, 1321 bp, Zea mays
  Clone ID: 700165213_FLI
agaaagtaatatctgcaatcaagtggcggaatcaatggcattccatgaaaaggaaacacaaggtgaaactgaagaaatggaagagcagaagaacatccctcgacattatgaagttgaggataataatgagactaatgaactgtctcctacatttgcttcttgtcagaataacttcagtttgcaagtggaaaaaggaatacaaatttacaatttagataccccgccacaagatgaagtgttgatcgatccacccgataaagggaagacagttgattcagagttatcacctaacatcaaagcagaagatgctgttacaatagaagaggaaaagcttggccagtctagctcatttaaaatacgtgatctcaacctggttggtagtccagaggttgccgacatgcgaggtgaccctcgtttaggccaaagcttcactgctggatgttcagtggacctacaagataatcaacaaattgaccttggaacagctcttggtaacaatccaaataatactgatacatgtaccccatttctgttgggaaacaaggcagttcaagttattgatatcgaagatgactcaccaattgaagctggtgcttgtgacacttcaaagtcaaaaggtgagatggtatattctagcatggagggctcgatgaaccctctggcaaacaacgatgctctacatggtatcccagatggttatagccttgcaatttcagattaccttggtgctgatatgtcatgctaccaatcaatacaaacagaacttcaaggtgggatgaacctaaatggttcagagggcataactgttatggatgattcaatatacagttctcttggtgacataggttttatggaggtttgggaccagcaacctcaagactatgagaagttcttctgaggcgctcgtgtccctgaaactgttctggagttcgactgataaatagaccagttacacttgcataggcagaaataaaacacctgatcgtgcctataaactggaaacccgtatacttgtgcgccagcatctgctctttcacttgtatgttccaggccatgcatattggggcttttgtacgggtgcatcctacgcgaagcactttcccttctgtaataccagggtctgcgtcggcagctcaaagagcagatattcgtatgaaacagttcttcagactccctgccttgcccgacagtggtgtaaaaagttgtcgtatagctgtcacgtaattcaaaggaattgacctaagcacgacatagtattcgtctgaaacatgtcttcatttataaacagttctatattccgaaatagaattgtttatttgtt

SEQ ID NO: 1714 - DNA, 604 bp, Zea mays
  Clone ID: 700165231_FLI
gacgccaacgacagagaagagagtccatctgctcgttgccttgattttgtggaacgaagcgatggctcgcagcggcgccatggtttcctgcatgctgctcctggtggtggcggcgcaactgctcatggtggtgatggccacgcagacagcggcggcggcggcgggcgaccaacgcggagcagcacgccggctgctgtggcaggtgacctgccactacagcgcctgtaactgccgcacttgcccgacatatggctgggcgtgctgcagcacttgctgctagctagctagctagctagctagtgtgagttcttccgcgcgcgcgcgcgcgcagcctttgcatacccctcttgcttagctcatgtccagtagtagccggttgctgccctcgtcgtcggcggcgtcatctctggcgtggttacgttctcatctggcgtggttacgttctcatcagcgacttctaatggcgctctcgatctttcctgcagtcctttttatttgtaataagaatccaattgatgtgtgtgcacgcgcaatcctagctaataaatagatcttctttgtgccttgctttgtttgatatatatataataaaagtcttcgttgc

SEQ ID NO: 1715 - DNA, 702 bp, Zea mays
  Clone ID: 700165253_FLI
agggaaccttgttccccatgtgtggcatgaaccttgccttcgacagggatctcattggccctgctatgtactttggtctcatgggtgatggccagcccatcggtcgctacgacgacatgtgggcaggatggtgtgtgaaggtcatctgcgaccacctgagcctgggagtcaagactggcctgccatacatctggcacagcaaggctagcaaccccttcgttaacttgaagaaggaatacaagggcatcttctggcaggaggacatcatccccttcttccagaacgtgaccatccccaaggactgcgacaccgtccaaaagtgctacatctacctctctggacaagtgaaggagaagctgggcacgattgacccctactttgtcaagctcggtgacgccatggtcacctggatcgaggcctgggatgagctgaacccgtcgacccctgccgccgcaaatggcaaggccaagtagatgtgccatcacttcggcactggagtgaaaaagaaagtatgattgggtcctgcctaggccccatagatatagctcttttttgagaaggaagagagattaattcagcagcagcttttataaattctttgttgtcatgaagcaggtggttcttttgtagttgatgaaagggatttgtcgtcgctatcgtttacataattcagacaataattttatattgtgtaattctgag

SEQ ID NO: 1716 - DNA, 1758 bp, Zea mays
  Clone ID: 700165260_FLI
gaacattcttgcatgttaaagcatccgcttacaggactaatttttggtctatttgcgtctgcaaaggtgagagattggtatgtggagtcattccgtgacatccggtccttcccagaggtgaagaaccaggaagatgaactcgccttcacccagatgatcaaaatgatcaaggtgcggcacaccaatgtggtgcctgcggttgcattgggtgtgcagcagctgaagaaggacttgggtggtccaaaggcgttcccacctggaatccatgagatccatcagttccttgatcgcttctacatgtcaaggattgggatccggatgctgataggttagtgagcttagcactcccatctcatgtccagttttctgaaaggtgtttggtcagtcttggtaagattagcagttagcactttaggtattaacacactgttgataaaaaaagcaatatgtctacagccctaatttagttatctgttacctatggaaagttcccttgctgctactgctttctttcttgcccaaagaagacagggctcctgaggcttttgagcctagaacaaatctaaatttcagggcgcattttatataaacatgacaatactattacttaatatatatgtaaacaaatgttatcaataaaaaataactgcatgtaaaagtaatattcatatcaaataatccaaacaaacttaaaagtttcttctaccatttctcgacattgagtcattgatgatgccaatatcagcttcatccaacaatcgtttctcaatacataatgtttccaaaccatttaacctctcttgaaacattgtagatttcaaatagttcttcaataattttatttttcagaagcttctttcagctgattaaattaaattaattcctaattttcacaagacaatttacaaaatgacaagaataaataaattataattttctgtgggatccgctgtagtagactactagtagtatgcctgttagcctgtagccttgtgcagatgtaccttgtatgcctgtactgctggagaatcggagactcggagttcctagatggccgctggacgcttacatggaattgaggatttggtcgtgctcgtgtacatccgtacatgcctacgtccgccaaccggcccggacagcaactgcgtttgatactatggcgtctcacatctggcgtgcggcatcgcgctcggctgctcgcgtgatgctgtaatcgctgattcgagtccccgccaccactgctgttgtgttgtcgaagccagaagtcgaggcgacgggtgaccggtgtctagcctcttggggccagggaatggaagagatcattgatcaggccttggagtcaaattgtgtgggcgtggcctgctcctgctcgtattagagttctgctaatacgatataccgggggtgggacccttggtttggggggctaagatgtctattccattcgcctgcctctagggctggccctgaaagaacatctgaacctgtcattctgtccgatagatttttaaatgacttttccgccctcatttatttggaaacttcagttcaggtgcaaacatataggcatcatatttttttgacataattctattgttataatagtcaggaaataaaaaactgtaattcttggctggacaccagaagtaactgttgtaatgttcctcaagatctagtggtcaatgtataactaatcatattattccttcattttaaacaaaaaacattgccatactgttacttttatgacataaattc

SEQ ID NO: 1717 - DNA, 1453 bp, Zea mays
  Clone ID: 700165274_FLI
tacacatacgcactttctctctctactgtctgtctgtttctcccaatcctccacagtctctctctagagtagacccaggaaagaggcgatggatatggccattgacacgccatcgccggcgccgcccacgccgccggcgccatcggcagcggccgggcggcagacgcgtgcggcagaggcggtgcgtctggagcaccaactggtgcgcgtgcctctcgagtccctccgcgccaccgtccgctcgaaccaccgcctcgccgagaaggagatcgccgccgtcctctcctccgcctccgcggcccccgcagagagcagtgccgccgccgtcgaccacctcacctccctcgtctctcgcctccacggcctcaagcgcaagatggaggagggcgcacgagcggaggaactgcaggtgcagcggtgccgggcgcgtctggaccggctggcgactgccagcaccggcgacgatgccgaatgggaggacatgcggttgaagaggatcctggtcgattacatgcttcggatgtcctactacaattccgccaccaagctcgctgagacttctggtattcaggacctcgttgatattgatgtctttctcgatgcgaaaagagtaattgattctcttcagaataatgaagtttctcctgctttagcttggtgtgcagaaaacaagtctcggctaaagaaatcgaagagtaagcttgagtttttactgaggcttcaagagtttgtggagtttgtcaaggttaagaatttcattcaggctatagcatatgctcgaaaacaccttgctccctggggctctgtacacatgaaagaattgcagcgtgtcacagcaacattggtttttagaagcaatactaattgtactccatacaagatattgtttgagcaagaccggtgggactatcttgttgacattttcaagcaagatttttgcaagttatatggcatgacactagagccgctgctgaacatatatctgcaagcaggcctgacagctctcaagaccccgttctgctctgagggtagctgtcccaaagaagaccccttgtctctggagggcttcaggaaactagccgagcctctgcccttctctaaacagcaccactcgaagcttgtttgttacatcaccaaggagctcatggacactgagaacccgcctcaggttctgccgaacggctatgtctacagtgagaaggcgcttcaagagatgtccaagaaaaatgacggcaagattacatgccccaggacaggagatgtttatgacgtttcagagtgtgtcagggctttcatctcctaatcatgaaatactctgatttggtgtggctttgggaatctgagtgaatgtacatagagtggtcagcgcattgtgcgccatgtcgagttgattgaactaacctgcaatgttgaactggctggatgttggattgtgcgcatcgttgcaaccgtg

SEQ ID NO: 1718 - DNA, 1009 bp, Zea mays
  Clone ID: 700165317_FLI
cacgagacgaacagacctctaaaacctagcagaggcccgcgccgccgccgccaaccgcgacgaggaaggaagcaggaacgcgatgccgaagtcgaagcgcaaccgcccagtgaccttatcgaagaccaagaagaagccaggtttagagcgcaagggcaaagtagtcgccgagataaaagatgctgtcgacaaatacagcagcgcctatgtttttacctacgataacatgaggaatcagaagctcaaggacctcagggagcagctcaagtcttcgagcaggatttttctcgctggaaagaaggttatgcagatagcgctggggcgttcgcctgctgatgaagctaaaacaggcctccacaaactttccaagttccttcaaggcaactctggtctgttattcaccaatcttccaagggatgatgttgagaggatgtttcgagaattcgaggagcatgattttgcaaggacaggaagtactgctatcgatacggttgagcttaaggaaggccctctggaacagttcacacatgagatggagccatttctacgcaagcaaggacttccagttcgcttgaacaaaggtgttgtagagttggttgcagaccatgtagtttgtgaggaaggaaagcccctttcgccagaagcagcgcagactctgcggctgcttgggatacaaatggcgacattccgtctataccttgtgtgtcgctggtcgggcgatgactttgaagtttacaaagaaggcttgatgcacctaggagctgatgaatcctcttaagcttttgtttcctgtatacacaaagggctcacttgctgtctttgctgggacagcttttggtaactgtgcgtgtggccatgtaccagggagtattggaagttagaaagatacaatctgcaggaaaaaaatgctagtgtatttcttcattctgccccatatttactcaactgttgaaaggtgtaagctgatttgaatatcgtatcagcattagttaagaggttgattgatatc

SEQ ID NO: 1719 - DNA, 769 bp, Zea mays
  Clone ID: 700165357_FLI
tctgcctcttttggcatcgacaatttacttcagtagccccaaacaaagctctggattgtcctattcccatgacaaggctatgctcttctcctgcagtgaaaccaaaaaaggaggtgtgctactgttcttctgtattgatgtcaatgcaacagcaggtacaagtagtcttcttgggagctacccagtagttgagtgagaaattaataagctattctaaattaaatgtaaatatgtatttctgaccatagtatgaagttgaaaggtgtttctgttcctttcctgtgtataagataaacattttttctaacccttcttccttaggtcgctgaaattgaaattgatgtctacaaagtgcttcccatttcattattagattactgatataactatgcctagagagtggagataagtggaggtggcaccaccaattccttgatgtaccaggaatgtttggattgttgtattctgacattgtttggttcaacatattcaagttggagcgtcaggtctccaacaattaaactaaatggaggagtggagcttcatgttgggatgatgcatgcacctttcaagtttcggaatgttgtgctcaactgcaacttgtggccgttgaacccattctacttacttttagatttaagttataggatatttaaaaatgtttgatcttcaatacttgttttggatgttttatgctacaattatatatggataagttatgtacactcatgttgtttaatgaaattgtatacacgtgtttgatttgaat

SEQ ID NO: 1720 - DNA, 1280 bp, Zea mays
  Clone ID: 700165459_FLI
ctgacgcgtgggcggacgcgagggggattctgcccagcagcgcggcgatccgcctcgatccggaatggagcgcgtcttctccatggaggagatccccaacccctactggaccccgtcgagtacaacgcgatgctcaagcagaagctggagaaggacctcgctgccatcgctatgtggagggcttctggtgcagcacctccagatctttctgcgactgctgcttccttgccaagtgtcggtgctccgcatgcagctcctcttaaacccgtcggaggtactgaaagtctagttcaaaacatgctagctggtgctccagtaggggggtcaggtccacatgtagtacaaattgctgatatccctgttaagcaaaccactagctcttcctcacgagagcagtcagatgatgatgacatggaaggcgatgctgagacaaatggaaatggaaaccctgttcaacaaagacaacagagaaggaagcaatccaaccgggaatcagccaggcgttcgagaagcagaaaggcggctcacttgaatgaactggaggcacaggtagcacaattaagagtcgaaaactcttcgctgctaaggcggcttgctgatgttaaccagaagttcaatgaagctgctgttgacaatagggtgctaaaggcagacgtcgaaaccttaagagcaaaggtgaagatggcagaggactcggtgaagcgggtaacaggcatgaacgcattgtaccctgccgtgtcggatatgtcttccctcagcatgccattcaatggctccccttctgactccgcctctgatagcaccgtcccggtacaagatgacctgaacagttacttcgccaacccaagcgaaatcggatgcaacaacggctacatgccagatatagcctcctcggttcaacaggacgacaattttgtcaacgggtatcaggctgctggcaagatgggcagaacagactcgctgcagcgggtggcaagcctggagcacctccagaaaagaatgtgcggaggcccggcttcatccggctcgacctcctaggtttcatatgaaaaagtccctggtgcctaacggcaagaatgctaaattaacaatttcaacatgctttgtactggacattgataatcctgcgatgcgcattagtgcgttatggacttgtgggtcaattgctatttggcgtgtgctggctgctcactgtagtgagcagaacaagttccagtttctatcgaagagcaccctctccttttcgctagtgacttatgaatggtcgatggtttattagc

SEQ ID NO: 1721 - DNA, 438 bp, Zea mays
  Clone ID: 700165467_FLI
gttcacagtgttgacgaggtgtacgccgggagtaaggcctgggcaccaaacaatggcattctgatcagtgggtgccagactaaccaaacatcagcggatgcaactacaccgcagggtgtctcctttggtgctctgagcaatgctatccaaaccattcttgcagacaagcacgggaaggtgacgaataaggatctcgtgatgaaagcacgtgagctgctgtccaagcaagggtacactcaacagcctggactatactgcagcgatgagcatgttcatgtcgctttcatatgctaaaacttggattgttacagcgattgctttcctccatccttttgtgttgatcggtgcaccagaggttgatgtttttcttcccatgtatgttacagctatattgtatcagtgtttgttgcttgaggatatgtttcaatggactatgtc

SEQ ID NO: 1722 - DNA, 933 bp, Zea mays
  Clone ID: 700165481_FLI
gtcagttcctgcgggcatgcgaattggatccacctgctgctatggctaccaatgtgccttcttcgcttgtgaattggttgctaagttttgggaatgacgactcgcttttgattcatctctcaaccgatcaagtttatgagggggtgaaatcattctacaaagaagaggacgagacaatgccggtgaacatgtatggaaaatctaaagttgcagcggagaaactaatcgttgagaaatgctcgaactatgcgatcttgagaagcagcattatatatgggccacaaacaatctctcctgtggcaaaatcccttcccattcagtggatggatggtgttctttcacaaggccaacaggttgagttcttcagtgatgaattccggtgccctgtctatgtcaaagatatggtggacgtaattttgtcactgacaaagacttggttcccagatgatggcaaaaaagtccaggtcctcctgaatgtcggtggtccagatagggtatcaagactgcagatggctgagtctgttgctgttgtccgtggatataaccccagtataatcaaatctgtgtctgcatcatcggttaatcgcggagtagcttctccaccagacatatccatggacatcaccaagctaacccagatccttggtatcaagccaatatcatttcaagatggagtcagaagtacacttgatgcagaagacagtacatgacgcttcctcactggtttgcttgagttcttaagggggagttgtttgcattcaaatgtagtagtgtgacataaagaatcacatttgatttgcaaaatttcagtatcggtaaatttctgttgggtttatgtgaaatatgtaagttttgtacccactaaacaccaatgccaccatccgtgttactgcttgattctgcaccattatgaataaagatggactccatttt

SEQ ID NO: 1723 - DNA, 1203 bp, Zea mays
  Clone ID: 700165566_FLI
cggaagaccaagattcatggaacgtgcagctattccgctccatcgatggcggcgcgtgctttggcttccctagcaccccagaggccgcagctcaatctggccttgtcagtggcaagaataatgtcctagacaggagcatccatgatgcctacatccacgccatacgccgtgccaaacacttcatctacatcgagaaccagtacttcctcggcagctcatttgcgtggaaagccgacggcataaagccagaggagattgaagcactgcatctcgtcccaagagagctctcgctgaagattgtgagcaagattgaagctggcgagcattttgcagtctatgtcgtcctgccaatgtggccagaaggccctcctgctagtgggtcgattcagggtatactggactggcagaggaggaccatggagatgatgtacaatgacatctctgttgcgctcgatgcaaagaggatcgacagggacccgagggattaccttacattcttttgcttggggaacagggaggtgaagatggatggtgagtatgaaccttcaggtcgtccgcttgatgggacagactacgctcgggcgcagaatgcacgtcgcttcatgatctacgttcactctaagatgatgatagtcgacgacgaatacatcatcgttggatctgccaacatcaaccagcgctcaatggatgggggcagggactcggagatcgccatgggcgcgtaccagccgtgccacctgaacaccaaaggccaggtcgcccggggtcaggtccacggcttccggatgtcgctgtggtacgagcacctcggcatgctacacgacgatttcctcaacccgggaagcctggagtgtgttcggagggtaaaccagatggcagacaggtattgggacctctacgctggtgacagcctcgacgccgacctccttgggcacctactcaggtacccagtcaccgtcacgaaggagggcacggtgacagagctcccgggggccaagttcttccccgacacacaggctcttgtgcttggggcgctatcgaaactgcctcctattctcactacatagagaaaccttctgtactgttgccatgtgacgtttgcgggctgaattggttgaggtttttgctactccgtattatgctactactggtagtgttattgtatggtttcttcctaataatagtatttatagttttggactt

SEQ ID NO: 1724 - DNA, 1119 bp, Zea mays
  Clone ID: 700165595_FLI
ttcatagtatttccaatgggtcacctgtttctaaggcagatgtttctgagcaatccataacaccacaaactccaacacatccttcagtagcagaagaaaagcttgatagctctactgaggcacctgcatctaaggtgggtgatgctgaagcatcagaaacatcacaatctgcaggacatccttcaacagtggaagaaaaccagcaccatcaagttagcaaacattctgatcctagtgatgaagcagagccgaatcagcttagagagtctgttcgagacttacctgatggtagtgcatcttcttcgcctactaaaatacatcaatcaggtgacaccgaaacaggggaatctattcacacaggaaaggaagatacgtctgataggaacatcttgcagtcacaaccagcagagtctgcgctagctagttcagatgatataacggaagctgaggacaatattgctcaagaatatgatgccccaaaagaacttagtggcccacaggagagtagtgatatggtagacaaaggtactcatcttgaagttaaattacatgatagcaatattaatactgaaaaaagtgaggaagaaagcaataagatggagtcaggggaatcatctgttgttgtacaggaggataatgcaatggagcaacctcaagacttaacgttgaagtccttaactgcagagcatgactcaaattcgcagaacgagtcagtgatcaattcgactgatatacctgttggactaggtgaaggtcctccaaatgattttacaaaagaagaaaagattctagaatctgttagaggcacagattctcagactctggactctgttgtttctgtcgatgagctagagaaattaagacgtgaattgaagatgatggaagctgcattgcaaggtgctgcaagacagtcacaggtatgatttcttcatgctcaaatctctgtggtagcaatccagttaaagcttgtggagttatactctataaaatgtaccccatgcgggagtgaaccttttaaatctatgcattcgtactatgttaataatggaagcacttagtagttctgtacagttcatgctttacaattgttgcatggacattagtacagtcgaaacgttt

SEQ ID NO: 1725 - DNA, 515 bp, Zea mays
  Clone ID: 700165611_FLI
aagggcacaggccgctccacctcgccgtcgagggaggccacgcggaggccgtggagctgctgctcgacatgggcgccgacgccaacgcccggaccaggcgcggcgccacgccgctccagatggcggaggccatggggtacgaggccatcgctcagctcctgtgcgcgagaggtgcggaggtggccgccgcgtcggcgttgtgcgccgcgtcgtcgtcttcatcgtccatatcgtgcgcctgatttgctgccggttatcggttgggagagactgttggacggacacgaaggcttgtttgtttccgctgctgctcctgctgtgcgtgagccgagagatgcctacagccgccgtggctggctttaaagtaagaagaagcgaacccgtccgaaattgtactgtactgtatagtggtttgttctgctttgttgggagagtagctcattgttgagacggtcgattgctatacgcggcgtgctggtggaaaaaaaacattcgctatgcaattgcagtgcttt

SEQ ID NO: 1726 - DNA, 817 bp, Zea mays
  Clone ID: 700165628_FLI
gaaaacaagtgtggaagagggaaaactggaaaaggcacagcaaaccgagaaaatggcggctcggcgtgggcgagagtgggacggggacgagcagggcgcggcgctgccaacgccggcgcccctcggcgcgccggtcgtctgccttctcagctccgccggagacctagccgccggcgccttcgtaggctccctcgtcggatacggaaaaggtttgatcacaaaccaaggcacgaaggcttgtcttagcattgctggatcttctgcaaagacatttgctgctcttgctggtgtccaaagtttcatcatgtgcttgctaagaagactgcgtgggaaagatgacatgatcaatgcgggtatggcaggttgttgcacaggcattgctttgagctttccaggtgcgccccaggcaatgttccacagctgtgtcaccttcgcagcattctcatgcataatggacggtctcagcaagcagcaggcagcaatggcactcacacttgatgtgaaatctccaactgtcaagtatgaggagggccgggtcatcccaccattcactcttccgccgcttctggatgcattggatcctctaggttcattctgccagacccttatcaagcctaagcattaggagtgcgctgaggcttgttaccccaaaaaggcagtttcgatctatagtttggcactgtatgctctataaccgttctgaatttgtctccagtcatgctgttcaagtttggtaactgtagtggcgctataggacatatgcccattttttgtcaatggtacattttttatgaaacttgctgaagagattataacc

SEQ ID NO: 1727 - DNA, 2044 bp, Zea mays
  Clone ID: 700165712_FLI
cgccgcctctgctgcagcgggcagccgccatggcgcggcgccacgggtggcagctccccgcccacaccctgcaggtggtggctataacagtgtactctgtgctttgtatagcattctatgctttcttctctccatttcttgggaaggacttgtatcaatatatcgctgtcggtatttatagttttttgccaggctttatctgtgctgattctatatgtcagatgtactgcgattgatcctgctgactctggcatcctgatttccatggatgacatactaatttataaatcagaagcacatgtagacactcaagatgaagctggtaagccaggattgaggaacgatgaggatatccgaaagcataaatcatgctttggaagggtttgtttttgttgcgctatttttacaactggggactgtcgcggaggggatgaagctaaccatcaagaagattatggtgaagaggcactcttttgcaccctttgcaacgcagaggtgcgcaaacatagcaagcactgtcgaagttgcgacaagtgtgttgatgggtttgatcatcactgccggtggctgaacaattgtgttggaagaaaaaattatatcacatttttatgccttatggctgtgagtctggcttggcttgctgctgagtgtggagttggtattgctgtttttgttcgttgcttcactgacaagacagtcatagaagatcagattggggaaaagctgggttacggtctttcacgtgcaccctttgcaaccattgtagccctggctacagctctttcaatgcttgcttcagtaccactaggagaactatttttcttccatatgatattaatccggaagggcataacaacttatgaatatgttgtggccatgagggctcagagtgaacctcctggaccttctgtcaatgatgaccaacaaagcttggcatcttctccaatgagttctgcaccaacagcttttagtgggagctcgtttgcacggcactacaaaggcgcatggtgcactcccccacgtatcttcattgaccaggacgaaatcatcccacacctggagcctggccgagttccttcaactgttgatcctgataccacagacccaatggaaagaaccaaaacccatcctaaacggccagtccgcatcagtgcgtggaagcttgcgaagctcgattcaaatgaggccatgaaagcagcagcgaaagccagagcctcttcgtccgtgctgaaaccgatcaatactcgcaaccagtatgaggcagacagtgatagcctcagtagcagaaacagtgtcataagtgctgataccggacaccataggtaccctcggtcttgcgggaattcgcagtacaagccctcttatccaccaagcagagcaagtgcagatgacatcgagttgtacccccagacaccgagcagcttccagagcaactcacggacttcaactcccatagccgagcaccatccatccaagcatttcaacccaatctaccagacatcagcaaacaggtctccattctcagcaaaagcaagtgtcagtgaagctcctgtctctgaaatcaccaatgcagggaggtcctaccccccaccacaagcggacagatcctcccggtcatctgtttactgggatcaggaagctggcaggttcgtgtctgctcaggcaaaccagggatctagctctcgccctgcctatcctgatcttctatacaccgggcagaatatattctttggtggacctctgattgcagatcccgcagcaagaagcttcagagatcctggtggctcgagccaaaggtctgccgggcctcggtcgcaccagctcccggtgttcgttcccagtgacccccagaaagatcagctgtccaggttaccgtgaaatgctatatcttttttttttggggggggggggggggtagtagtcttccgaaacacatgttgccctgccgggttattaatgtatagttattagctcttagacctgacagaatagttcatgactttgtatcgggttcatggaaattaagacctatttaggcactatc

SEQ ID NO: 1728 - DNA, 993 bp, Zea mays
  Clone ID: 700165723_FLI
tcgcgtgccatcctagggtttctttccccgtcggcgcctccccagatttggccgccgccgccgctgacccaggttgtcttgatggcgcccgctgtagaagccgtgaaggagacaggcaccttccagaaggttcctgccttgaacgaaaggatactgtcatccatgtccaggaggtctgttgctgcacacccttggcatgatctggagataggtcctggtgctccaaccatattcaactgcgtcattgagataccaaggggcagcaaggttaaatatgaacttgacaagaaaactggactgatcaaggtggaccgtgtgctgtattcatcagttgtttaccctcacaactatggattcattcctcgcacgctttgtgaagacagtgatcctttggatgtactggttataatgcaggagcctgttatcccaggctgtttcctacgtgcgaaggccatcggccttatgccgatgattgatcagggagaggcagatgacaagatcattgcagtgtgcgctgatgatcccgagtacaggcattacaatgatatcaaggagctcccacctcaccgcttggctgaaatcaggcgcttcttcgaggactacaagaagaatgagaacaaggaggttgctgtgaatgactttctaccagcgagcgccgcttatgaagccatacagcactctatggacctgtatgctacatacatcgttgagggcctgaggaggtaggattctgatggctaggaaaggtggggaggatgttgacgaaaaactgggagaccatttaccgcatggaacgagtaccgttattattttatttgtgtcgtgtatactgctagtagtgaaccctcaatcaaagaccgaaatcccctggggagtcggagtcggtagtaggtgaagctagtaacaaggttggcgaaatattattttctggcctgactgcctatatatgttgtacgtgattggtatcgtaatattcattcgcttttgtgatac

SEQ ID NO: 1729 - DNA, 828 bp, Zea mays
  Clone ID: 700165734_FLI
gcctgccgaattctcctcgtcctaaaaaaccctaaccccaactccccacactcgtctcgccgggggcggcgcgatgagggctatcaccggcggcgtcgtctcctcccagccctgtcccctccacaaggccgccctcttcctcaaacgcttcaccgagtctgccgcctcccacctaccctcctccgactgctgtaactacctccgcaacgccgccgacgccacaacacagctcagccgcttccgcaaggaactcggcggcagccacaagcagggtgccgccaactccgatgcccactactatgatgatccggtgaagggcaatagaaatcacgaagatcaggagagcaaaggggacatggcgattgccgctgatgattccaaccgcgattctgccgctgaggcgaagctagatgttgcctccggtaagaagggcaataagaagaagaaaaagaagcataaacaagaggaatgcactgaggttgtgaaggagaagaaaatcactgatggtgatctagaccgagagaagaagaggaaaaagaagagggatagaggtgacaattatgacaatgctccagagcaggtagaacatataaataagaagcaaaagaagcatctggggattagttaggagaatccttactcattggagatgtatgggagtttgtgactggtgaggttcctgatgttgtattttgggcttgaatttgattactactatggctgtgttcttttggctactacgccagactccacagttttgttctgtaaaacatccaatttatatgttatggccatgaggcccaagcaatgatattgaattgttacttc

SEQ ID NO: 1730 - DNA, 1667 bp, Zea mays
  Clone ID: 700165740_FLI
ccgccgccggggcgaagcgctccccgcgagcgcgggagggcggcctcacgttgcggctccactcccgggacttcctgcccgaggagcaggggcggcacgagacgtaccgctcgctcctgctctcccgcctccgccgcgactcggcgcgcgccgcggcggtgtcggcccgcgcgacgctggcggcggacgccgtgacccggctggacctgcgccccgcgaacgggtcggcggtgttcgcggcgtccgcggcgatccagggccccgtggtgtccggcgtcgggcagggcagcggcgagtacttctcccgcgtgggcatcggcagccccgcgcggcagctgtacatggtgctggacaccggcagcgacgtcacctgggtgcagtgccagccctgcgccgactgctaccagcagtccgacccggtgttcgacccgtccctctccgcctcctacgccgccgtctcctgcgactcccagcgctgccgggacctggacaccgcggcgtgccgcaacgccacgggcgcctgcctctacgaggtggcctacggcgacggctcctacaccgtgggcgacttcgccaccgagacgctcacgctgggggactccaccccggtcggcaacgtcgccatcgggtgcggccacgacaacgagggcctcttcgtcggcgccgcggggctgctggcgctgggcggcgggccgctctccttcccgtcccagatctccgcgtccaccttctcctactgcctcgtggaccgcgactccccggccgcgtccacgctccagttcggcgacggcgccgccgaggcgggcaccgtgacggcgcctctcgtgcgcagcccgcgcacgagcaccttctactacgtggcgctgtcgggcatctcggtgggcgggcagccgctgtccatcccggcatccgccttcgccatggacgccacgtcgggctcgggcggcgtcatcgtggactccggcaccgccgtgacgcggctccagtccgccgcctacgcggcgctccgcgacgccttcgtccagggcgcgccgtcgctgccccggacctccggggtgtcgctgttcgacacgtgctacgacctgtcggaccggacgagcgtggaggtgcccgcggtgtcgctgcggttcgagggcggcggcgcgctgcggctgccggcgaagaactacctgatccccgtggacggagccggcacctactgcctggccttcgcgccgacgaacgcggccgtgtccatcatcgggaacgtgcagcagcagggcacccgcgtcagcttcgacaccgccaggggcgccgtcggcttcacccccaacaagtgctagcctagcctagcctaagcctgccttctggccctgttagccacggttgtcagtagtaatgacaagccggtgtttaattagcgggagaatgattagatggggggtaattaagcggtgggccctgccgggtctggggaggagcgaaaggcaaaggcgaggacagatgatgccattgccatgccagcctgtgtccggcgcgatgggtccagctccagcagtgtttctctctttctctcgagtatgcgtgcgtggagccttgtcatgacgaattagatcgtgggggctcccaagttaagagtatttatttttattttatttgctatgtcaagaaaatggaagtttccatcc

SEQ ID NO: 1731 - DNA, 1391 bp, Zea mays
  Clone ID: 700165755_FLI
aacggcgccggctccaaaaccatccccgtccgtggcgccggcgccaaggccatctcctccacctgtcacaccggtaccaccagctccaaagccgccgccaccgccgccgccgccaccggctccgctgcagcctccgtcgaactccacgccgacgacgtcctccgcattgggccagctctcgcccagcttctacgcgcagtcctgcccggacgttgagctggcagtgagggacgtcgttaggtcggcctccaccctggacccctccatccccggcaagcttcttaggctggtcttccatgactgcttcgtcgagggatgcgatgcatcggtgctgatacaaggtaacggtaccgagaggacggatcctgcaaacctctcgcttggtgggttcaatgtcatcgatgcagcaaagaggttgcttgaagctgtgtgccctgcgactgtttcttgcagcgacattgtcgtcctcgccgcaagagatgctgttgtgtttactggaggaccggctgtgcctgtcgcgctgggaagacgagacggcctcgtctcgttggcatccaacgtccgaagaaacatcatcgacacgggcttctccgtggacgccatggcggccagcttcaccgccaaggggctcaccttggacgacctcgtcactctctcaggggggcacaccatcgggtcggcgcactgcaacacgttccgggagcggttccagcaggtggcgaacgggagcatgacgccggtcgacgggtcgatgaacgccgactacgcgaacgagctgatccaggcgtgctcggcgaacggcaccgtgccggcgggcacggccgccgtgggctgcgactccggctcggcgtccgtcttcgacaacacctacttcgcgaacctgctgggcgggcggggcctgctgcgcacggacgccgcgctggtgcagaacgcgacgacgagggccaaggtggcggagttcgcgcagagccaggacggcttcttcgcgagctgggccagctcgtacgccaggctcaccagcctcggcgtgaaggtcggcgccgacggcgaggtccggcggacctgctccagcgtcaacggctgacgagggggcgggggaggctgcagaaacttatgttgtagttgtagagcaaggaaaggtgaggtgaggtgtggtgtcggctagttcttgttcttggcccggcgatgcttcggtgggtgagcgaggtgttgccgtgtagccggcgtcaccgtttttagtgaaaggagcgaaaagaaaatgcagaaacctgtgtagatgacgtgcctgatctgcgtctgcaaccaagggcatagttcactcatgacgatggacactgtactttgacctgataaatgacatagcaagcgaggcgaacgtgcttacgcggttc

SEQ ID NO: 1732 - DNA, 926 bp, Zea mays
  Clone ID: 700165819_FLI
accagttcctctgacggccgccgtgctccgatgaagctgagcgtgctccgtatccgccgctcccactccttctccgtcgccttcctctactggttctacgtcttctcatgaacgcatcgcccctctccaactgctgatccttcgccgtctctccctctctctttctctctgagatagtctttcgaatccatctctagggctcctgtttctccccatcctccccccaccccaccccccaccaaacagattcaatccgacaagacaagcatccatgtcgtcgtcacgccggagctcgagccccgacagcaacgacacgacggacgagcgcaagcggaagcggatgctgtccaacagggagtcggcgcggcggtcgcgcgcgcggaagcagcagcggctggaggagctggtggcggaggtggcccgcctgcaggcggagaacgcggcgacgcaggcccgcaccgcggcgctggagcgcgacctgggcagggtggacggcgacaacgcggtgctgcgcgcccgccacgccgagctggccggccgcctgcagtcgctgggcggcgtcctcgaggtgctccagatggccggcgccgccgtcgacatcccggagatggtcaccgacgaccccatgctccgcccctggcagccgtccttccccccgatgcagcccatcgggttctgagaatctgagcctcagccggcgggagagagccaatttctgtcgtcgtgccgctgtctatctcgtattggtatatctattcataaatcatccttgtcatggtttgctcttcttgtcagtgttataaatttgcttcttgttagtgttataaatttggccatcggaaaggatgtgtttgtagttgtaatatcttgtttggagttgtaatatcttatcttgcttatgaaatcgaatatgcctatatatatat

SEQ ID NO: 1733 - DNA, 1632 bp, Zea mays
  Clone ID: 700165829_FLI
ccaagcgcgtcgccgacggcattgcgtcgccattgcctccaaatccgtgtgcgactcgcgtgatcccagatcccgctcgccgtatcccccgcagtgacctctgaccagagcattttccgcgcggaaaatgccgccgtttcggccggctcttggaagggcgcttcttctgtaggaccgcggcgcgaggctgcgatggcgttcgccgccagcgagggaaatctttccccggcgctgcccctggccactctgatcggccgcgagctccgcggcgacggtaccgagcgcccgcacgtgcgctacggccactctggcttcgccaagcgcggcgaggactacttcctcgtcaagcccgactgcctccgcgtccccggagacccttcctcctctttctccgtcttcgctgtattcgacggccacaatggcgtgtcggcggcggtgttcagcaaggagaaattgctggagcacgtgatgagcgcggtgcccgagggcatcagtcgcgaggactggctacaggcgctgccgcgcgcgctcgtcgcaggattcgtcaagacagacattgacttccagcgcaagggtgagacgtcaggaacgacggcgacacttgttgtggttgatgggttcacggtcactgtggcgtcggtgggagattctaggtgcattctggatacacagggaggcgaggtctcattgctgactgtggatcaccggctagaggagaatgcagaggagcgtgagcgcgtcacagcgagtggaggagaggtcagccggcttaatctctgtggtggacaggaggtgggtcctctccgatgctggccaggtggattgtgcctttcaaggtcaattggggatactgatgtcggcgagttcattgtaccgattccacatgtcaagcaagtgaagctcccaaatactggtggaagactaataattgcatcagatggaatatgggacgctctgtcctcagagagtgctgctcaggcgtgccggggattacgtgcagaactggctgcaaaacttgttgttaagcaagctctgaagacaagtgggctgaaagatgacaccacatgtgtggttgtcgacatcatcccatctgatcattgttcaacaccaccagcattgtctccaaagaaaaatcagaacaagttgaagcatcttatttttggtaaaaggtctcatagttctgttggaaagctcagcaaatctgcttcattgggttcagtggaagaaatattcgaggagggatctgcaatgttggaagaaaggttgggaagtaattttccaccaaaagcaaatctgcctccatttcgctgtgcaatctgccaagtggaccaagagccattcgaaggtttaatgacggacaatgtaggtggctgctgctcaaccccatcaacaccatggggtggtccttatctttgctcaggctgtaggaaaaagaaggacgcgatggaaggtaaacgatcgaatcgttcaacgacgtgcaggtgaaggttctgataggaatcactgggactgggtcctgtgatcctgtcatgcaagcttgcaaagtagtctccgatttcggttttctgctccttgtaaaaagagaagaataaaccgtctgtcgtttgattgaagtattgttcggtgaaaact

SEQ ID NO: 1734 - DNA, 893 bp, Zea mays
  Clone ID: 700165953_FLI
cggtgaagatggaggaggagcacgcgctgctgcagatgcagcagtgccagtaccagccgccgcccccgatgttgtacccgagccagtacttctctctgccggcgatgaactccggccacctccccccggcgatccggaggtactgcaaggcggagcagcaggtggtctcggcgcagacggcgtcggtgatcagcccgtcccgcgagaccgggctcagcaccgaccccaacgcggcgggcggctacgcggagatctcgtcggcgacgaccccgtcgtcgtcgcaccagttcctgcccgagctcgacgacccggccctcaacctcgccgacctctggaagtactgaagcctgggcgacgatcgaccggtggctgggccgcccacccgccccggtcacgtggtctggttggttaatttgcttgatttgattgattatcttggtctcttgtgggatctggggttggtgaccggttcgctgatgcgtcctcgttcgtcacctccgccaggtccggcctctactgacctcgggtctgactagattattatccgtccagaccgccaggggattagggcttccttgttaattaattaatcccccctcccccatcctaggttactttctcttggtctctgtacatagtactggtaccctactctgattgtgtcattagcagtagcatgattactgataggattaatgaaatgggggtagattaagggggcctgcatctgcgtcagcaatgcagtgcatgcatggggggttttacgggttgattagttaatttgggcgcttggtgagccagctagcgctagcttcatatgtacatgtactgccattaattgctgcttgagctcgacataccattatgtgaatttgatgcttcagttaagctct

SEQ ID NO: 1735 - DNA, 1227 bp, Zea mays
  Clone ID: 700166008_FLI
ccaatgcggacaccacccggagacaatgcactgctgtcaccgaagacagcattcttgttcaatgtgatgtggcaaagatcacatagcttttcgaccttgtttccagcctccttcgacttcatcggcgaggcctacttcggcgtgcgcccctcggcgaccgagctcggcaagggcgggccgagcaaggcggccaagtggctcatctggcagctccacccgctggtcacgctcggcctccccatggtcctggaggagccgctgctccacacgttccacctcccgcctttcctcgtcaagggcgactacagggcgctgtacaagtacttctccacggtggcgaagcaggcgctggacaccgccgagggcctgggcctgtcgcgcgaggaggcctgccacaacctcctcttcgccaccaccttcaacagctacggcggcctcaaggtgctgttcccgggcctgctggccaacgtggccagcggcggcgagaagctccacgagcggctggtggccgagatccgcggcgccgtggccgacgccggcggcaaggtcaccctcgcggcggtggagaggatggagctggccaagtcggtggtgtgggagtcgctgcgcctggacccgcccgtcaagttccagtacgggcacgccaagaaggacctgctggtggagagccacgacgcggtgttccaggtgaggaagggcgagatgctgttcggctaccagccgtgcgccaccaaggacccccgcgtgttcggcgacaccgccggggacttcgtgcccgaccgcttcctcggcgaggagggcagcaagctgctgcagtacgtgtactggtccaacggccgtgagaccgagaaccccagcgtcgacaacaagcagtgccccgggaagaacttcgtggtgctggtcggcaggctcctcctcgtcgagctcttcctccgctacgacacattcaccgccgaggtcggcaaggagctgctcggcaccagcgtcatcttcaccggtgtcacgaaagctacctccggtccgggcagcgagtaaaccgcccggccggcgcgcgtcgttggatatatgatgagtggacgtgacagagtgtcccattatttcttaatttcgtcattttcctccttccttctaataagacttctctctcaccctcggccccaccttcacgtgtgattggaggtgtttgtcgcttttgtaataattataatgcaggatggcatgttgcat

SEQ ID NO: 1736 - DNA, 1638 bp, Zea mays
  Clone ID: 700166013_FLI
gggctcacagcactgattgtccacccaccactctacgcaagcaatccttcggacttcggtgggggaaatggaggccgccgccgccgccgagacggggctcgcccagaaaccggttgtgctgtacccttcgccggggatgggccacctggtctccatgatcgagcttggcaagatcctcggcgcgcggggactgtccgtaataattgtcgtcgtcgagcctcccttcaacacgggcgctacggcgcctttcctcgccggcgtctccgcggccaacccgtccatctccttccaccgcctgcccaaagtcgagcgcctcccgcccgtcaagaccaagcaccaggaggcgctcaccttcgaggtcacccgcgtctccaacccgcacctccgcgagttcctggccgccgcgtccccagccgtgctcgtcgtcgacttcttctgcagcatcgccctggacgtggcggaggagctccgcgtgcccgcctacttcttcttcacctcgggcgccgaggtcctggccttcttcctgcacctcccggcgatccacgagcggaccgccgcgagcttccaggacatggggaaggagctcgtgcacgtgccgggcatcccgtcgttcccggcgacgcactgcatcctgcccaccatggagcgcgacgacgtggcctacgacggcttcctaaagggctgtaccgacctctgccgctcccagggcatcatggtcaacacgttccgctcgctggagcagcgcgccgtcgagaccgtggccgcgggccactgcacgccccccggcctcccgaccccgcccatctactgcatcgggccactcatcaagtccgaggaggtgctgggcaagggcggcgaggagtgcctggcttggctggacgcgcagcccagggccagcgtggtgttcctctgcttcggcagcatcggccggttcagcgtggagcagatcagggaggtggcggccggcctggaagccagcgggcagcggttcttgtgggtggtccgagccccgcccagcgacgacccggccaagaagttcgagaggccgccggagccggaccttgacgcgctcctcccggaggggttcctggcccggaccaaggataggggtctcgtggtcaggtcgtgggcgccgcagcgggacgtgctggcgcacgcgtccgtgggcggcttcgtgacgcactgcggctggaactcggtcctggaggcggtgatggcgggcgtgccgatggtggcgtggccgctctacgcggagcagcggctcaaccgggtgttcctggagaaggagatgcagctggccgtggccgtggaagggtacgacagcgacgagggcatcgtggcggccgaggaggttgctgccaaggtgcgatggctcttggagtccgatggcgggaggatgctccggaagcgcacgctggcggccatgcggcaggccaaggacgcgctgcgtgagggcggtgagtcggaggccacactgaccggattggtggacgagtggaaacgcatttgacgcggtacgtggggattgggaacgggtgacgttacgcgacggatgaagtgccggtcatcatttcttttaaaaaaatatatattagtaatatattcatgtatttttcaataaaagatacaatttattgc

SEQ ID NO: 1737 - DNA, 1126 bp, Zea mays
  Clone ID: 700166025_FLI
ctcagctacgatctgaaagaaacccgccaccagctctcgtccttccttctctccaatccaaccgcgatcctttcagcttcagcttcttctgctccttctctggtgaggaggcgtggcgagagactgcgactgcgcgatggaggcgtcgtcgtcggcgttggcgctcgtggccgccgtgctcctcctctcctccccgctcgctgcgtcagatttctgcgtgtgccgttcggaccagccgacggcggtgctgcagaaggcgatcgacttcgcgtgcggcccgcagggcggcgccgactgcacgcccatcctgcagggcggcgggtgctacagcccggacaccgccgccgcgcactgctcctgggccgccaacacctactaccagaacaacaaggccaggggcgccacctgcgacttcggcggcgcagccaccgtctccaccaccgacccgagtttctccgggtgcactttcgcttccagtgccaccagcgccggtgctgggactggaaccgggacggcgggcagcagcaccttcagccccagcgcgggcaccggcttcaacggcaccgggaacgggatgggcggcagcactactaccggcctgggacccacgggcaacgcctttgacgccgccgccgccgccgcgccgggcctgctccccagcgccgcgtccctcggcctcgcactcgccgtcctctccttcctaacctagccctgccgcgccattaacggcagcctcccctcgtcttatgtctggtcgtgttcagtaccatacctctctgaacatgagccagctgctgctgctacttggcttgctccatggcggaaggggacgggccggggagctgtacgtactgcgacgaagaagagtgcggtggaactggctggttggttggttttggttccagcttcattttcacctcacaccccacactgctagtggcgacggtggttggggttgcggggtgcggtgcgtgccttttttgatgaatcctagctacacgacgggatggcgtgtggtttattcgctggtaggatggctgtctcttttcctccgaggaccattcatgtcttccttgtttgtacgtacctctcttcttttcttgttttatgtacaagacttgtcgct

SEQ ID NO: 1738 - DNA, 130 bp, Zea mays
  Clone ID: 700166031_FLI
ccaagatgccaacttgttctagcaactactacattacattttcacagatacatgatatatgattgtttttttttatttttatcttctggttgtctctgtggggttatgaaatatcacagcttttctttct

SEQ ID NO: 1739 - DNA, 682 bp, Zea mays
  Clone ID: 700166038_FLI
gtgccgcggttggcgccgggcctgctcctgagtggaaactgtcctcagatccgtgcctccatggggctacccttgtccccgctccgccgctcctcatcagactgtgtacccttgggccggtgactatgctatggtggctggggctagggttggggaccgtgggggtgtggtccttggcgcggttccagtcagggctgtgatctggtgacacgggatctgagccgtccttgatggactcttcttgagtcttggttgcgatgtttcgttttggtgcactctctatctctttgttgctaattattcttcaccatgtccttccatttcgggactggcagatcgatacgcctgtatatttccgtgcgattggattgatttttaccaagtgcggaaagattgggagttgagatagtgagtgggttttcttctcctgttcgctctgcctgctctctcgctcacctggcgagactaggaccactgccaccatatgtcaggtgccaggcctttgtgagcaagtttaataatatgtcctgttgatgctctaccacgatctaaggatgctcttcttcacttgccttcctatttgatctgatcctgggacctgggtcaatgtttgtgggactaatatgccaggtcagttgcatcccataagctcctgcctaagtgccatcaagaacaaagccat

SEQ ID NO: 1740 - DNA, 743 bp, Zea mays
  Clone ID: 700166055_FLI
cgtgctggcgctggcctggagcgtggcgcagctgggctgggtacgccgcgttcggttcgaatgctccgggcaacatcttggcggcaggcgggctgggtcccttgtggctcgtcgacattgccaacatgtgcctcatcctccacctgatcggtgcataccaggtatacgctcagcctgtcttcgcttcggttgagaggtgggccgcctcacggtggccagaagccaagttcatgagcagcgcatacaccgtgtccgtcagcatccccctcttgcagagaggatcggtcaccgtcgcgccgcacaagctcgtcctgaggaccgccatagtcggcgcgacgactgcggtggcgctggcgatacccttcttcaacgccgtgctggggctcctcggcgcgttcagcttctggccgctcacggtctacttccccatcagcatgcacatcgcccagggcaagatcgccagggggaccaagtggtggtgccttctgcaggctctgagcatggtttgcttggtgatctcggtggccgtgggtgtaggctctgtcactgacattgtcgatagcctcaaggcctcttctagccctttcaaaattgtaggctaacaggttactgtagtcatgtacaatgctctgagccgatcgtgcgttgaggtttaaaagaactgtggtgcgcgaattcgcgtcaaatatcgaaacttctcgattgtattttcagagagtatttattgaatttgatcagtaagc

SEQ ID NO: 1741 - DNA, 533 bp, Zea mays
  Clone ID: 700166066_FLI
gggcacagtcgggggcgggactcagctggcgtcgcagtccgcctgcctggacctcctgggcgtgaggggcgcgagccgggaccgtcccgggtcgaacgcgaggctgctggccaccgtggtcgccggcggggtcctcgccggcgagctctccctgctgtcggcgctcgccgcggggcagctcgtgaagagccacatgaagtacaacaggtcgagcaaggacgtctcgtccacgacggccaccgagaagacgcgtcaacgtgaagtggacgtgtgaacagcagggattttagtttttgttcttccttttggtgtgttcataagaaagagctctggccgtctaggcgcagaaagaagtgttgtttgcaggtcgtggttggttggttggtagattagatctctctctctctctcctttgttgttctttcggcttggttgatctctctccttccctctttgcgtcaggaagcagcagcttgcaaacctggtctcagcactgtaattatttcttctgttctactaccacatcttttgtt

SEQ ID NO: 1742 - DNA, 1213 bp, Zea mays
  Clone ID: 700166135_FLI
cggcgctcaccctgctccctgcgccggatccccgttcccctatgtttccatggccgaagctcccttcctctcccagttcgccggcgctcatccatggccgcgccactggctcgtcccctgcgcagcactccagttgcgtcgctgcgagctcgccgtcaaccccatccgggttcctggcgctcctcttctctggctgtcggtcttgtctccctctctcaagcacgacggcacctgggcactgcacgaccacatgtcttctcttgttgtcgtcctcggctcgcgtcggcatgcgctcgccagcttccttgcccgcgtctgctgagcttgccaatgctccatctcgtcggactccagccacctctccatgccacgcctatttccctgtggtcggagctcgccaacgcccattgttcctccacttcgttggccatgtattccctccacacacacctcctgctcccctcgccatggcatggatgaccgatgtatctgctcttgtgtcatgttcaagcaatcactggttggtgggttgtgcactatgtcgggctcaccgagtttttggtgcgctgtcgcggatgccgtcgctcagctcgcccaaatcctagccataattcctgtcacgccctgtgtcggcatgctgactcgacgttgtcgtccttctttatcctcatcttcgcctcgacctcgcgtggtgctcggtcgtgcacagctgctggtcgtcgacgtccctctgagttgtcggtcgtcgctcatgttcacctccgtgtgctgggtggcgtgggtggtaatgtctcggcgcgctgttcgttggtggttcgaggatgtgcttgagccagagatgttccaagtggatactggacgaccttacaccgtggacacgtcgaagatccatagcatactgtggtgccaaggagagaaattcctaggaaccgggtaatgaagcgagatctgtgcaacaactgccaggagctcgaccgaatgtctaaactgagagccgttgtcgccctcgcggttatcaaatcgattcgatcgtggtgagccaatttattatttcggttaattgaattggatagttataaagccacaatgatttttcttgtcgttagcataggcccattatgtgacgatttccagatcggtagttgtaacaccccaggtgtttatattccgctcgacaacgagtacggatttaagcgcgtaatatcagtggctg

SEQ ID NO: 1743 - DNA, 1494 bp, Zea mays
  Clone ID: 700166193_FLI
gacaggatcatagggtgcgttattgtctcacactcatagcatactgtggtagtgtgtccttctaggataacctgtaagacaaatataatataatgatatataggtccttgttcctgtcaatatttttaaaagttgtttactgtggtatgaaataaatccatgagaggtttgagctgtgtatgttgtctgggttttatagttactcttgcactagttttctgtccatgatatttttcatcatattttctcgatgagatcaatcaagagcagaaaaatgaacagatatctgagtgctacattagttcatggtctttttcagttgtgtcagttgttttatgttggaaaactgactcctatttagaattctatattagtatgtaccttttgttatgccacatgaacctatggcaacagcctaattccatagcccacattaccttcaaggcaaaacctttccacaataatagtcccttgaaaacttttgccacgacaatacttcactgctacttggcccccctttggaatgcaggaattgtataggattcagttgtcacatgaaaaacataggaaagaggaagacatctcgcatttcaatggggggctataagttcaatttttattatatatatccgattaattgaatatttagttcattacaggtccaagaaagtgcttgaacttggatctggttatggattggctggacttgttattgcagccagtacaaatgctgacgaggttgttatttctgatggcaacccacaagtagctgagtgtatccttcttaatataatgtatgcacaatggagaatggagtttttgccaatattgtgaacagatcaatcattccaaaacttagcccgttttgttttgttttgtacttttcttatttcaaaaaaacatttgttggcctttgtaaaccattaacccgcagacattcagaagaacatatccatcaatgcagagacttttggtgagaccaaggttaaatctttgatactgcattgggacaaagagcaagcttcagaaatgttgaatacttttgacatcattgttgcaagtgactgcacatttttcaagcaattccataagggccttgctcgaacagtcaaatccttgctgaagcattcggcaacctcacaggccatcttcctgagccccaaaagaggtgattctctagacaaattcctgggaattattaaagagaatggtctcagttgtgagttgatagagaattatgatcctactgtctggaatctgcacaaaaaattggtggctggtgaggatagaacctggcctaattatgacaaggagcattgctaccctcttctggttagaattggctattttagtgagttctaattttcttacatttttttatcttggatgatctattttgacatgaaggaggcagcaaaatgagatttagaagtatggaatctacttaattgtctagacctgaatatatgagtgaatggaaaacagttattcatg

SEQ ID NO: 1744 - DNA, 1337 bp, Zea mays
  Clone ID: 700166205_FLI
cgactccaggaggggcgcacttgactttcccctcctcctcctgcgagcaccttcctcgcctcgctctcatggcctcatcagagcctatagagtgccaggttgtggcgctgagggtgtcgattcactgccaaggatgcaagaagaaggtgaagaaggtgctccagaacatcagcggcgtgtaccgatgcgaaatcgatgcccggagcaacaaggtcgtggcgacggtctcgacggagctcgacccctacatgctggtcgccaagctgcgcaagtccggcaagcaggcggagctgtggccggagcagccggtgcagcagcaggagcagccggcaccaccagctgagagccaaaggcaggaggagcccaagaacaaccagcctgcggagccgggcagacccagcgaacctgccgaggagcgcggcgccgccgccgacacggccgaggccgccgcggcggagccgagcaacccgcaaccttcgccgccggagcccaagccgagcgccggcggagaggccccgaatccggcggcccaggacagcaaagagaacgccagcgccgatgacgtcggcggcggcgacgagaccgccgcagcaccggcaccggcaccggcgcagcagggacccagcgaggcgaaggggaaagcgaaagcgaagcagcatacggcggagatggaggagaggcagcccgtggacgccagagtgactgtggagtacgaccaccgaggcgtcggtgggggctacgtgagccgcatgccgccgccggcagtcatgagctacaaccaggtgcgcccgagcgtgagcgcgtcctactacgcccccgccccggctccggcgccggcgccgatgccgatggggaggcccgggccgtcgcagggctacatcgacgagcactacacgccgtcttacagcagcagtagcaacaactactactcctccaaccggtcgccggcgtacgagccgtactactacagcgctccgcagccggcgccgtatagctaccagtaccagtaccagccggcttcttcgtccgaggattactactacagcgcgccgccgcagaggagcgccttctcgccgccgcgggagggctacggcgacatgttcaacgacgagaacgccaattcttgcaccgtcatgtgaagggaggatgcatgcaaacatggaagtagtagctagtttacttacagttccttattaatcaagcgactcttcccctctctctctctctatatatatctgtgtgtgttagtagattttagaatcagtaattaagtacgagtaaggagatgtattaaaagcactgttcagtcttgatggcgctgaataagttgagagctg

SEQ ID NO: 1745 - DNA, 1075 bp, Zea mays
  Clone ID: 700166211_FLI
ccacttcctcatggagttaaacttcatgcactcattgatgcttgtcatagtgggactgcacttgatttgccttatctctgcagaatgaacaggagtgggcaatatgtatgggaagatcaccgaccgcgatctggtgtctggaaaggcactagtggtggggaagctatttcctttagtggttgtgatgatgatcagacctctgcagatacctctgctttatcaaagatcacttcgactggtgcaatgacattctgcttcatccaagctattgaacgtggacagggcaccacctacggtagtatcctgaactctatgcgttccacaatacgcaacacaggtgactcagcgggtgtaggtggcggtgctgttacatcattaattacaatgcttcttactggagggagcctttctgctggtggtctgagacaggagccacaactgacggcgtgcgagccatttgatgtctatgcgaagcccttctccctatgacgtgttcatagtattgcccaatgtactatggggttgtttgtttcggcttctggcagcttctggccaccaaaagctgctgcggactgccaaactctcagcttttcagccagcttctataaaattcgttagggcaaaaaccatccaaaatcaacataaacacataatctgttgagtcgttgtaatagtaggaatctgtcactttctagatcgtaagccctatgaacaactttatcttcctccacatgtaatcataataatactcagattctccccacagccagattctcagaaaagctggttagaaaaaagctgaaccaaacagcccctatatatctcctcccatttcacgttatcattatgtacatttcggtattaaaccttgttcgtttgtgtcggattgcacctggaatcgttccagctaatcaaaatttatataaattagagaagcaatccggtacaaacgaacaagaccttagaagtcctccatccatccagattgttaacaacgcgtggaattgccctttatttccatgccctcacaatgttcagtgcacagttgttaaaggagagtacaatttgatgcctc

SEQ ID NO: 1746 - DNA, 520 bp, Zea mays
  Clone ID: 700166236_FLI
atcaagcctgtgatcagcgttaaccttcagccagagcagtcagttgtccaacaggacatagttgacatgtacatgaagagcatgcaacagttcacagaatctcttgcaaaaatgaaacttccattggacgttgagaatagtagtccctcaaacgaagattcatactccagtacagttgagaagacatccccatccccatcttcatctgcagcaaagggttctagggtcttttatggaagcagggccttcttttaagtttctaatgcaaagtagtacgctagctcagtagctcgttactatctcctacatacatatacatggttccaggtttatcatatatctgctggcatgtaatcacatactttctgtctccataatatgcttctaggactcactcctggtattgctattagtgttatgctttgctagaagataataatttcatctcatagttgtagattaatcccatgtactaatagatacccatgaaatataatgtcatgaaatcagttctgactcg

SEQ ID NO: 1747 - DNA, 725 bp, Zea mays
  Clone ID: 700166248_FLI
gagatgttataaattacgtgattgagaagtcaccagagggagcccagatcagttccccggggtcttcctgtccccccacgcacaccagagttacagttggtagttgctttgctttgccttttttttcattatttcatttgacactagtgtaagtgggtgtttggtttatagggactaaacattagtccctctactttattccattttagttcataaattgttaaatagggaaactaaaatatagttttagtttctatatttagtaaattagggactaaaatggaataaaattgagggactaaaaattagtccctagaaaccaaacaccccctaagtaaattgggatagtggcagcttagagagagagagagattagtagaaaggcgcccagctcgtagcttttcagctggtggtgcctctggctagtatagagtacatatttttttttcttcttctttgctttatccctttttttttctccctttggatgacatggatgtgcatccagctccagttgttgtcacccagtccagtggactggggtgtctgggatcttggttgctgttacttgctcgccattgccacccagttgctgccgctgctgctgaggtgttgctggcttggcttgtatactctgtgttccctgtggctatcggtgcgtgtacatttgttcacagtatatgactgatggtattaaaataagaaccggtgacggcttctgtttc

SEQ ID NO: 1748 - DNA, 1272 bp, Zea mays
  Clone ID: 700166257_FLI
ccattcgcccaaacccccgccgccgtgacccctgccagcccgcggccttcccctcgttctaggcttcaactgccggcctcgtgtcttctgggcaagtgaagagagagatggcgtcgccaataccgcgcgagtgggtcgggctgcagcagtttcctccggccacccagaccgagctgcacgagctcctcggcaagctcaaggaggaggatgtgagcacattgacaattctggtgatggggaaaggcggagtggggaagtcatctactgttaactccatcgtcggggagaggatcgccactgtcagcgctttccagtctgagggtctgagaccgatgatgtggtcgcgcacaagggcagggttcaccttgaacattatcgacactcctgggcttattgaaggtggatacattaatgagcaggctgttgacatcattaagagatttcttctgggcaagactattgatgttctcctgtatgtggatcgtttggatgcgtacagaatggatacacttgatggacaggttataagagccatcaccaattcatttggaaaagatatttggcgaagatcattggttgtgttgacccatgctcaactctcaccacctgatggaatcgagtataatgatttctttacaagaaggtcagaggcacttttgcgatacatccactcgggagcaggaatcaagaaacgagaatatggggatttccctttgccaatagcattggtagagaacagtggaaggtgcaagactaacgagcatggggagaagatacttccggatggaactccgtgggttccaaaactgatgaaagaaattactgttgttatctcaaacgggagcaagcccattcatgttgatcagaagttaattgatggtccaaaccctaacaatcgctggaagatgttcataccaattatacttgctgtggagtacttcttggtagtaaaaggaatccggagggcgatccatgcagatatcgcaaatgggaaggtggatgactgggagcagcgttaccgggacttggttggaagcagggaccctgtggagcagaaaggttctaccacccggaaccgcaaagcctaagttggtgtagcagaaatgattttattcgtgttgtgacccactcgatctgcttgctgttccttttcctaattatgtgttgagggctttatagagttcgctggttctacttgaaaaataattgctcgtgttgtagttgataagaatatcttttccattttatgatgcttggccctcttcgcaattt

SEQ ID NO: 1749 - DNA, 1731 bp, Zea mays
  Clone ID: 700166267_FLI
cacatcgtatcatggctataggttctctggccgcggctggtggccaacaagctcttccggaagacctcgggcagccacgctttcgtcgccgacttcccggccgccgatgacgatgacgacatcgtctttggaacggaggccgacggcgggggcgggtgcagccccgacgcggacgccagccgctgcgtgaagcgggcgcggccccatgagcgcaacaagaccctaaagtacaagctgttcgcgagcacgtggaacgtgggcggcgtggcgccaccggacgggctggacctgtcggactggctggacggcggcgacgacgacgggccctacgacatgtacgtgctggggttccaggaggtggtgccgctgcgcgcgcgcaacgtgctgggcgccgacaagaagcgcgtcgggatgcggtggatcgagctcacccgcgccgcgctgaaccggtcgcactcgcagcgcagcaggggcggcggcggcggcaagcagaaggtgcacccggtgcgggacggcggtggcggcgagctgggcagggagtaccggtgcgtggtgagcaagcagatggtgggcatcctgctcacggtgtgggtgcgctccgacctccgccgcttcgtccgccgccccagcgtctcctgcgtcggatgcggcgtcatgggctgcctcggcaacaaggtgagtatatagtactctacttggttactcccgaatatatggtggccgccggcgcggcatctctagctaagctaataagcaaacggtcgagaaacgaatggcagggtggcgtgtccgtccggttctggctgcacgacacgagcttctgcttcgtctgctgccacctcgcgtcgggcgggcgcgagggcgacgaggcgcaccgcaacgccgacgccatggagatcctttcccggacgaccttcccgcgggggcacgcgctcaacttgccgttgccgcagaacattctagaccacgaccgggtgatcctgctcggggacctcaactacaggatctccctgccggaggccaagacgaggctgctggtggagcgccaggactggaagacgctgctggagaacgaccagctgcgcgccgaggtgtgccgcggaggcgcgttccagggctggagcgaggggcccatcggcttctccccgacgtacaagtaccaccccaactccgacgcctactacggctgcgccaccgccgcccgcggccggaacaagcggcgcgcgccggcgtggtgcgaccgcgtcctgtggcgcggcgcggggctcgcgcagacccgctacgaccgctgcgagtcccggctgtcggaccaccgccccgtccgcgccgtcttcgcggtggaggtggatgcgcccggggacctcaactcgctcaggagcttcttcatgtccgagaggttcgacagggaccagatgctgctccgcaaggacgacgtcaacagcgccagattcgccgacactctttgagacatgcgtgttgagagggtgaagttgtcagtccagttctccgactgcaattgtactacgcaggcaaaagtgtgatgcagagtacatatatggatgtttttcatttctgagtcagtcagtgttcatacggtcgtatctactgcaggcagctaggaaggatacagagatgggttttatttgtctgtctgtttccaccctgttccctacgttctgtaactacgtgtgtactcttcttgatccagttagtatgatttggtcttcagtt

SEQ ID NO: 1750 - DNA, 863 bp, Zea mays
  Clone ID: 700166274_FLI
cgtctgatcttctcgggaagatcatggaggcctgcttgtttttccacagcgggagggcgcacgaggtcgcgtgcgcggagcaggaggaggacatcggctcgccgtcggattccgagtccccgtccacgtccacgtcgagggagtccgcgggatcctcgtcggagctcgatgacgacgccagctcctccggctcggaccgcttcgagatgtccgccctcatgacgcagctccccctcaagaggggcctgtccaggttcttcgacggcaagtcgcagtccttcgcctcggtcgccgccgtggggtcgctggaggacctggccaagccggcccggaagcgcctcaagccgtcgcggagctgcggcggcgccctcgacgcgcaccgcggacgccttctctcgccgcgcaggcactggaccaagcccgccgccgcgtccggcgccaggaagacggccgcgaggagcggcgggttgtcggtgctcacggccgtcgcgccgagaatgccgccgccggtgcgaggcctgaggacgtggccgccaaggttctcatcgttaattgagccacggatcagcctgcctgagctcgacattgacgcacgccttcacgtcacggggtgcgctgtcgcaggcacagctacgcatcagcgcatccacccgtgcctgaactaacagccaaatcaatggcatgctcgtatcctcttctgtttcccaatgcgtttgtggtctttgcagaatgcagactgacctttttgtaatgaaaatccacagctcaattagcaatggacttcggttgggaacttactggggtgtttggtttaagaaatcactacatccaaattaagatggtgcatcatgagtttattcctt

SEQ ID NO: 1751 - DNA, 1435 bp, Zea mays
  Clone ID: 700166284_FLI
agaagcgaggagcactacttgttggttggattctcttcagtctagcagctagtccagttaagtttcagacacacatggggagcattggcagaggcacggccaactgcgccaccgtgccgcagccgccgccgtcgacagggaagctcatcacgatcctgagcatcgatggcggcggcatccgcggccttatcccggcgaccatcattgcgtacctcgaggccaagctccaggagctggacggcccggacgctcggatcgccgactacttcgacgtgattgccgggacgagcaccggcgccctgctcgcgtcgatgctggcggcgccggacgagaacaaccggccgctgttcgccgccaaggacctcaccacgttctacctcgagaacggcccaaagatcttcccacagaaaaaggctgggttgctgacgccgctgaggaacctgctgggcctggtgcggggccccaagtacgacggcgtgttcctgcacgacaagatcaagagcctgacgcacgacgtcagggtggcggacacggtgaccaacgtcatcgtgccggcgttcgacgtcaagtccctgcagcccatcatcttctcgacgtacgaggccaagaccgacaccctcaagaacgcgcacctctccgacatctgcatcagcacgtcggcggcgcccacctacttcccggcgcacttcttcaagaccgaggccaccgacggccggcccccccgcgagtaccacctcgtggacggcggcgtcgcggccaacaaccccaccatggtcgccatgtccatgctcaccaaggaggtgcaccgccgcaaccccaacttcaacgccggcagccccaccgagtacaccaactacctcatcatctccgtcggcaccgggtcggccaagcaggcggagaagtacaccgcggagcagtgcgcgaagtggggcctcatccagtggctctacaacggcggcttcacgccgatcatcgacatcttctcgcatgccagttccgacatggttgacatccatgcgtcgatcctctttcaggccctgcactgcgagaagaagtaccttcgcatccaggatgatactttgactgggaacgcatcgtccgtggacatcgccaccaaggagaacatggagtctctgatatcgatcggccaggagctgctcaacaagccagtggcgagagtgaacatcgacacagggctgtacgagtcctgcgagggtgagggcacaaatgcacagtcgctagctgacttcgccaagcagctctctgacgagcgcaagctacgcaagagcaatctcaactccaactaataaatacctctcggtcacagcatgtgctctttctgcagattcaccgtttcttatttttaatttcaatttcaattcagtgtatgtgtgtgtgtgactgtgtgtgtaccaataaacatttaagttcactc

SEQ ID NO: 1752 - DNA, 1766 bp, Zea mays
  Clone ID: 700166327_FLI
tgcagattggagtgaacagcataccagtgaatctccatccaagcagagaacgtcagccctattttccagaacagaaacacaactatctgataatttaggaacaaacaaaagtgatattccttcacctcattcttatcataacatgcgtcctgcttttgattcagatggtggtagctctgatgaggaaatagccacaaccacgcatgcagtgcctttaaggtcacattcaggaggatctgcttcgtctgtcctgaacaaaggtggtggacctgatgcttcacccatatttgattattcaggagcacatgcagtgaggaacttgaaccgtgtgcaaagcagagattctgatctttcggaagaagagacagatttagataaatttaaaggttcatccttcgccagagcaaatgagcagcagctgttgccttctgccatacgtacttcagcaacttctgatgataaggaagatgacatcagcctgaactttggtaagttaacgcctggactaagaaacaaacccaggcaacccccaccatacaccaaagtttccagggagagcattctgcctaagcagtccttgcctaaggtttctgctggcactgaagagtcagtcgattctgaagagaatactacattcaaacaggatagaagtagtccccaaagctcattttcagccaggacttcttcaggtaaagactacgacagtggactttatgaaaggaaccgaagtgttggaacacactgggaagcaaaatcaaccatagcaagaaattcctctggtttagatgatgctgagaagttatctgatctacctactaatataagtcttccaacaactaagagttctgaacgctggaattcgagtaaagtgccttatcatgaaaaaccaggtattggaacacgccgagaagtgagatcaacactggctagaaattattttgattcagatgacagtgaagaagaactagagcaacagcagattcctcagtcgaagcaatctggagtgctgatacagtcacgcaggacacgggaggtgacatcagacacaaagagagatggtcgtttccaaaccggagctcagtatggtgatgaaactgagagtgtgacaagtaagacacaagtccatcaaggattcaacagctcaagtactgaacggagtgaaaggagggatccaagtgtgtaccccagggttgcagtacagcgctcttcgtctaaagctgagcagattgaatctccgatggagagagggaagccacaaggagctgaaatgagaagcaccttatttcgaggaaatgaagaggacacagaaacctcatctggaactccaaaagaaagcacccccaaaacaccccctgcacatgttcatcccaagcttccaacagactatgattctttcgccgcacattttaggtctcttcgaacaaaccggccttaggtttacacgacatatagagtttggagtttcagttgaattaagtcatatatacgatactatgatacgttttatggaggttgagttgagatttgtacattatagcaacactgttttctggacactatcgtgctgtgctagtttgggcgtacaattcttttgttctcttgtatcctcatatactcaatagaatcatattgtaaagactttaatttcctgttagtgattattaataagcacggcatgttggcatatgtatagaacatgcggggttctttcattccattgtaacgggatctgctacactcatgctatgagattgtttcatgctttc

SEQ ID NO: 1753 - DNA, 1714 bp, Zea mays
  Clone ID: 700166352_FLI
ggcgcgtctccatcggcgtcgaggccgtgcgtgacccgcccgtgctcatcctcgacgagcccacctccggcctcgacagcgcctccgcgctccacatcgtcggcgcgctccgcgccatggccgaggcgcgtggacgcaccgtgctgctcagcatccaccagccgggagcgcgcatcgtcaagatgttcgactccgtcctcctgctagccgccggctccgtcctccaccatggcaccgtcgaccagctccgcgccctgctcggggacgcgggccttcacctgcccccgcacgtcgatgacgtcgagttcgccatcgactccgtggacgcgcttcgccgccacgccagcagcagcctgcaggcgccgtcctccggagaccgagagggccggtgcacgctgcagcgtctgttccagctgcacggcaagcaggtggcggacgcccccgtggccgtgaccatgatggctagccgctacgccaactcgcgggcgcgggaggtggcggtgctgtcgcagcgcttcttcaagaacgtggcgcggacgcggcagctcttcgcgtgccgcaccgtgtgcatgctggtggcgggccttgcgctgggctccatcttctacgacctcgggcaggacaaggtggcggagcgcgtgggtctcttcgccttcctgctcaccttcctcctgtcatccacaacggaggcgctgcccatcttcctgcaggagcgcgacatcctggccagggagacggcgtcgggggcgtaccgcgtgtcgtcgtacgcggtggccaacgcggtggtgttcctgcccttccagctggcgctggccgtcgtgttcgcggcgccggtgtactggctggcgggtctccgtcgaacggcggcggcgttcggctacttcctgctggtgatatggctgatcctgtacacagcgaactcggtggtggtgtgcttcgcggcggcggcgccggacttcgtggtggggaacgcggcgatccagggggtgatgggctccttcttcctcttctcgggctacttcatcgcgcggtcggcgatgcccgggtgctgggtgttcatgcactacctgtcgttgttcaagtggccgttcgaggcgctgctggtgaacgagttcgccggcggcgggaggtgcgtggtgcgggcgctgggcgagtgcgtggcgactggggacgaggtgctgcggcgcgaggggctcggggaagagtgcaggtggcgcaacgtgggcgtcatggtggccttcatggcggcctacagggtgttgggctacgccgtgctgagggtgaggtgcagcctcgcgctcaacaagaagggggccgtggccgccggaccacctggcctcggcctcagccgccgcctgagaagacagctagccatcatcggcaccgctgcgtggccctcgccatcgtcttcttccaccccctcgctccctgttaattaaattaaattaaattaaattaaattaaatggcaaccaaatacactagtgtatgtgtgcttacttgttttgttcggtgattcgtacggagtgcttacttaatattgtattgtattatacttggagtaggaagtatggtatccaaagatagcatctgttccaatacatcttgtaatcagactctgctctaactcgtaccaacatgctgagatgtcccaaggcatggcattgtggaatctataaactctccgactataactatatatatgcttattttgt

SEQ ID NO: 1754 - DNA, 806 bp, Zea mays
  Clone ID: 700166410_FLI
cgttgtgttccttgctttgcttttgcttttgcttttgcttttgcttgatcggtgcctccgcttagccgctcttcctccccacccacccatgcacccaggtttacaacggcagcctggacaagcggctgggcatcaccgccggcatctgcgtgctcatccagcacgtccccgaccgcaacggcgaccggtacgaggccatctacagcttctacttcggcgactacggccacatctcggtgcagggcgcgtacctgacctacgaggagtcgtacctggccgtcacgggcggctccggcgtcttcgagggcgcctacggccaggtcaagctccaccagatcgtcttccccttcaagatcttctacaccttctacctccggggcatcccggacctgcccagggacctgctctgcacgcccgtcccgccctcccccaccgtcgagcccacgcccgccgccagggccgccgagccgcacgcctgcgtcaacaactacaccaactgactgatcaactccagcccaggaaccatctctgcctgccatgcctgtccctcactcgatttgtatgtttgtatggcttaggtccttcgattcgtacgttcgtgcgtggtagcaccaataaacatgcgatcgattgagttgtgtgtgcttctccattcattcacttgctctttctgcagctcgtgatcgagttgtgtgtgctccattcccaaattatgtatgatcgattagtagcgttaggggttaaccagtagccgctgtgtacttgtgtcacccttggacaaacaatgagatatttctttgtcgtcg

SEQ ID NO: 1755 - DNA, 1093 bp, Zea mays
  Clone ID: 700166434_FLI
tgtggacctaccagtagaagatatcagttgtgatttggggcctgaaatggataaaggtgttgtattaaggcaacaagttgtttcaaggcatcatttaggcagaacggagaagcttgctgaaagtagcattttatctggttccgtagttacttcaaagcatgcagctttagcaaggccttcaaattacaaggatccaaatgtctgttctgcaccaagtagaaacaaaacttgtgaattgaaactacggtctgagattgaagaacagtgccaaaaacatgagttagatgtagatgaacgtggcattggtcctagcaaaaactctcgtgtgctaataggatctataattgtcgcaattaaagattgtagtgaacacttgctggacttaggttccaagaatgacccagtacctcccaatgtaaagacaaagaaacatgcatcagtcaaggtggtgcaacaagttacccatgagggaaacagaaatgaaggtgttcctgatagtgataaccgttctagcctcagtgttactacagatgaaatcagttattcaacctgctgcgatgcagatttggcagtggatgaacatttacaatgcaccacgttttccagtgaagaagcgacagcctttctttctcaaagatggaaagaagcaatagccgccgatcacgtgaaacttgttgtgtcctgaaaactaaaggaatggcagaataaagaaattctgttgagggcaacagcatggaagctccggccgacttgtcgccggatcccacagccctacaacataggtggttcttatctagcctgcagggtgctatgaaagtttggatgtcaagtttgtgttgcggcatgaatggttgtaaaatggcaggtgcattttgcagctgatttgagattgaagcagagggttctagttttacaaggggacagcttgtgtgatgggatctgtttttggtaaggaaaaaaaagagtgatttgaataatggtttggtcgcacaagttcctaatcttttgtactcgttagagtctgctaaacacgaaatgcatgtgtgttgaacatgttgtgcttgcgggttgcggctttcatattgtcccagtt

SEQ ID NO: 1756 - DNA, 815 bp, Zea mays
  Clone ID: 700166478_FLI
gcccaacaggacagtaggggctcccttctccagttctccttgcttgcgtcttcccggtcccgtctgcgtgcgtgcgatcgacgcagaggcgcgggcgctcgcaccaagccgatccgatggccttcatgcgctcccgctcaaatgcatcttctggcatgggagttgctcctaacattagggagacgtttgtcgagctccaaatgaagaagacattccgatatgttatcttcaaaatcgaagaaaagcaaaagcaggtagttgtggagaagacaggggccactactgaaagctatgatgattttctggcctctctcccagagaatgactgccgatatgcgctgtatgattttgattttgtcaccggggagaatgtgcagaaaagcaagattttcttcattgcctggtccccgtcgacatcccgcatccgtgccaagatgctttactccacctcgaaggaccgcatcaagtatgagctcgacgggttccactacgagatccaggcgaccgacccatccgaggcggacattgaggttctgcgggagcgggctcactgaagctggttcgccttcgaagaagaagggacctgtggagggctgtgaaccttttggtcagatgcaaattctattaccaatgatgaaagctcccgccttggtatttgttattaagttcctgtaagcatgtcgtttaggcgcgatgcgtgactctagctggtgaagcgttatcaaagctgtatctgtaagagttttggttgtcgagcctgtaaacgaagcaaggtttgcgaacttgttatattgtggtattgatggtactggatt

SEQ ID NO: 1757 - DNA, 1247 bp, Zea mays
  Clone ID: 700166517_FLI
ggcgctcctggcggcgcagtcccagctgcgggcacagcgcatgctggccctccagctccacgaccaccaccacccgacgcctcccagaccacgccagtcgccgcagcacccgaggcaccgccgctcctacgagatggaccggtcgtgcgaggacaacgccaagatcgtggaggtggacgtgggcgagcccgtgcggcggggcgcggcggggaaggacaggcagctctacgccggcggccggtcctccccggcgccgtcgttggcggcgacggagctgctgagcccgcgggcgtacagcgcccacttcgacgacctctcggtggccaacacggcgcagagcagcccgcggcaggcgccggaggcctgctgcccgggctacatggccaacacggagtcgtcccgcgccaaggcgcggtcccagagcgcgccccgccagcgcaccgacgcgctggagcggctgcccagccgcaggaagcaggggacgccgcccagggccgccgccaggatgcacttgcagcgctcgtcgtcgctggccggcaactactcctccccgtggtcgtcgtcggctgccaggctcgacgtctccgccgcgtcgctcaaggacagcgagtgcggctccaccagctccgtgctcaccgccgccaccctctacagccggacgcggtcgctcgtcggctccgaggtgcgccgtggcctgtactgagagtgagaggagctcgtgttcgtgttcctggcgacgccatggatggatgctgatagctcctgttcttcaaatggtccgtgattcttcgctgggatgggagcttcaaataaatggaatgcttatgaccagttcgtgctacataaaatagtcgcgtttcaaactgtacatttttgtagcccacttgtagccgtctgcaggtattgggtactagtatatagacgtgtacagctacacaaaatgtttgtacaacaaggttagcgatcgcttgtaatgggtctgcttagctgccaagaagcaggggttgttaatgcgatcgcttgtaatgtgtctgcgatgacgaagatgggtacatgatccttggcttcgtgctgaagcccccaagggctgctcgcccgcatcccaactatatattgtgcacgtctagtttttaatttatgtagttttttcgtgcaactgtggtgccaatctaacaagtgaattatctgcaaatctatttgtgtagtccatcgttgagtgttttcttctgcactcgtggtgcctatct

SEQ ID NO: 1758 - DNA, 753 bp, Zea mays
  Clone ID: 700166530_FLI
ctaaaattaaaaaaatcgataggtggagccacgttgtatatgcggatctccattcaccaatcgccttcctgtcgccctcccgctcggctcggcgaacgcgatctgttccccaacctccgcagccgctccaccgtcctccactccggctgccgaatcgacccgccccgatccagatcaggagctgagggatggacgcgaacaggcgccagagtgggatccagcagttgctggctgcggagcaggaggctcagcaaattgtgaatgccgctagagctgccaagtcagcgaggctcaggcaagcaaaagaggaggctgagcgggaaatagccgaataccgtgcccagatggaggctgagtttcagaggaaggttgcagagagcagcggcgactccggtgcaaacgtcaagcgtctcgaggaagaaacggcggcgaagatcgagcaactcacccagcaggccgcaagcatctccccggatgtcattcagatgcttctgcggcatgtcaccaccgtcaagaactgaggagtgctgttcccgaactatgctcgcagacttgtaccgtcgatctatttatttttgtcaagagtgagagtggtgaggaataatatgcccgcttgtatccataattcctgttcgtaactacggaataagccgccgcagctttagcggcaaacgtgactagtactgtcagaacctaccattgttatttggtacaattggtaaataatattgttttaaactggatttttcgaac

SEQ ID NO: 1759 - DNA, 857 bp, Zea mays
  Clone ID: 700166586_FLI
gccatgaggtatatacattgatgttcagctgttttgttgcattggcctacattatgaaatgcaactatacaaacacacccaaaaagcgatagggtgctctttacatcaaatgtttggctacaggtatggcttctatgatgaatgcttgcggaaatatggaaatgcaaatgtgtggaagtactttacagacttgtttgattatttgcctctcacagctcttatagaaaatcagatcttctgcctacatggtggtctctctccatcactggatactttggataatgtccgctcccttgatcgcatacaagaggtcccgcatgaaggacctatgtgtgatcttttgtggtctgacccggatgacagatgtggatggggaatttcaccaaggggtgctggatacacatttggccaagatattgcacaacaattcaaccatacaaatgggctaagtcttatttcaagagctcatcaacttgtaatggaagggttcaattggtgccaggataagaacgttgtgacagtgttcagcgcgcctaactattgctaccgatgcgggaacatggctgcgatcctcgaaattggcgagaacatggatcagaacttcctccaattcgacccagctccgcggcagattgagccggacatgacgcgcaagaccccagactactttttgtaatcagcatgctggctttctttcaacttgtctactgcagcgccagcacctgtagatctccttagaaaatggtgtttcctctagccgccttgtacccccatcattcttttggtgtggagattttattgccgcttctcagaacattgaggttgttgaaagtacatggcattgggtcttccttttt

SEQ ID NO: 1760 - DNA, 783 bp, Zea mays
  Clone ID: 700166589_FLI
ttgactgcgaggatggaaaaattagttagcctgaatgcccaagaagtaggagggcagccaacaacttgtggcgttgcaggaccgagtattcataatgacaaagacaatggtccaggtataggcaaacctcacagccttatggagcggaacgcaacagcacgaacctctcagtgggaggagtcacttggtcttgatggttcggaaccaccctcaccaccgagaccacacttgcctagcccaaggagactaccaccttctcctttgtcaccgcctgggaacaaaaacaataatcggagaaaggcaaggaggtggagcttgttcgaagaagaaaccttaagaaagggtgttgaagagtatggtgttggcaattggagggatattctagataacaatgctgaggcttttaccggcaggacaccggtggacttgaaggacaagtggaggaacatgcttttccgttgatgtaacggggaaacatgtagctggacatgctttactagggtaaagtacctagcaattagcatgtagtcctcgtacatcacagcagactcttggtcaagcttttctggcagctgcagctacatgattttgtgtctcggtgtagtagcagccgcagcttttctggcagctgcagctacatgattttgtctcggtgtagtagcagccgcagcccaaacggttggctttcctggcagctgcagctacagtattttgtgacggtatgcttaccgagtggctgattcgcgcactgacgtattatggactcgattttgtatttttatt

SEQ ID NO: 1761 - DNA, 1096 bp, Zea mays
  Clone ID: 700166609_FLI
ctctcttaatttgtaatattttaatggcatggatttgaatcgcttcactgaatttcttattatagcaataaatcctacctgtgatacatgtttgatgagccttttgaaactgcacaatctattactacttattaaggctacaagggtagcctgcctcttttgtgttctgccttcggacgatctcaaccgtttgttctctcccgcctccgttttggtcatccgtcggatgctgcccacgcccgcaaaccacccccacccacgctcagagaaaggaggtctgggttgcgtacaggcgaaaggcacgcgccgccgctgccgcgcgagcctctctgtccccatcgccgcacagatggatccattgtcggagcccgtgtacgcgtcggtcgagccgtacgactctgggttcctcaaggtctccaatgtccacaccatctactacgagcagtccgggaacccgcagggccatgtggcggtgtttctccacggcggtcctggagccggcacgtcgcccggcaacaagagaggggtgcaggcagaagcactccccatgcttgtttagagcagaacactacttgggacttggtagctgacattgagaagctcagggagcatcttggcatcattcaggtgtttgatggttcatggggaagcaccttggcacttgcctacagccaggagcaccctgataaggtcactggccttgttctgagaggaattttcttgcttaggaaacaggagtttgattggttctatgatggtggtgcagcagccattttcccagatggtgttgaatgctgatttgttgtggcctgttacgtcttcaccagttcatatattaaacttgaagaaccacgtggttgaagaaaagctcactgaaaatgagtaatacgtcatcttcgtcaagtggtgagcgtgctatgcagcgacagagggcaaggggtctatcttgggttggttcttttttcttttcttttcttttcttttctcttttctgtcaacatagagtcacttttacttattaaagagatcctgcctgttttagttcatcattaacatatcagatgatggtaaatggttgatggttatgttcgatttt

SEQ ID NO: 1762 - DNA, 931 bp, Zea mays
  Clone ID: 700166651_FLI
ctgaatcctccgcaactcgccgccgccgggaccgaccgacccgatcctatcgatcgaggatgtcgtacgcctacctcttcaagtacatcatcatcggcgacacaggcgtggggaagtcgtgcctgctgctgcagttcacggacaagcgcttccagcccgtgcacgacctcaccatcggcgtcgaattcggcgcccgcatgatcaccattgaaaataagcccatcaagctccagatttgggacacggctggccaagaatcattcagatctattactagatcatactacagaggcgctgctggtgcccttttggtttatgatattactaggagggagaccttcaaccatctcgcaagttggttagaagatgcaaggcagcatgcaaatgctaacatgactgtgatgctgattggaaacaagtgtgatctttctcatagacgtgctgtcagctatgaggaaggtgaacagtttgccaaggagcatggtctggtctttatggaggcatctgctaaaactgcacaaaacgttgaggaggcattcattaagaccgctggtacaatatacaagaaaatccaagatggcatatttgatgtatcaaatgagtccaacgggatcaaagttggctacgctgttcccaactcatctggaggtggtgctggctcgtcctctcaggctggtggctgctgcagttgagtggtggcagcaagtcatacaaatgcacaaggttctccctgcagtatcttgatgtttgcctatagctggccccggatgattcgttctttcagccatcatgtttcaatccataaacaaatcatcttcagtgtttagctgtcctttatacttgtgcaattcacgattagtaccctatgtgagtatgtgtcttgtgtaaccaaattgaaatcagttttatggtattcatttgttcaacatgt

SEQ ID NO: 1763 - DNA, 1062 bp, Zea mays
  Clone ID: 700166662_FLI
agggaattcaataaaggttttgaactgtcatgattctgttatctacatattagcaccactgaagtatgctactgtgtatggttgttctgatgctacggttgttcttggtgctgttggtaaggtagtaaaagtggagcattgtgaaagagtgcatatcattgcagctgcaaaacggatttgtattgccaactgccgggagtgcatcttctacctaggagtaaatcaccaacctcttgtattgggggacaaccataaattacaagttgctccattcaatacatgctacccacaactgcaggatcatatgatgcaagtgggtgttgatcccagtgtcaacaaatgggaccaaccttttgtattgggagttgtggatccacatgattcattatcccatcctgctggggttgcagatgttaaagctgaatcagcaacatgtctggatcctgatctattcaccagttttttgattcctagttggtttggggatgaagggcaagagcctataaactgcaatcctttcccactgcctgaaatttatgaggcattccaaagcaaaaagcgttctgctctggaagatatccaaaagatgattcgggagctacagcttgacgagaatcggaaaagggaattggcagctgcccttcatgctcagttcaaggattggttatacgcttcgggcaatatccgccagctctactgtctacaaggtgattaatggtgcaatttacaagactgattatcctctgccgactcctcaaaaacattcgacgattgtcgaagctgacctcttccttccatggaaaggactcccaccctgctcacctgcggtatttacacaagtatgtaaaaaatgaagatgtactattgcctattttttacagattcatttgcgtatttctccaagtcttctctttgctgcgagttgggtattaattaggatgtgatattgcttaatttcccccctgtttctactcattttttggcccttgataatgtccacgagtatgtaatagggactaatgaatcaaacgttgttaaataaacatttcattccgttttgct

SEQ ID NO: 1764 - DNA, 1252 bp, Zea mays
  Clone ID: 700166669_FLI
ctgttgatgcttgctgttctagctgcaacagtcacgtaccaagctggcatcaaccctccaggaggtgtatggtctgatgatagctcagccagtggtaaaccaggagacccaatccttcagcacaacaattccaagcgctatgatgttttctactactcaaactcactctcattcgtggcatctgtagttatcacaatactgcttgtgaacaaggaatcctgcgagcatggtatcaagtcctatgcgctaagagtgtgtttggtggtgggcttggtgagcctcttgattgcctactctgcaggaagctctaggaaagcaagagaatctatctatctcatcgtcattgctgttgcagttctgattgctcttgtgattcaagtgcttcttctctcctgtacgcaagacagtctcagaggaccaactggacagtttatagaacgtctgctccagctgctttttgggacggacaaggcctggcatggagacacttctaaacagaaagaaagctcaggtcgtcccgagaaaaaagttcggaagaggcacaagtatttgatgctgcttgcagttttagctgcctccatcacgtatcaagctggtctcaacccacccggtggtttctggtccgacgacaatgaaggccatgtggaaggcaatcctggcctgaaaccacctggtgccttgtggtctgataacaaaggtcatttggcaggcaatcctgttctccttgatattaatcctcggcgctacgaaatattcttctgcttcaactctatctcgttcatggcatctattgtcgtagtcatgttcctgttgaacaaatctgcccggaagaaggccgtgccacttgaagtactgcacttgatcatgatactggacctgctggccctcatgactgcttttgctgctggaagctgcagaaaattcaggacttcagtctatgtgtatggtctagtgctcggtgtcgtggtataccttgtgatcgcagttcttttgtcaagtggcattgcaaaatgtctgagacccatggatagaaatagggtttcctctcagagaagtcctattcgcgctcctacagcaagcacaaggatacttggagaccatgcttgatggttccattcctttggtaatagtactagtttaatagtagtgtatgtatttggcttttcagtgtacgttatgttgtgggagtttgaattgaactgaaattcgacgctttatgttgttcatttcttttagaatgtaaaatcagtgc

SEQ ID NO: 1765 - DNA, 370 bp, Zea mays
  Clone ID: 700166678_FLI
gtccagacaagaagaaaccatgatggaatctggatttcccctctatccgatggaatccagattcagtgccagtccgttttcctgtgattttgggataccagcccaattccccttcatggagggtatgcgttgctgttggttggcacaccggaaggcagaacctttagctgtgaaggcctgtgactgaggtcatttcatgcaactaacaattctggtgaagactatccaatcttaggacacaacatgcaacaattagacgtatctatcatgatccttctataatttaacgatccttatatagtttaacaagtattatgtttttctgtaaagcttagaaatacttattttgttaatgcatagaaaatcaatg

SEQ ID NO: 1766 - DNA, 1483 bp, Zea mays
  Clone ID: 700166721_FLI
cgagacacccaagaaacacacagaagcgaggagcactacttgttggttggattctcttcagtctagcagctagtccagttaagtttcagacacacatggggagcattggcagaggcacggccaactgcgccaccgtgccgcagccgccgccgtcgacagggaagctcatcacgatcctgagcatcgatggcggcggcatccgcggccttatcccggcgaccatcattgcgtacctcgaggccaagctccaggagctggacggcccggacgctcggatcgccgactacttcgacgtgattgccgggacgagcaccggcgccctgctcgcgtcgatgctggcggcgccggacgagaacaaccggccgctgttcgccgccaaggacctcaccacgttctacctcgagaacggcccaaagatcttcccacagaaaaaggctgggttgctgacgccgctgaggaacctgctgggcctggtgcggggccccaagtacgacggcgtgttcctgcacgacaagatcaagagcctgacgcacgacgtcagggtggcggacacggtgaccaacgtcatcgtgccggcgttcgacgtcaagtccctgcagcccatcatcttctcgacgtacgaggccaagaccgacaccctcaagaacgcgcacctctccgacatctgcatcagcacgtcggcggcgcccacctacttcccggcgcacttcttcaagatcgaggccaccgacggccggcccccccgcgagtaccacctcgtggacggcggcgtcgcggccaacaaccccaccatggtcgccatgtccatgctcaccaaggaggtgcaccgccgcaaccccaacttcaacgccggcagccccaccgagtacaccaactacctcatcatctccgtcggcaccgggtcggccaagcaggcggagaagtacaccgcggagcagtgcgcgaagtggggcctcatccagtggctctacaacggcggcttcacgccgatcatcgacatcttctcgcatgccagttccgacatggttgacatccatgcgtcgatcctctttcaggccctgcactgcgagaagaagtaccttcgcatccaggatgatactttgactgggaacgcatcgtccgtggacatcgccaccaaggagaacatggagtctctgatatcgatcggccaggagctgctcaacaagccagtggcgagagtgaacatcgacacagggctgtacgagtcctgcgagggtgagggcacaaatgcacagtcgctagctgacttcgccaagcagctctctgacgagcgcaagctacgcaagagcaatctcaactccaactaataaatacctctcggtcacagcatgtgctctttctgcagattcaccgtttcttatttttaatttcaatttcaattcagtgtatgtgtgtgtgtgactgtgtgtgtaccaataaacatttaagttcactcatttgcttgtctatgatcaaaagaacc

SEQ ID NO: 1767 - DNA, 811 bp, Zea mays
  Clone ID: 700166747_FLI
ccgccgcagagcctgacgctggatttcacgaagccgaacctggccgtgtcggccgccacgtccgtcacctccacgtccttcttctcgtcggtcacggccggcgagggcagcgtctccaagggccggagcctcatgtcctccgggaagccgccgctgtctggccacaagcggaagccctgcgccggcgcccactccgaggccaccaccaacggcagccgttgccactgctccaagagaaggaagaaccgcgtgaagaggagcatcagagtgccggcgatcagctcgaaggtcgccgacatcccgccggacgagtactcgtggaggaagtacggccagaagcctatcaagggctccccttacccacggtaaaaaaaaaaaatctcctcctccatccgcagtccggacctcgtctcgtctcgtctgtgttgtcgcgcaacgaatctgactgttctcttgtcacctggtccagtggctactacaagtgcagcactgtgcggggatgcccggcgaggaagcacgtggagcgggccaccgacgacccggccatgctggtggtgacgtacgagggcgagcaccgccacacgccgggcgcggtccaggggccgagccccctggcgaccgcgtcgccggtgcccgtcgccgtctccgccggcaacgggctcgttgtctagtctactaaaagctaggattagcttctcgtcttctttgttttttttttgtttgagctgatgtccgtgtaaaacaaggaagaaggttgtagaaagagggagaggaggacaccggaatttcgatgccgcaaaactcaaacctt

SEQ ID NO: 1768 - DNA, 586 bp, Zea mays
  Clone ID: 700166756_FLI
caggaacaagttgtccctgggtgttttctgcgagctcgtgctattgggctcatgcctatgatcgatcagggtgagaaagatgataagatcatagctgtctgtgctgatgaccctgaattccgtcactacaaggacatctcggacctccccccgcatcgccttcaagagatccgccgcttttttgaagattataaaaagaatgaaaacaaagaagttgcagtgaatgatttcctcccagccgaagatgccatcaaagcaatcgagcactcgatggacctgtatggctcgtacgtcatggaaagcctgaggaggtgatctgctgctgcttgattgtggatgctacgtaattttctcaacagctcatcgagagtaccgtagtccgtagtacggcaaatgttaacacgcacgaactggaatcatgaccaagggatattaccttctgttcatgctgaaacgatcagcagtttctttctttgcatcatatgccacgtcaaatcaaggcacttgcctctgaaatctttgtggtcaagtcaaaccagcacttcgacagaacgattgatggatgcctcatgcctgtattactgtt

SEQ ID NO: 1769 - DNA, 1127 bp, Zea mays
  Clone ID: 700166786_FLI
cctgaacagactttgcccagttgatgtttttttgaaggcaatgctggatgttccatttgtgttcaagagagtagatgccatgctttacattgccagcttctatttggagatcaatcggctgagaatgtcgtatgctactcttgagggggcttgccaggagatgagaagcagcaggctgttccacaaagtccttgaggctgttgtgaatttcggcaatttcatgagcaccaattcggggtctccaagttcaaaaggcttggagccaaacactgttctgaagatagctgatgtgaaaggagctgatgggaaggctgctctcatgcagttcattgtccaggaaattgtgaaacctgaaggatatgatgtgatgcagcatggttcaggtgcatgcaagatgagcacaaacactctgcagtgtgatgccgagtgcaggaagcatggccttgaggttgttgccaaacttgcagcccagctgagcaacaccaagaaagccgcctccattgacataaaaaggctgagccaaagcgtgtcagagcttggaatggggcttgggaaggtccacgacgtggtgaggctgaacagcatggttacatctgttgatagcgctcggcgtttccacaatagcatgagcacatttctaaggcacgccgaggaggagatcctgaagctccagtcccaggagagcatctgcttgtcatcagtgaaggagatggcggagtggtttattggggagtcagtcaacgatgaagctcacatgttcagaatctttgctggagtgaaggagttcctagctatgctcgatcatatctgcaaggaggctggggaggtgagcagcaacaattgggtcggcgcgacaacggcgagctggatggctgcacccatggggatgatgccttaagccgctggagctgtcttggcaaaatctgtagctaccctttttgtagaatatttcatatcaagctatttggactagtatggttcctagtattagcagtagatgagaacgatgttatggtatgttaagccgaagcctctctctatataaatatatctggataatgtatgctggacacccgtctattgtaaagtttactgttactggtaatggggtttgccgtcctttcctg

SEQ ID NO: 1770 - DNA, 1176 bp, Zea mays
  Clone ID: 700166791_FLI
cggggaacgtcctgaccgtaaccatgtcgaagccctacgggttccgctacaggagcgggcagtacattttcctccagtgcccaacaatctccccgttcgagtggtacgtacatacgcacgcatagttggcactctcatgcatgcatctcttgatacttctccgcgtcggtggcgtatgtggcaggcaccctttctccatcacctcagctcccggagacgactgcgtcagcgtccacgtccagaccaggggcgactggacacaggagctcaagcgcatcttcgtcgagaactacttcacgccgtgcgtgcccagacgggctgccttcggggacctagcaggcgcggtggaccacaagaccaagagcccgccgaggttgctggtcgacgggccctacggcgccccggcgcaggacttcaggaactacgacgtgctgctcctcgtcggcctcgggatcggcgccacgcccttcatcagcatcctcagagacctcctcaacaacatcaagctggccgacgagctcatggacctggcaatggagaccggccgggccgaggacagcgccagcaacctgagcgcgtcgacggcgagcggcggcaacaagaggagggcgtaccgaacgacctgcgcccacttctactgggtcacgagggagcctgggtcgttcgagtggttcaagggggtgatgaacgaggtcgccgagatggacaagaagggtgtcattgagctgcacaactacctgacaagcgtgtacgaggagcgagacgcgaggacgactctgctgtccatggtgcaggccctcaaccacgccaagcatggcgtcgacattgtgtcagggacaagggtcaggacacattttgcaaggcctaactggaaagaagtatttacgaggatagcgtccaagcacccaaattctacagtcggggtattttactgtgggagacctacacttgccaaagaactgaagaaactgtcacttgacatgagccacagaacgggaacccgatttgatttccacaaggagtacttctgatggaaaatacaagtgcccctgatttcttttagtactagaagatacagataaaaaaattcacaaattttgcgtagaagcgaactgatcctctttcacagtatgtaaatgtacatggtataaagcagagagtagttagaaacgtttt

SEQ ID NO: 1771 - DNA, 797 bp, Zea mays
  Clone ID: 700166796_FLI
agggaaccataccagagcggcagagccttcccctccgctccccagtcccacccgcaccctagccctcagcaaaccctaaccgctcgtcgccatgaaggacacctcgttcaaggccaccggcgccaagcgcaagaaggtcggcggcgccaagcgcgggctcacccccttcttcgcgtttttggctgagtttaggccgcagtacctggagaagcaccctgagctcaagggcgtaaaggaggtgagcaaggcggctggggagaagtggcgctctatgtcggatgaggagaaggcgaagtatggcggtagcaagaagcaggatggcaaagcaagcaagaaggagaacactagctccaagaaggccaaagctgatgttcgggagggagatgaagcagaaggttctaacaagtcaaaatctgaggttgaggatgatgagcaggatggtaatgaggacgaggatgagtaaatagtacgatggggaacagcagctttgcaattgagtgtttgctgctttacttatttttctatatgctgttccttttgatgttatatgctgtaaggaaaatctgtacatgatggtaccttagggtatggcatgctggagttcccctttaacccgaagagccggatacttttgccagcctcgtcagcatgtgtaaacagttgttttcttgttttatcgacttattgggtgactacccaagagttggtttgtagtcaatgaggtatgctgccccctgtggtgctacgcagctgcagcaacatcagatggtcaggctaaaatcatgttgtgggatctg

SEQ ID NO: 1772 - DNA, 1029 bp, Zea mays
  Clone ID: 700166814_FLI
ttgaactatgtatatcagcgtaatctgtataatttgaccattctttctcttctggccatggctttataaacaagaaatctgaaattatgttgcttttcaaagtcattgttgtttgcccttttctttttccaataattctttgtaaactttgagtgtttgattagtctagtgtgtacattaacagttattcatcatgatatgaaaaggcaagatgttcctccactaatacatattaactcaaaccacactgatatatatcggtgctggtgctgccacagcccacaggctgattctgttccttgttgcatagcaatgtttttcgtagccatgcacaaaaatatatctatctgttagattattgtattgacatacaatttagagaagagaacaaaaaatatctacaatcctagtaaacttatgtgcttgtggattgctgttataacagcctgcagataaatatccaagtatattctctcagacgtccatatttgggaggtttccatactttcttccgtgcctgtgtatatcaatccttgcagttattgctctaattgcctgcatctggtttccgttgaaaccgtagaagaatctcttgctggcaccgacactgaagaaaatggaggtggcggatgtctaaaattatttacaaactggccgttgatgtcagctattactttatattgtatcttctctcttcaggatgtggcttatgcagagacattctctctttgggctgtcagtgacagatcgtttggtggattaagctttactaccacagatgtgggcaatgtccttgcgatgtcaggtatgtcaaaataagcacaaaaacaaaatccattgaaactggtgttgaactaggcccacatgaagccctttacaccttaccttgattgctggcaattggtgtgaaaatagcgtattatgattgggcgagtggtctcagagataggttttaacatctctgtctgatggaaactagcgcttcaaggcctgctctcttgtgctcctcctatatatcagatgtacttc

SEQ ID NO: 1773 - DNA, 647 bp, Zea mays
  Clone ID: 700166824_FLI
catcaatgtcctgggcgatataacagaagaaacctttccaggctgttcaaacttgccagattacaacaagatttcctttaacaaagttgagaaaccgacaggccttgaagcatgtctgcctaacagatctcctactgaggttagcatcataaagcagctagtttgctatgacacagcaaagaggaccagtgctgttgatctgctgaatgatcggtactttaccgaagagccattgccggcacctatagaaggattacatgtcccggcatcaaaggatgaggatgatgacagctcaacagaagaatggggtaattacagggatggtgtctctcggattgactttgatgagtttggtagtatggatgccaccaaaactgagaagggtttcagcatacagttttcgtgatgaagaaagacgtagacgtacggatcatgcgtgccatgtccaaactaagaccatatcatggtatttatctacatgggagttgaattgctgtcaacatagacgaacatcagtaagcgatcaaagattgtgcaatgttgctttgggtttaacattttttttagtttctatggaactttgtgattctttgtacggcagaaccagttttttccctggcaagaataaaactgtgtgtggtagtctg

SEQ ID NO: 1774 - DNA, 783 bp, Zea mays
  Clone ID: 700166887_FLI
ggagccggaggtagaaagaccagagaagatggcgaccaccgagccggcggcggtgaggctggtgggctccttcgccagcccgttcgtccaccgcgccgaggtggccctgcgcctcaaaggggtgccctacgagctcatcctggaggacctgggcaacaagagcgagctgctgctggcacacaaccccgtgcacaaactcgtgcccgtgctcctccacggcgacagggccatctccgagtcgctcgtcatcctcgagtacgtcgacgaggccttcgacgggccgcctctcctccccgcggaaccccacgcgagggcggacgcgcggttctgggcccacttcatcgaccaaaagttcgcgcggccgttctggatgtcgttctggacggacgacgaggagcgcagggaggctatggcgaaggaggccaaggagaacctggctctgctcgaggcgcagctcagggggcagaggttcttcggcggcgaggccatcggcttcgtcgacatcgccgcctgtgcgctggcgcactgggtcggggtcatcgaggaggccgccggggtggtcctcgtcggcggcgaggagttcccagcgctccgcgagtgggccgacgcctacatcaacgacgccaccgtgaagcagtgcttgaggagccgcgacgagctcgtcgattacttctccgccaggaaggagatgtacttgctgcgagcgagggccactccgcgcagctgatctggacccatgtttccttccgttcgcaataagccaataataaagaccagtttggt

SEQ ID NO: 1775 - DNA, 662 bp, Zea mays
  Clone ID: 700167006_FLI
aggaatttacacgcttaaaaaatcttgtggaggagaaagagaaaaaaataaaggagctacaggacaatgttgctgctgtcaatttcactccatccagcaaactgggaaaaatgctgatggctaaatgcagaacactgcaagaggaaaacgaagagattggggcgatggcatcggaaggaaaaatccatgagctcgggatgaaaatcgccgttctgaagtcgcagaacaacgagctccggaatcaattcgatgttttgtataaacacatggacggcgtgacgaatgacgtagagagatcaaacgaactggtggccatcctgcaagaggagctagaagccaaggagttagaggtgactagactgaaggaggagacgctttcccagaaggaaggcactccagacgcaccggcaccggcaccagctccggtggaagagggagacggagctggaaacgatctgaagccggcttcagatccgctgcaagtgaagctggaaagttaaggggagacggaggggtggaaacgatcagacggtagtgtgtttgagactcccgatgtgcgggaagtcatagcatattaggccaatcttaactagtagaaccgttcgatttttataatattttatgttcattttagttctatctatatagttacaatataaaac

SEQ ID NO: 1776 - DNA, 506 bp, Zea mays
  Clone ID: 700167008_FLI
aacaccattcctggtattgaagaggtcaacatctttaaggatgatgttgttattcagtttgtgaatcctaaagtgcaagcttcaattggtgctaatacatgggtggtcagtggaactccacagacaaagaagctgcaagatctgcttccgtccattatcaaccagctcggccctgacaacctagacaacctgcggaggcttgcggagcaattccagaagcaggcccctggtgcttcaggtgcagaggctggcgccagcgctggtgctgctcaggacgatgacgatgacgttcctgagctcgtccctggagagacatttgaggaggctgcggaagagaaaaaggagtcgtcatgattttgccacatgcccgcccttttgaagggcttataagtaaatccttgcgtagaagggacatgttgaactctgacctaccttatttgtgcctgcttacggttatgtcatgaacgagaatttggtagtccagcgctggtccccctttttcaccc

SEQ ID NO: 1777 - DNA, 532 bp, Zea mays
  Clone ID: 700167019_FLI
agagcttcagcgacagattgaagagcttcagcaacagaaagtggaatccgagtttcatcgtaaccatccgaatatcaaactgaccagaaaaaacaccgacgaaatggcctcttcatctgactatcctgacacatagctcaagaaattcgtgtctcttgtccaatccttgcaatccagcagcaggtaaacgtgagttgtttaagtacggaagagataggtcctgttcagccagatgattacaagcattcgcagggcttgttagatttgtggttcttagtctaaaatcacattgaagagggagatgaacacaagtgatgcagtttatgtgttatctacatttgtctctatttttgtaagatggccatatatttcctcgaaagtgatcttgattgattatgtgtgaagtgtatttttttaatgacatgggtcatgtatttccttggaaacggccatgagattggttgtgtatttgcttgaaagatgaggatgatataattttccttgaaaataatcatgagggtatttgaaccgt

SEQ ID NO: 1778 - DNA, 1287 bp, Zea mays
  Clone ID: 700167027_FLI
cagtgcaactgtaaccaagatacgtacaggtcattcaccaacatgtcatccaccttctccagcatgcttgtttccacgttgttgtcaaaccctgccatccatgcagccgccaggctcgcagcatcatactggccagcagctgaaggtaacactcctattgatccgaatcaagaaaaccctgcagatggcgtccaaggaaggaacataggctctcctccaagcatggtttctattgtagcagctacagttgctgcagcatctgcatggtgggcaacacaaggtcttctccctttcttcgctccacccgtggcttttccatttgtaccagctcctagtgctgcctttcccacagttgatgttccacgaccttcagagaaagacagagattgcccagctgaaaatgcacagattgaatgccaagaagctcgaaaacaggtacagttcgaaggtttaagaattgctgcttcttcagagtctgatgggagtggaaaaggcgaggtgtctctccatacggagttaaagctatctcctgcccagaatgctgatgccacacctaccacaggagctggcacaaatgatgcattcaggaataagaaaaagcaggatcgctcttcatgcggttctaacacaccttcaagtagtgatgtagatgcgggcaatgttcctgaggaggacaatgctaatgagaaggcgaagcaagcctcctgcagcaactcttcagctggtgacactaaccaccgcagatttagaagcaatggaagcacaagtgattcatggaaggaagtttccgaagagggtcgtctggctttcgatgcgctgttcagtagggaaaagcttccgcaaagcttttctcccccacaagcagtagactcgaaggaggttgccaaggaggaggaagatgaagtgaccacagtggcagttgacctcaacaagaatgccacaagcattgatcatgatgacctcgacacaatggatgagcccagggcttcctttcccaatgaattgtcgcacctgaagctgaaatcgcgccgtacaggcttcaaaccatacaagagatgttctgtggaagcgaaggaaaaccgggtgccggctagcgacatggttggtaccaagaggattcgtcttgatagcgaagcatccacataattgatttcttcaaagttatatttacatctaagctactataggacttcagatcttgcaatgcagtgcttcattaaaactcaatctgttgtgtgctgtattttaatgcttgtcaagcagcccgctagactgctttaaaacctt

SEQ ID NO: 1779 - DNA, 616 bp, Zea mays
  Clone ID: 700167036_FLI
gaacaaggcattggatacctttaatctggctattgtctctcctatatattatgtaatgtttactacccttacaatagtggcaagtggaattatgtttaaggactgggctggtcaaagcttaagtagtattgcttctgaattatgcggcctgataaccatcctttctgggacaattttgttgcacacagcagaggagggagccaacaattctgcagctttgttgccttggcctttggataaagggtctatatcatggtgtatcaacttaagcagtgacaatcttctaaagaatgtcgaagaggactacttcacagctctgcaaagttcacctgccccagtataatgaagaaactgataaatatctaaaagggaacatgcaaatcaaggtgtaaatcttaacagtgccagaaatctggcagttttgggtgaggagattctacctgccatttttcggtttgtacataggagcctgtaacatttgtggttttttttatatgggccaggatagaacttctccattgtttgttcaaggcaagcagaattatcgcctgcatgttgtattttgtataaatgttcatcctttaactaaaactcagaagtgaagattgatatatct

SEQ ID NO: 1780 - DNA, 965 bp, Zea mays
  Clone ID: 700167040_FLI
tggaataccaaaactcagttcagtcacgtctctaggagggaaacacgttgagtttgttagcgttgacaaatgtaaagaggaaaaaggtggtccttatacagcatctattccattaaatcaggcaacaaatcctgatgctgatgtattacttgcatatgaaatgaatggagaggtactcaaccgggaccacggatacccgctccgggttgttgtacctggcgttattggtgcacgctctgtaaaatggctggacagtatcaacgtaaaagaggaggaatgccaggggttttttatgcaaaaagattacaaaatgtttccgccaaccgtggactgggacaacattaactggtcaactagaaggccacagatggatttccctgtgcagtctgctatctgtacactggaagatgtagatgttatcaaggaaggacaggctaggattgctggatatgcactttcaggtggtggccgtggcattgagagagtggatgtatcagctgatgggggtaagacctgggtcgaggctcgtagataccagaaagacaatgtggcgtatgtgtcagatggacctcaaagtgacaagtgggcttgggttctctttgaggccacattagacgtaccagcgaatcctgagatcgtagttaaggcggtggactcagctgcaaatgttcagcccgagaaggtagaagacatatggaatctgagaggaatcctcaacacgtcttggcatcggatcaaaattcagagatctttgtgcgttgaaagatctaagctgtgaaattaagtacgcagctgatcacttggagcaagcagactcactttaccattgtcccagaataataattagtcacttcaactttctgcgtctgtggagtaaggttgtacgagtgttggggctgtgtcattatgggatttgagctcacttggtttctgtgtaaatgtcagctgctgcggtttttttggtc

SEQ ID NO: 1781 - DNA, 966 bp, Zea mays
  Clone ID: 700167053_FLI
caacatctcgatttcgaatttcacccagctccgcacgcgcctcaacccttcctctcgggcggcggcgccggcaaggcggcagccaaccggagcgggagctgcgatgaagaagatcttcggcgccaagaaggacaaggggccgcccccctccatccaggacgccaccgagcgaataaacaagcggggtgagacggtggacgagaagatcaagaagctggacgaggagctagccaggtacaaggagcagatccgcaagacccgccccggcccgtcccaggaagccatcaaggcacgcgccatccgactcctcaagcacaagcgcatgtacgaggagcaacgcaacatgttgtacaaccaaacctacaatctcgaccaagttggctttgctgccgatggcctcaaggatgctcagcagactatgaatgcaatgaaggcagcaaacaaggagctcaagggaatgatgaaaactgtcaaaattgatgaaattgataatatgcaagatgaaatgacagatctgatggacgtgagcaatgagatacaagaaactcttggtagaagctacaacatccctgatgacgttgacgaggaagaactgatgggcgagctagatgctttggagtctgatatggaatttgactcagctgcagtcccctcatatcttcaaccagattctgactttgatgctgacctcaacttacctgctgcaccaagtcgccctgcaatggtcccagcaggcgggctgcaggaggatgagctaggattgccagcggtgcctcgggcatcacttcgcagttagaaataatcttgtgtttcgattttaagttggtgtgaaaactctgtagtttgtgtctgagtctgaacaatctaatgcttttcgtcatggtaatgcttcagtttattgcacttcctgttgctgctgacgtttcaggttccttttttttgtcattctggaatttttcatctgtc

SEQ ID NO: 1782 - DNA, 1093 bp, Zea mays
  Clone ID: 700167056_FLI
gcaaagcaagaactgatcaaaagttagtagcactgaacaagatcacgttttttttgtggttgatgttcttggggccaggctgttcctccagtcccccttgccgtatttcttcaggcctaagaggaacagcctggccccaagaaatacggcaagggggactggaggaacatatcgcgcaactacgtccagacgcggacgcccacgcaggtggccagccacgcgcagaagtacttcatcaggctcaactccggcggcaaggacaagaggaggtccagcatccacgacatcaccacggtgaacctgacggacgacgagcgggcgccctcgccgtcgcggtcctctctgatcaccaccaccagccagccaaacgcgccggctccggccgcagcggtgataggcgggcccttctcgtcggcggcggcggccgaggccaagcagcaccagcacggcgctgggaacctgccaccgaaccggacctccgtggtgccggctgtttacaggatggacgattcgcaggaccacggcctgcagtgtggccctctgcgtcatcaactggtcgccagccaccacagcgttcttgtagtagaggtcggcagcaagcggtggtagagcgagaggtcgagaagatgaagagcagcactctgttggcgatcctagttctccaggcccttctggtctctgcggccgtggccaaaggacctgcagggccgacgacgaagaagcagtgctggtgcggcgagtgcaccagctggtcgggcgtgtggacctgcgacgacctcctcaccaagtgcgccgccacctgcaagaactgcgtccccgtgtccacggacaagggggccatcaagtacaggtgccgcgacttcctccccgaaaactgcggctgcaagatccactagagactcatccaattccaccatggccgcgcgccacagcggcacagccgatggatccttccatgttcctccgtccgtccgccttgctacaagcaggcagccacaccaataagctagctcttgttgttgttttgtatgtttgattgggtgtcccttcccagtcgagatggaataaaataaatcatcaggcgccaataagc

SEQ ID NO: 1783 - DNA, 810 bp, Zea mays
  Clone ID: 700167112_FLI
gcaccagcccaggctgcaatgcggttggcatgatcgatcgtaaaatcctaggcatccagcatctctacggccgacctgtttatgcacgatccaagcaatgcagcatcgactcgccacaaaatgggccccttcctcctgatgctccatcttggtgcgaggccccttttgaccctgaagggcttcttagttccgtgatggccatcgtcacatgcttgattgggctccaatacggacacgtcatagtgcattttcagaaacacagggagaggatgatgaactggctaatcccttccttcagcatgctggtcctagccttcgccatggacttctttggactacacatgaacaagccactgtacaccctgagctacaccttaggcaccgccggcgccgcggggctcctcttctccggaatctacacgctggtcgacatctacgggtaccggcggccgaccgtcgccatggaatggatggggatgcacgcgctgatgatatacgtcctgatcgcttgcaacgtcctgcccatattcatccacggcttctactggaaggagcccaagaacaacctgctgaagttcatcgggattggagcgtgaggcgatggactgacgacggtacacgagtacggatattgtttaggagtctatttggacagagatagagaagcgcgtgcgttcagcaggccaagttttgctacacggccagtgctgcagctgcagcgcatcattgttgctgcacagagcgcctttctctgtgagctcttgtatatatgataaaaaagagtgttgcatataatgacgacacgatttg

SEQ ID NO: 1784 - DNA, 948 bp, Zea mays
  Clone ID: 700167129_FLI
cccacgctccgcccacggtccgacgactgcttcgtcgagggctgcgacgcgtcggtgatcctggtgtccacggggaacaacacggcggagaaggaccacccgagcaacctctccctggccggcgacggcttcgacaccgtcatccaggccaaggcggccgtggacgccgtgccggcgtgcgccaaccaggtgtcgtgcgccgacatcctggcgctggccacccgggacgtcattgagctggctggcgggccgtcgtacgcggtggagctggggaggctggacgggctggtgtccatgtccaccaacgtcgacggcaagctgccgccgccgtccttcaacctggaccagctcacgagcattttcgccctcaacaacctgtcgcaggccgacatgattgctttatctgcggcgcacacggtggggttcgcgcactgcagcacgttctcggaccggatccagccgcagtcggtggacccgacgatgaacgcgacgtacgcggaggacctgcaggcggcgtgcccggcgggggtggaccccaacatcgcgctgcagctggaccccgtgacgccgcaggccttcgacaaccagtacttcgccaacctggtggacggccgggggctgttcgcctccgaccaggtgctcttctccgacgcgcggtcgcagcccaccgtggtggcgtgggcgcagaacgccaccgccttcgagcaggccttcgtcgacgccatcaccaggctcggccgcgtcggcgtcaagaccgacccgtcgctgggggacgtccgccgcgactgcgccttcctcaactgaaaaggatggacatggagagctggtttatatctcacacaagtgttcatacacaatctagagtaaagtttttttgttgttgttattattatcatgtcaggtatgagcacaaggttgaattaatggttaatgcgattgatatactgt

SEQ ID NO: 1785 - DNA, 660 bp, Zea mays
  Clone ID: 700167130_FLI
ggcagagagagagagaagcgccatggcactctgaacaagaaaagaaagagctagagagatctcagtcagccagtctctcacaacacaatgccggcaaccaccaagccgatcttgctcccaagggcgtgggcagcagcgccactcctcctcctgctgctgctcgtcctgcacgggagaggaggccactgcgtcggcatggaggcggcggagctggagatggactcggaggcgcaccggcggctgctgtgggaggcgaccacggggcggaggtacatcagctacgacgccctgcggggcgacgtggtgccgtgctccaggaccggggtgccctactacaactgccggatctcgaccaccgccaacccctacacccggggctgcgagagcatcaccaggtgcagggacgcggatccctaggctcttgctttgcttgctccgtcgccttgcaaagggaagtgggtgtggggctgctgctcctcgctccttcgacgctgcagggcggtgttgctgcaaatgcttactaaatgaagtgtattttattctgtcttcttcttttttctttcttcctctttttttttcttggtcgtccttcctcctttgccgggatatttagtaagtgtagtaatgaagcactaatactaatggatgaatctcgtgtgc

SEQ ID NO: 1786 - DNA, 517 bp, Zea mays
  Clone ID: 700167152_FLI
ccgccgtcgccatctcccactgcgccgcccggatggacatcggcgcgatgaaggagttcgggatgtcggcgctgctgcagctggcggtggagctgctgaacgaccggctgccggaggcgagggaggccgcccgcggcgtggtggcgtcgacgcacgcggccttcgtcaaggaggccgccgcgagcggccaggaggacgacgctgccgcgtcctgggagagcctctgcgcgctgagcctcccgcccatctccgcgcaggccgtcgccaagatcgctgccgccgccgccgcctcctcgcagtagccacggcacgcgtgcggacgtgcgccgctggcgttgtttttgggggtcgtctggttcggttcagaagtagcgctcgtgagtcttcagacagagctcgtttgtcgccgccgccgagtctgtttgtttgttctttctactccatgctatctcgcatggttagtgttctgtttatggcttcgtcaagtaataacatatcaattaacatagtttactag

SEQ ID NO: 1787 - DNA, 738 bp, Zea mays
  Clone ID: 700167208_FLI
tccgaggaaaccagacatggaatcttctgggaaaggatctgatggttcctgtaccagtagtgtgaaatcagattttgagaatggaaaagattttggaaagcggtcaaggcaccgttgctttgttgttactgcaagggcacggtcttttctttaccaccaggtaaggttgatggtcggtcttctaaaatctgttgggactggagatctaacaactgcagatgttgagagaattctggatgcaaagacggttactgctgcacccagtatggcaccttcttgtggtctgtaccttgctaacgttaaatatgatctgaatacctgaagacaagttttatctagtggcttctgttggtgggcctccagattttgtcagctgttggctatcaaaggaattatatgctgccacttgccaaagctttcagttgcctgttttgtccactgaatcttgcatggtgattgaaaacctagaattaagtttatctgtcagcacaagagccggcttcattctcttcttgtacacagagctcttctgcatgttcagaaacaaaataggtagcttcattttagttaagttcaactatccactctttaaatttcagctggatccacccgattttgttgggtgtacgtagatttgacctggtaggggcaaaattttatttcttggttttctcatgactgtacttggttcttgatatataattaattagccaaatgcgttgtgtgcatattgaaaat

SEQ ID NO: 1788 - DNA, 986 bp, Zea mays
  Clone ID: 700167257_FLI
atccgttggaattgaagctatgagccgaggatgttcagaggcacatttcgttgagatggatccttgggtcatctctgaggtcctcaaaccaaatttggagtgtactggatttcttgacgtgtcacacatacatatgctccgcgttgaaaatttcttggccaatgccgaaaaatctcaaggtagatatccttcctttgattacattagtgtaacaccaccatatctggaggtcaactatagcacgctactcggccaacttgcaaggtcaccattggttggaaaagactgcttcatcctagtcgagtacccgctgaaaacagacatggctgaatcctgcggaaaccttgtaaaggtagctgacaggaggtttggtaggaccaacttgctgatatatgggccaacttggtcagagaaaaagaagaaaagatgatttctgaagggggggttcaggcaaggtttgcatgcacagggtgtaatgataatcacggttgggaacggttaaggtttcaagatttgcacaggggatacttggcctagtgtaaggcataagaaggtggttgatcttggttcactgggcctatccctgattaacttgcacagcacagagagctcgcatttcgctttcctttgtggtcagagatccacatccgagaagaggggggaaacaaaaggtcctctaccttccaagaatcaatatcgaatccacagttcatggcttcatgcacaccttgggaaaaaaaagaaaagagatccgtgctctacgttgcaattctaattgatatcctgccaagtattcttcgagaggtccattaaaaaaaagtattcttcgaggcttgtgcacttctgtaactcttttgtaccccgtgtttaatttctgggcggcatgatatcaagagtacccagatgtatccgtcgctggtctgaacactaatttaacgcactcattcgcagtatggcaatgatgtggccaactaacggtccctttc

SEQ ID NO: 1789 - DNA, 951 bp, Zea mays
  Clone ID: 700167340_FLI
ccatcccagccgccagttcccggacaccggattgctccccaagacaagcccaaatctgggaccataaacaaaccgcacccgagcggcccaaatcgggatctgacggcaattccccaattcgattccatcccatgggttggcgttggcacgacgacgacggtgacagcggccggggcctcggcggtgtccctgacctcgctggtggcgggggcgatggggcgcagtgcgccacgcgacgggtggtgcagtcccgctgccacacggaggaagtcgagcccggccgatttgtccgcaagtgcgagaagacggagcagctcctccgcgactgcgtcggcaggccctctgaactggtggaatccaaaactgaaaacactgaagaagatgtcacagaagaaatgaagagcggttcactttctcttgggtttccaagaaacgagcccttcgcattccctggactccgcagtgacatggaagcccttgagaaagacttctttgggagcctagggaacgtcctggatgaagctgagcggatggccaacagcttcgtcagatcttttggttttccacctgctcatgacagcggatcaagtccatttcgaagacagcctgcagagaggcatattgaggaagataccgcaaagaataagactgagagcgactactcagaattcaggagcaagatttcagatgtgtaagcagctgtagagctgcagttatctggcctgtgtccacagagctgaaacctgagaagtgagagctttgcaatctcacggtccttatatgtttctctttggaacaaaataggtacttgcggcctgcaggtgctgtttagcctcgcttagtatggtaatcgtaatggtagatgaagtgatttgcctgtcagaggtgaggagtattatctgttatgttcggttttgcagggccattttgtacagtactttttgcagaccc

SEQ ID NO: 1790 - DNA, 1640 bp, Zea mays
  Clone ID: 700167344_FLI
cctcttctcctccctcctgccgggtccttaataaagagcagcagcgcaagaggttggtagagcgagcgagaagaaggcaatggcggcggagagcttcctgttcacctcggagtccgtgaacgaggggcacccagacaagctgtgcgaccaggtgtcggacgcggtgctggacgcctgcctggcgcaggaccccgacagcaaggtggcctgcgagacctgcaccaagacgaacatggtgatggtgttcggcgagatcaccaccaaggcgagcgtggactacgagaagatcgtgcgcgacacctgccgcgagatcgggttcacctccgacgacgtggggctcgacgccgaccgctgcaaggtgctggtgaacatcgagcagcagtcccccgacatcgcgcagggcgtgcacgggcacttcacgaagcggcccgaggagatcggcgccggcgaccagggccacatgttcgggtacgccaccgacgagacccccgagctgatgccgctgagccacgtgctggccaccaagctcggcgcgcgcctgacggaggtccgcaaggacggcacctgcgcctggctcaggcccgacggcaagacccaggtgacggtggagtacgtgaacgagggcggcgccatggtgcccgtccgcgtgcacaccgtgctcatctccacccagcacgacgagaccgtcaccaacgacgagatcgccgccgacctcaaggagcacgtcatcaagcccgtcatcccggagaggtacctggacgagaagaccatcttccacctcaacccgtcggggcgcttcgtcatcggcgggccccacggggacgccggcctcaccggccgcaagatcatcatcgacacctacggcggctggggagcccacggcgggggcgccttctccggcaaggaccccaccaaggtggaccgcagcggggcctacgtcgccaggcaggccgccaagagcatcgtggccagcggcctcgcccgccgctgcctcgtgcaggtgtcctacgccatcggcgtgccggagcccctgtccgtgttcgtcgactcctacggcaccgggaccatccccgacaaggagatcctaaagatcgtcaaggagaacttcgacttcaggccagggatggtcaccatcaacctcgacctcaagaagggcggcaacaggttcatcaagaccgccgcatacggccactttggccgtgacgacgccgacttcacctgggaggtggtcaagcccctaaagaaggcatccgcttaagaatgtattgggaagttcactggacatgaggttcatcttcgtctggctctgctgatacctgcaaggattgctgctgctgctgccgcccctggatgtgtgtttgatcagtgactggctgctctgctccatagaagatgaatgaagagagagatggtgaagaaggctttggcaaatggcaattgccgcagcaagccatgtcggcgccactgaccggcttagtgattggtataatttggtgtggcagcagccaggattaatgcgctggtcttttatctttactactagtttggtctcgtccggtatcttatttttctttccccttttcgagtctgtactgaaactgctgagagatttgcagttttgatctatcatatcctttggt

SEQ ID NO: 1791 - DNA, 1089 bp, Zea mays
  Clone ID: 700167361_FLI
accaggagcggacgatattgatgcttcttctcgtcttccacttctcaataatgtttactacagagatattcttggtgaatttggagctttctttgctcttgccaacagaattgacaaaatacataaaaattcttggatagggtttcagtcctggagagctacagcaagaaaggttagctgttctggaggcctttcaaaggatgtatggtgtacatcttgatcgtgacctggattctctgttacatatgcctaatgatggagacacgtggtctgtgatgcaaagttgggttttgcctacacggtcattcctagaatttgttatgttctcaagaatgtttgttgatgcactggatgcacaaatgtatgacaagcaccatcaaactgggcattgcatcttgagtctccacaaggaccagcactgctactctcgtcttctggagttgattgtgaatgtttgggcattccacagtgcacgacggatggtctatgttaatcctgcaactggtgaaatgcaggagcagcaccatctcagtggcaggagaggtcaaatgtctgtgcagtttttctcctacgccactctgaagagcatggacgaggagcttgcagaagagtttgacttggatcacccagacaggaggtggctctggccacaaactggagaggtcttctggcagggtctctatgagagggagcgtagcatgcggcagcatgacaaggagcggcggaagcagcagagcagagagaagatccagagaatcaagagtagagctcggcaaaagacgttggggaagtatataaagccaccacctgatgatacagttgtctcgaacgatacaacgactgtagatttgtagcattttgaccatactttagggtgataattcttaccgtggaaaattttggttcattctttcattgttacggctaatgtcctcggtcctcactgagtacccccggcaggtgtgaatatttttggtcagttttatcgtgccctctggtgttctgggtgctttacaggcgattttgtaacatatctaggccattaagtttaaatttgggttcccgtagcgtagatgcttttgttctttt

SEQ ID NO: 1792 - DNA, 1116 bp, Zea mays
  Clone ID: 700167395_FLI
atggaatcacgaaacttgttgtgttgcctctataccctcagttctccatatcaactagtggttcaagtctccgtttattggagagcatattcagagaggatgagtatctcgtgaatatgcaacatacagttataccttcctggtaccaacgtgaaggatatatcaaggctatggcaactttgattgaaaacgaattgacaaaatttcaagaaccccaaaaggttatgatatttttcagtgctcatggagttcctctggcatatgttgaagaagctggtgatccatataaagcagaaatggaagagtgtatcgatcttatcatggaagaactggaaaaaagaggaataacaaatccgtgcatacttgcttatcagagccgagttggaccagtggaatggctgaaaccgtacactgatgagacaattattgagcttgggcagaaaggggtaaagagcctgcttgctgttcccattagttttgttagcgaacacattgaaactttggaagaaatcgatgtggagtacaaagagttggctttggaatctggcatcaagcactggggacgggttccagcactaggttgcgaacccacattcatttcggatcttgctgatgctgttattgaaagcctaccttatgttggcgcaatggcagtttccaatcttgaggctcggcagtctctcgtacccctcgggagcgtggaggagctgctagcagcatacgactcgaagcgcgatgagctccctccaccggtaatcgtgtgggagtggggctggacaaagagcgcggagacctggaatggccgtgcggcgatgctggccgtgctggctctcctggtgctggaagtgaccaccggcgaagggttcctgcatcaatggggaatcctgcctctgttccgctgagccgacaattctgttcatgatggggtcataattttgctgcagccgaaggaagttttgaacttctgatgctgtatatgaatcaatttgccttaaatcgtcgaggggaaaagaggagaaaatggtaaaatatggacagaattcgacggtatatcatgttatattgtacctacctactacatgacatgggacatggaatagggctcagacatgcgct

SEQ ID NO: 1793 - DNA, 963 bp, Zea mays
  Clone ID: 700167407_FLI
tgaaaggatctgtaatgctggaagatttagtgaggatgaggcgagatttttcttccaacaactgatttcaggagttagttattgccactcaatgcaaatatgccatagagatttgaaactagaaaacactctcctggatgatagtatagcacctcggctaaagatatgtgattttggttactccaagtcctctgtgctgcactctcaaccaaaatcaactgtcgggacaccagcttacattgctcctgaggtccttgctagaaaggaatatgatggaaaggtcgccgatgtttggtcatgtggagttactctgtatgtgatgcttgttggtgcctatccctttgaggaccccgacgaaccgaagaatttccgcaagacgcttactcggattatcagcgtccagtacgcggttcctgattttgtccgagtttcaatggagtgcaggcatctgctgtctcggatctttgtggcgaaacctgagcaacggataaccatcccagagatcaagaaccacccatggttcctgaagaacctgcccatcgagatgaccgacgagtaccagatgaacctacagctagtcgacatgaatgtcccctcgcaaagcctggaggagatcatgtccatcatactggaggcccggaagcccggcgacgggctgaagcatgcgggacagctccccggccttgggagcatggagctggatgacattgatgttgacgacatagacgttgaggacagtggcgactttgtatgtgccttgtgacgcggttcaggctgtccggcaccgttgctgcggtggactctcccccactctcctggtctttgtgtcttgctgttattccatgttgtttgtttcagcgagctccgagctcccattttgttgttgtaatatcacatgttttgtgtaaccaaggtagtgacgctgtggataaataatagacgttatgtgttgtattcttgctg

SEQ ID NO: 1794 - DNA, 743 bp, Zea mays
  Clone ID: 700168280_FLI
ggacgagaggcagcgaaggaaacagtagttcttcagttaggcaggagggcacaggaggaggaagatggcgtcgaagaggatccagaaggagctcaaggatcttcagaaggaccctcccacctcgtgcagtgcaggtcctgttggtgaagatatattccactggcaggcaacaataatgggtccatctgatagcccatattctggtggagttttcctagttacaatccattttcctcccgattatcctttcaaaccaccaaaggtggcattccgcaccaaggtgttccatccaaacatcaacagcaacgggagcatctgccttgacatcctgaaggaccagtggagcccggcgctaaccatctccaaggtgctgctgtccatctgctccctgctgaccgatccgaaccccgacgatcctctggtccccgagatagcgcacatgtacaagacggaccggaacaagtacgagaacaccgcgaggacctggacccagaggtacgccatgtagggagggggtaccctacctggccctttgggggtccgccggaattgccgctgctgcgttgtgttcctggacctggacctggactggagactggacgtgtctccgtgtattcgatcctgtgctgtataatgatgcatcagattgggtttgcagtgcagtgcgccgtgtggtgctgaatgctgtattgtgccgcttggaggctgtaattctgaatgccaaaaaactggtgattggaacc

SEQ ID NO: 1795 - DNA, 771 bp, Zea mays
  Clone ID: 700170380_FLI
cgcgtggtgatcctgctccattacagttctcgtgggctaggacaccctttgtaccatagcgtgattctacctatgtatgtgattttatttgggaagttacgcctagcacacctgaagttctgaactgaagcaacaagtttgacaagtccaagattgttgcttcagttcagaacttcagtgttgtgtctgtggacgaggctcaaatttctgctagcctcatcaaacatgggccattggcaatcggcatcaatgctgcctacatgcagacatacatcggaggcgtgtcatgcccatacatctgtggcaggcaccttgaccatggtgttctccttgttggatatggtgcttctggtttcgcccccattcgcctgaaggacaagccttactggatcatcaagaactcgtggggcgagaactggggggagaacggatactacaagatatgcaggggttccaacgttcgcaacaagtgcggcgtcgattccatggtctctaccgtgtccgcagtccacgcctcgaaggagtagactctggtcagcggtgataatcgtgattccatatattgtagaactataatccctgctagtaatccatttgtgctgtttatgtatcgaaggcagcaaagatgtgtgaagcggcaatgggatgcttgctgtaaggtaatatgtttggcttgctaggcatgctacacgctatttggatgtagcaacgttatcaccagctgtatacgctttttaatcgacaacatttgaataatatgtacataacatt

SEQ ID NO: 1796 - DNA, 633 bp, Zea mays
  Clone ID: 700170408_FLI
gagctggggtccccggcgaagcaaatgccctgtgggcataggttccactcttcttgcatcctgccatggcttgagctccacagctcttgccccgtgtgccggttcgagctgccgtctgaagagacgaaagatctgaacgagcctagcgatgtgcacagaagaacagagagcacccgagagaacgacagcgagagcggtaacagcgcgtggccccttgtcccttggttcttcagcgggctgttctcggtacctgaaccgtcgcacactgacagaggcactctcaccaccgatcaacagagtccttccaccaacccaaatgctggaggaaattgatttcgtcatcctttgtgaataatgctcatacatctgagaatagcaaggagccttgtcagtagatggcttattttttttctgtactgataatccttctcggatgaatcgcaaggtacggagtctgtgtctgctctattgtcaggattctagcgatcgtttcgcctctagttaatctcatagctactgagactgtctgtctgcatcctatgcaaaagatcggttgctttctttgttcttggctcttctgactggatgtctttgagctatttctggaatatgtaaactatcatgccttgtatt

SEQ ID NO: 1797 - DNA, 791 bp, Zea mays
  Clone ID: 700170434_FLI
ccaagcagctggagcgcgactactccgcgctccgcgacgactacgacgcgctcctctgcagctacgagtccctcaagaaggagaagcacacgctcctcaagcagctggagaagctagccgagatgctgcacgagccgcggggcaagtacagcggcaatgcggacgccgccggcgccggggacgacgtgcgctcgggcgtcggcggcatgaaggacgagtttgcagacgccggggccgcgccctactcgtccgagggcggtggcggtggcaagttcgcgcacttcacggacgacgacgtgggagccctcttccggccgtcgtctccgcagccgagcgccgctggcttcacctcgtcggggccgccggagcaccagccgttccagttccactccggctgctggccatcgtcgacggagcagacctgcagcagctcgcagtggtgggagttcgagtccctcagtgagtgagtgtctgagtgatcgatcgccagaccatgcgacggcgggtcactcggttccaacttccaagcacacacacacacacacgtaagcacgaatacgagttggtagcggtcatcagccccgagcgcacggtgtacatagctttcagtagatcgaattccaggcatgtccatcaacaagcagtttcttctcgtcatcgatcatcatgcatgcaaaagaaaattttctctcccccattgtcgtcgccgctaccagatcatgtaatccaggaacatgtagagaaagatcaaacgagcttatagagaagggaggtcacatgttcgatcgatc

SEQ ID NO: 1798 - DNA, 1090 bp, Zea mays
  Clone ID: 700170502_FLI
cgaggatccaagagagagggattgcttgaaaactattctgcacagggtatatgggaagttcatggtacaccgtcctttcatccgcaaagcagtgagcaacatattttaccagtttgtctttgagactgatcggcacaatgggatcgcggagctgctggaggtctttggcagtgtcattagtgggtttgcattgcctctgaaagaagaacacaagatctttctttggagagttctgattcctttacacaaaccaaaatctgttggtgtgtatcttcagcagttgacctactgtgtaacacagtttctggaaaaggacccaaagcttgcaagctcagtgataattggtttgttaagatattggccgataacaaactgtcagaaggaagtgatgtttctcagtgagattgaagagatcttggagtctaccagccaagcagaatttcagaaatgtatggtaccgttgtttcggcgaattgctcattgtattaccagttcccacttccaggttgctgaaagagcgctcttcgtatggaacaatgatcacattatcagcttgattgcacaaaaccgccaagtgatcatgcctcttgtcattccagcgctagagcaaaacattcagaatcactggaaccaggcggtcctgaatctgaccgtgaatgtcaagaaaatgttatctgagatggacgacgatctcttctcgtcatgcctggcgaagtacaaggacgaagaagaaaaacgcgtgtcgctagaagcgaagcgtagacttacgtgggagaagctcgagtcagctgcagctttccagccagtgactggccatacagccgtcctagtaggccaccggccgtcagcaaatctgatcgccaccatgatctagctcatgcatgtatgccgaacaagcgaatgtggtgctctcccccccttttggtgaggcgcagcaagtgtagtgttctctattttgctcctgcttattattattttccttttgctggtatgggtaatcagtgtagtagtaagttgtaactatttccggatgtttatgttcttaaggcaaggatacctgtaacttaagactgccgagtgctgacactct

SEQ ID NO: 1799 - DNA, 610 bp, Zea mays
  Clone ID: 700171417_FLI
ggtggatcgtcaacggcgcccggccccggcggcagcgctgcgcgcgtctcgagggcagcgggagccagcagccgctgctccaccaaggcggaagcattttggaaccctgaactctgggctttaagaagacactactgctgcaaccatgagcaccatgaagttttgtcgcgagtgcaacaacattctgtaccccaaggaggacagggacaggcgcaccctgttctttgcatgtcgcaactgcgagcatcaggaggtctctgacaataactgtgtctatcggaacgaggtgcaccatactgctggggagcgaacacaggtcttgcaggatgtagcttctgatccaactcttcccagaaccaagactgtccgctgcaatctctgtgggcatggagaggctgttttcttccaggccgcagcaagaggggaggaggggatgaccctgttctttgtgtgctgcagccctgattgtggtcatcggtggagggaatgatgcgatgaaatcttcgctctaatagttgtttcatcagagcatgaaacttaacttgttttgtagttttcttggactatgtatttcgaatctgacctaagattaatgagagaatgtctttcc

SEQ ID NO: 1800 - DNA, 657 bp, Zea mays
  Clone ID: 700193275_FLI
cccaggcaaggtgcgcgccgtggtcaagttcaacgcggcgctggcgcaccacatcatggccggcgccgacgtgctcgccgtcaccagccgcttcgagccctgcggcctcatccagctgcaggggatgcgatacggaacgccctgcgcctcagcgtcgactgtaacgtcgtggagccggcggacgtcaagaaggtggccaccacattgcagcgcgccatcaaggtggtcggcacgccggcgtacgaggagatggtgaggaactgcatgatccaggatctctcctggaagggccctgccaagaactgggagaacgtgctgctcagcctcggggtcgccggcggcgagccaggggtcgaaggcgaggagatcgcgccgctcgccaaggagaacgtggccgcgccctgaagagttcggcctgcagggcccctgatctcgcgcgtggtgcaaagatgttgggacatcttcttatatatgctgtttcgtttatgtgatatggacaagtatgtgtagctgcttgcttgtgctagtgtaatgtagtgtagtggtggccagtggcacaacctaataagcgcatgaactaattgcttgcgtgtgtagttaagtaccgatcggtaattttatattgcgagtaaataaatggacctgtagtggtggagt

SEQ ID NO: 1801 - DNA, 685 bp, Zea mays
  Clone ID: 700193315_FLI
attggaagatgggcatgatagcgcactgcaaccttgttcaatgagtgaaagagatagtgccatgggtcttgctagcctgggagcggatactcaatcatgtgttgatgtccattctgacaattggacatctgtcagcattagtggccgtgatgaagttttaactgctgccaaaattgcatctaggaaaaggagcaatcctggagacagaatagaagatttagatgcttcacttgtgggaagcccaaaccaagatgagtgcagcggagggagatgttcagttcgaccgagattgatactagagatttcctcagattctgattagcacacatttgtgttggctgatgcctgcatgacttggagaaaaggaagggggtggatgtgatgctgtctaacgcggtcagcgaactggcaagcagctagaggcctctcctctatcctgtaattggagatcccatctctgttaggtggtagaacgtgacaccaggagcaacatatagagtggcataatagagctgaaccatatatacatgcagtgtaggcaattttgtaccatatatgtcatgaaccgaggtggcagttagttgatgtaaatatgctccctctctgtttttctatattattggctgaaaggagaggggaggatgcatgcttagtccggcctggttatttatcatttatttatgat

SEQ ID NO: 1802 - DNA, 357 bp, Zea mays
  Clone ID: 700193418_FLI
ccaccggcatccgagaaggcagccgccgccgagcccgtcaaggacgagctgtgagcatccaaggtgtggacggctgtggctgcgtaagcatgggaggaaaacctggcgctaacgtgcctccaacgcctagtttttgcgggaccagagggagagagagagagggacggagttagagagagaggggatctgcgacgtgttttgctctgcggcggcatgtctgtgtatcccattgaggttatgtacacaattacaccgcggtcggtgggtgttttttagttaattatcacaagtgacagtagaaaggaacagattgtgatgaggttgaatggatgaataaatcgctagtccgccccgcct

SEQ ID NO: 1803 - DNA, 598 bp, Zea mays
  Clone ID: 700193458_FLI
aagacgctctgcatctgcgatctgaagcaagtaaactgcagtctctgaggcaagagttggctgcgaaggttcaaggcctatcaaaagagcttgaacttcagaagtctgaaagccagaaaatgactgctttggtagctgaacgtgatgcgctgtgtcaagaactgctccaggctagggcgaaccttgagtttgagaagaaggcgaagccagagctgactgcgcaggttcaggcaatggagaaggatcttgtggctatggctcaggaggcggagaagctgagggctgatatcgcgaagagaaacacacctactagtttcagcagccgtggaacgtatggagcctcgttgtcgactcctgggatgggtttgcaaggcatgtatgatggcggcggctattctatggctgggagccgctacggcagtggcactggggcttggagctcgcacgatccccatggctacccgcatctttaactgtgcttctgaccggtgttttctcctgaacagctccctgagtaccttggctaagtttcttgtagtagtataacttgtggtgcaccattgctacccttcctctggtcaatacacaacaatatacc

SEQ ID NO: 1804 - DNA, 1235 bp, Zea mays
  Clone ID: 700193490_FLI
gttggttctgctgttggtggtgcagttataactttaataatagctgctgttattttattcattgtcttgcggaaaatgcctaagaagaagaagttaaaggatgtagaagaaaataagtgggcaaagactattaagggagcaaaaggagcaaaggtatcattgtttgagaaatcagtttcaaagatgaacttgaatgatcttatgaaagcaacagatgattttacaaaggacaatattattggaactggtcgatcaggaactatgtacagagcaacacttccagatggttcattccttgctatcaagaggttgcaggacactcagcattcagaggaccaatttacatctgagatgtcaactctgggaagtgtaaggcaacgtaacttagtgccacttttgggatactgcattgtcaagaatgagaggctcttggtgtataagtacatgccaaagggttcactttatgataatttacaccagcaaaacagtgacaaaaaggcattggaatggccattgaggctaaaaattgccattgggagtgctagaggtttggcgtggcttcatcacagttgcaaccctcgcattcttcataggaacattagttccaagtgcatattgcttgatgatgactatgagcctaagatttccgattttggcttggcaaggcttatgaatcccatcgacacccacctgagcacatttgtgaatggtgagtttggtgacttagggtatgtagctccggagtatacacacactcttgtggccactccaaaaggggatgcgtatagctttggagttgtcttacttgaacttgttactcgtgaagagcccacacatgtgtcgaatgcgccagagaacttcaaagggagtttggtggattggataacgtacctgtcaaacaactctatacttcaggatgcagttgacaagtctttgattggaaaggacaacgatgctgagctgcttcagtgcatgaaggttgcatgctcttgtgtgctttcttctccgaaggaaaggcctacaatgtttgaagtttaccagcttctgagagctgttggagagaaatatcatttcagtgcaaatgacgatgaattgacgatgctacctcaaaatgccaatcctgaagatgagcttattgtagcgaactagtttagcctatgtgatgagtgggtgcttgtcggataccaaatgttgcaggagttgcttcaacttggaataatcagaattatttctct

SEQ ID NO: 1805 - DNA, 645 bp, Zea mays
  Clone ID: 700193586_FLI
gtgcaacaacacgaacagagccatgagcaacaccaaggacagagccatgagcaacaacatcaacaacaattccagggtcatgacaagcagcaacaaccacaacagcctcagcaatatcagcagggccaggaaaaatcacaacagcaacaatgtcattgccaggagcagcaacagactacaaggtgcagctataactactatagcagtagctcaaatctaaaaaattgtcatgaattcctaaggcagcagtgcagccctttggtaatgccttttctccaatcacgtttgatacaaccaagtagctgccaggtattgcagcaacaatgttgtcatgatcttaggcagattgagccacaatacattcaccaagcaatctacaacatggttcaatccataatccaggaggagcaacaacaacaaccatgtgagttatgtggatctcaacaagctactcaaagtgcggtggcaatcttgacagcagcacaatacctaccatcaatgtgcggcttgtaccactcatactaccaaaataatccatgcagcagcaatgacattagtggtgtttgcaattgaagaattgtgtctacctagccgttatactcctataacggtgttaagcaataaagtaccatacattatgatgtt

SEQ ID NO: 1806 - DNA, 594 bp, Zea mays
  Clone ID: 700202616_FLI
agcccgcgtactagccggacaggaggcgacagcgacaccgcgagacgtgccatcatgttggaaggaaaggcggtggtggaggacaccgacatgccggcgaagatgcaagcccaggcgatgtcggcggcgtccagggccctggatcgcttcgacgtcctcgactgccggagcatcgcgtcccacatcaagaaggagtttgacgcgatccatggccccggatggcaatgcgtggttggctccggcttcggctgctacatcacgcacagcaaggggagcttcatctacttccgcctggagtcgctcaggttcctcgtcttcaaaggggcggcagcatgatgacaagccccacggctaacatcgcgagttcacgaccaggcaaagcaggtggaggatgggtttttttttcaccggcctttgtggacggcttgcctcgctgtatacgatatcaccatggtaataccaaccagtagattgaaacgttgtgggagattatattggaaacaatggaatttcatcacttgtcaaatagcttttgtgtacgaaatctagatggatgtaaatttgaaatcatttggatttggaaactggtcaatt

SEQ ID NO: 1807 - DNA, 667 bp, Zea mays
  Clone ID: 700202758_FLI
ttctgaagagggcccaagctgagaatgaaggaaaaactgttgagtctaagaaaccaattgttgtgaagtacggccttaaccatgtgacttacctcattgagcagaacaaggctcagcttgttgtcattgctcacgacgtggatccgattgaactggttgtgtggcttccagccctgtgcaggaagatggaggtcccttactgcattgttaaaggaaaggctcgccttggatcgattgttcacaagaagaatgcatcagtcttgtgtctgaccactgtcaagaacgaggataagcttgagttcagcaagatcttggaggctattaaggcaaacttcaacgacaagttcgatgaggtcaggaagaagtggggaggtggcatcatgggatccaagtcgcaggccaagaccaaggcccgggaaaagctgctcgccaaggaggctgcgcagcggatgacctagattgtctactgctgtgtctgccctgtagtttgacggggaagaactgatgaactcgtattgtggttttccgaatctagtttcatatgtttctgtccaccagaccatgtttagaagctttgcaagacagagtttacagtgtttatgtgatgcctcagatccatgcagctttgcttctaattgcctaagagcaacctcaaaagtatttcatg

SEQ ID NO: 1808 - DNA, 1975 bp, Zea mays
  Clone ID: 700202830_FLI
cccggtgctcgccttctcccctcccctcaatctccagcctctctttctcgctcgctggccacccgccgcaccctccccatcaggccagcagcgaggaagaatggagtacgagaggattcatcagaaagcccagcctggtgctctttctccaacaaagctgaggatgaagatcctgggagcccacaatcgagttagagtcatcaccagcaactcgtcatcgcggacgtcgcctgcgaaaaccatcgaggcttcacaggcgcagaacaggctactagtttgtgatgttcttgaagaagacagcgcagatagcacaaaacacccgtcggcaactaacaaaaccgaagccgtagaaaaggttcaaaaggatccagcagtggacatcagtcaagtgcagaacgcttccaccagttcggctgctaagccagcgacaggcagctcgagtatgatacagatacacccactgagacccgcggaagaagacagcactaccgaatgcgacagtggtctcgacaacgccagcactagcagcttcgagttccacggagtggagaaggcggcggcgacgcagaatccagcagccgggtacttgtccaggcagacttccatttcctccaagtggaatgacgcagagaaatggatcgtgagccgccagaatgtcagtcagaagaacaacgtcgccaagggcgcgttgcagaaccagacagtaaaccagatgagctccgccgcagccaggggcgccgttgtgcccaaaatctctgctcgtcccgtgcagaaaatgaagagagtgaatccagctttgtctgctccgcgcagcatactggagaggttgtccttcgcttcgtatcagcctaagttggttaggcatgcagatgtctgtccagttagtaacgctggtgctaactcagagcatcacaaggcaactgatactggttcatcgattgaagtgaagccctgcaacgatacgaatgatattccaacagtccagtcgtcggtgtccgtgagagatgtgggcacagagatgactccaatacctagccaggaaccttcaagaactggaactccactagggtcaaggacaccaactcgaagccctaactgttcagtaccgtcaacacctgtaggggggaggtcaatagcatctcctcctggagaagactgcacagacgatggcccatttttccacaggaaatgcggcgtacatgcaaatgaattgtcagatactgagacgaggcttaaaacaaggcaagaaatcgctgcgcttggcatacagctaggaaagatgaacattgctacgtgggccagcaaagaggagctagagctagtctctgcggcaccgagcatcgctgatttggagcgcatcaggaaggaatatgctgctcgtgctgcatcgtatgaggaggcagaaaatactaaacatacagcaagattcaaaaaagaagaggtgaagattgaagcttgggagggtcgtcaaagagcaaaaattgaatatgaaatgagaagaatagaggaatttgctgagagaatgagaagtgaggccatgcaaaagatggccgaaaagctagagatgacgcgccgcatagccgaagagaaacgagcttcggccaacgccaaaatgaaccagcaagcagctatagcggttcagaaggccgagaagattcgccaaacgggacgagtcccaggatcgagtatcctacgctgcggtggctgcttctgtggaccgtagtagatcatacataggattcgacagctagtatgttggtctgggatatatagtggtgggaaacctgaactccaccctctacaagtcagcattccttgattttagcatgaaaaaaggaatgtctctaaggtattcagatgcaaacgtgttcttgtttgtcatgtatgtaaattattccaatgattttaacttgggtcggtgtacaaggtaaccagctgttcgttggttaacgaagaagtcacgaatcgttcaaac

SEQ ID NO: 1809 - DNA, 569 bp, Zea mays
  Clone ID: 700202866_FLI
ggcagcgagtgaaatggattgccggttggacaggttagcttggctgcatggcagaatgtatcaggagatagcctgtgcctgtgcatggccatgacctgtgggccttatatgcagggagccagggaggcaatcagtttctgatgaatactagtactaatactagaccatgattgaagggctcctgtccaataaaactggaaaatgagtaagactttgtttgtttgcgtcggattacacctggaatcgttccaactaaggccttgttcgtttgtgccggattagtgggtcggaacgattcctacccggaatagttccagctaatcaaagtttatataaattagagaagcaatccggtcaagaatcgttccgacccaccaatccgacagaaacgaacaagacctaatcaaagtttatataaattagagaagtgatccggttaggaatcgttccgatccaccaatccagcacaaacgaacaaaccctgagccaattcccagcaccacgtttactagtactactctctctctctctcaaaataattaacctttattttaaccgatgaagcgaac

SEQ ID NO: 1810 - DNA, 2917 bp, Zea mays
  Clone ID: 700202892_FLI
acggattggaggggattttgacttaccagtgatttaaaccccctcaatcctcctcaatccatatggattggggtagaaccgaacaagccctgacggggaagaacaaggaggcgtggagcgagggcaagatccgcggcacggtgaggctggtcaagaaggaggtgctggacgtcggcgacttcaacgcctcgctcctcgacggcgtccacaggatcctcggctgggacgacggcgtcgccttccagctcgtcagcgccaccgcggccgaccccagcaacgggggccgtggcaaggtggggaaggcggcgcacctggaggaggcggtggtgtcgctcaagtccacggcggacggggagaccgtgtaccgggtgagcttcgagtgggacgagtcgcagggcatcccgggcgccgtcctggtcaggaacctgcagcacgccgagttcttcctcaagacgctcaccctcgagggcgtccccggcaagggcaccgtcgtcttcgtcgccaactcgtgggtctacccgcacaagctctactcccaggaacgcatcttcttcgccaacgacatctatctgccgagcaaaatgcctgcggcattggtgccttaccggcaagatgagctcaagattctccgtggcgacgataatcctggaccataccaggagcatgatcgcgtctaccgttacgactactacaatgaccttggtgatcccgacaagggcgaagagcacgctcggccggtcctcggtggcagccaagaacacccgtatccccgtcgctgcagaactggccggcatccaacaaagaaagacccaaattcggagagcaggcttttcctgctgaacctgaacatctacgtcccgcgtgacgaacgctttgggcatctcaagatgtcagacttccttgggtactcgctgaaggcgatcatcgaggctgttcttccaacactggggactttcgtcgatgacacgcccaaggagttcgattcgtttgaagatatcctcgggctctacgagctgggtccagaggcacccaacaacccactgatagcagagatcaggaagaagatccccagcgagttccttcgaagcattctgcccaacggtagccatgaccacccgctaaagatgccccttccaaatgtcatcaaatcagatgtgttaaaaaaggctccggagtttaagtttggctggaggactgacgaagagttcgcgagagagacacttgcaggcgtgaacccagtaatcatcaaacgcctgacggagttccccgctaaaagcaccctggacccaaggcagtatggagaccacaccagcaagatcactgaagctcacatccggcataacatgggaggcctgtcggtgcagaacgcactgaggaacaagaggctcttcatcctagaccaccatgaccatttcatgccgtacctcgacgagatcaacgagcttgaggggaacttcatctacgccagcaggaccctactgttcctcaaggacgatggcacgctgaagcccctggccatcgagctgagcctgccccaccctgacggccagcagcgcggcgcggtcagcaaggtgtacaccccggctcacaccggcgtcgagggccacgtctggcagctcgccaaggcttatgcctgcgtaaacgactctgcctggcatcagctgatcagccactggctgaacacgcacgcggtgatcgagccgttcgtaatcgcgacaaaccggcagctcagcgtggtgcatcccgtgcacaagctgctgagcccgcactaccgtgacacgctgaacatcaacgccctggcacgccagacacttatcaacgccgcggcgtcttcgagcgcaccgtgttccctgcaaaagtacgcgctggggatgtcggcagacgtgtacaagacctggaatttcaacgaccagtctctcccagcagatctcgtcaagagaggtgtggctgtgccggaccagtcaagcccatatggtgtccgactgctgatcaaggactacccctatgccgttgacgggctcgtcatctggtgggcgatcgagcggtgggtcaaggagtacctggacatctactaccctaacgacggcgagctccagcgtgacgtggagctgcaggcgtggtggaaggaggtgcgtgaggaggcgcacggcgacctcaaggaccgagactggtggcccaggatggacaccgtccagcagctggctagggcgtgcacgaccatcatctgggtggcatccgcgctgcacgcggctgtcaactttgggcagtacccatacgccgggtacctcccgaaccggccgacggtcagccggcgcccgatgccggagccaggcagccacgactacaagaagctgggagcggggcagaaggaggcggacatggtgttcatccgcaccatcaccagccagttccagaccatcctgggcatctcgctcatcgagatcctctccaagcactcctccgacgaggtgtacctcggccagcgtgacgagcctgagcgctggacgtcagacgccaaggcgctggatgcgttcaaaagattcgggagccggctggtgcagattgagaatcggatcaagacgatgaacgacagtccggacttgaagaaccggaaggggcctgtggagatgccgtacatgctgctgtaccccaacacgtcggacgttaccggcgagaaggccgaggggcttactgccatgggcattcccaacagcatctccatatgagcctgggcagattgtgtctcgtagtaaattgttgtgctgcgccgtgcgatgtgtttcttcattggttttgtcagtctcagggtaggggatggagatcataccatgatctttgtagggttgagagaggagtccacgcctgaatattgttgtcatgtatgttattcttggttaataataaagttcgtcagctc

SEQ ID NO: 1811 - DNA, 1172 bp, Zea mays
  Clone ID: 700203525_FLI
gttggcttgatggtagattcacagtgcatgtgaatgctgcccatatttgagcatgtgaatgctgcccatttatttgacatgttcaccaaggttgcaatggttcatatacgcattacggtaacccaagtagctaggcagctggcatcctctgctctgttattatttcttctggggcgagatgggtgcctacgaaaatgaagttatctccgttcggaggcttcattcatccgtacaagtcccggccgcatctgtcacagactggcttctctgccctcgagccgagaaagctttggcactgggtctgaccacattcgtgagaaagatggcatctgggctgtgcttgcatggctttctattattgctttcaagaataaggacaaccttggaggagataagcttgtcactgttgaagatattgtccgtcagcattgggccacatatggtcgccattattacacacgctatgactatgagaatgtcgatgctggggctgctaaggagctgatggcaaacctagtaagcatgcagtcatcactttctgatgttaacaagttgatcaaggagatccggtctgatgtttctgaagtagttgcagctgacgagtttgagtacaaggatccagttgatggctctgtgtccaagcaccagggcatccgatacctcttcggagatggttcacgactggtgttccgtctatccggaaccggttctgttggtgccaccatccgtgtctacatcgagcaatacgagaaggattcctccaagaccggcagggattcacaggaggcccttgctccactggttgatgttgcgctcaagctctccaagatgcaagagtacactggccgctctgcccccaccgttatcacataaatttttgaagagtgatttacaatgagttgaggcgcttacacaaattttcattcaagcctcttgttctatagttctacttcctgttgcatctcaccaatgaataaaatgtatgtatcagactcgccccgttttttttttgtccatgtactgcagtgcagcggactgagccgctggcacagcatgcggtaataatcttgtcacagtgacagtgctgtaatcgggagcgtgtttcttgtaatcttgttaggaagtgtttctggttttgtttgagcatttgcttatctttttttctgagtact

SEQ ID NO: 1812 - DNA, 2009 bp, Zea mays
  Clone ID: 700208627_FLI
actgctcagtccactgcccagcacggatctcatctcaccagctgcccgcgcatccaattcctctcgctggacggctgcagcacatcatcaggtgagaccgtgagagggaatgggatcaacaacaatgtcccctccatcttttcccgtcgtcctcctgctcctcctcctcgccaccatagccgcagccgccggaagcaacatggatgaggaggtggtggacgacctccagtatcttattgacaactccgacgacatccccaccaacgatcccgacgggtggcctgagggagactacgacgacgacgaccttctcttccaagatcaggaccaggacctcacaggccaccagccggagatcgacgagacccacgtcgtggtcctcgccgccgcaaacttttcctccttcctcgcctccagccaccatgttatggttgagttctacgcaccttggtgtggccactgccaggagctcgccccggattacgccgccgccgccgcgcatctcgccgctcaccaccaccaggcccacctcgcccttgccaaggtcgacgccaccgaggaaaccgacctcgcccagaagtacgacgtccagggcttccccaccatcctcttcttcatcgatggcgtccccagaggctataacggagccaggaccaaggaagccatcgtcgactggatcaacaagaagctcggcccagccgtgcaaaatgtcaccagcgtcgacgaggcccagagcatactcaccggagatgacaaagccgtccttgccttcctcgacacactatccggtgctcacagtgatgagcttgctgctgcttcgaggctggaagatagcatcaacttttatcagacttcgactcctgatgttgctaagcttttccatatcgatgcagcagcgaagcgtccatccgtagtgctgctgaagaaagaggaggagaagttgaccttctatgatggggagtttaaagcatcagccattgctggttttgtgtctgctaacaagcttcctttggtgaccacactaactcaagaaacttccccttctatttttggcaatccaatcaagaagcagattttactatttgctgttgcaagcgagtccaccaaatttctgcccatctttaaggaagcagcaaaaccatttaagggaaagttattatttgtctttgtggaacgagacagtgaggaagttggtgaaccagttgccgactactttggtattactggacaagagaccacagttcttgcttacactggtaatgaagatgctaggaaattttttcttgatggtgaggtgtcacttgaagctataaaggacttcgctgaaggtttcttggaagacaagcttacaccattctacaaatcggaaccagtgcctgaatctaatgatggggatgtgaaaattgttgttgggaagaatctggatctaatagttttggatgaaacaaaagatgtacttcttgagatatatgcaccatggtgtggtcattgtcaatcgctggaacctacttacaacaatctagccaagcatctacgtagtgttgactcccttgtggtagccaaaatggatggtactaccaatgagcatccacgtgcaaagtctgacggatacccgacgattctcttctatccagctgggaagaaaagctttgagccaatcacttttgagggggagcggacagtggtagatctgtacaagttcatcaagaaacatgctagcatccctttcaagttgaagcgccaggagtcgagaaccgagagcactcgggcggagggtgtgaagagctctggtacgaactcaaaggacgaactgtaaagagctcagggttggatgtgtgttggagtggatcagggtgaaagtttccatctcaatacaagtagatcgatcttggtggatgcgagtgcagtgttggcctgagggaggagcagcagagatgagtgcttactgcttagagagaggaatgaaatcagcaactaatcaaataaaatcaaattccattattcctttt

SEQ ID NO: 1813 - DNA, 2115 bp, Zea mays
  Clone ID: 700208656_FLI
ggtggtggtagtgtagagagccctgcccttccgatccggtccggtccggctggattcctcactttagttttttttttcgcttcttctctgatcagatgcaatctcgccgttgccgtccgtagcaaccgcacgcttcctcgctcgccgcgaaccctagagagcaggtgtcggtgtcgcggctcgaccatggccttctggtggccgctgctggtgctcgccgccgcatacgcgctctgtcgcctgctcctcttcctcatcccgcccaccgtcccatccatcgacgtcgacgcctccgacgtgttggccaaggaggacagcttcatctacataccgagacggggtaaatcaactcagactgacaaggtccaatgctatgaaccagcgaccatgaaatacttggggtacttcccagtggtgactcctgatgaggtcaaggaacatgttgcacaatccaggaaagctcaaaggatatgggcaaaaagcagcttcaagcaaaggcgccagtttcttcgaatcgttctcaagtatatacttgaacatcaggatctcatatgcgaggtatcatctcgggacactggaaagactatggttgatgcttcattaggagagataatgaccacctgtgagaagattacctggcttttggatgagggcgagaagtggctgaaacctgaatacagatctactgggagatcaatgctgcataagagagcaaaagttgagttttaccctcttggagtgattggtgcgattgtatcttggaattatcccttccataatgtttttaatccagtgctagcagcagtattctccggtaatgcagcagttataaaggtctcagaacatgcgacttggtcgggctgcttttattttcgtattatacaagcagctctttcagctgttggtgcacctgagaatctggtgcacataataactggttttgcggaaacaggccaagctcttgtatcatcagtagacaaaataatatttgtgggatcaccaggtgttggaaaaatgatcatgaaaagggcgtcggagactctaatacctgtaactctggagcttggtggcaaagattcatttattgtgtgtgaagatgtagatttacccagtgttgttcaagttgctactagagctgctctgcaatctagtgggcagaattgcgctggtgctgaaagatttatgttcacgatgacatctattctgctttggttcacagatagtgaaaacagcaaatctataagtgttggccccccattatcaggcagatatgacatgggtgcaatctgtatgattgagcactctgagaaacttcagaatcttgttaatgatgctctagacagaggtgccgaaattgccgtcagagggagctttggcaatcttggtgaagatgcagttgatcaatttttcccaccaactgtcctggtgaatgttgatcacacaatgaaaattatgcaagaagagacatttggacctattataccaatcatgaaattcagttctgatgaagaggctatcaaacttgcaaacgactcaaaatatggtcttggctgtgctgttttttctggcaaccagaagcgtgccatcagaatagcgtcccagttacactgtggggtagcagcaatcaatgattttgcttcaagttacatgtgccagtctttgccattcggtggtgttaaagacagcggattcgggagatttgctggcgtagaaggcttgcgagcttgctgccttgtgaagtctgttgtagaagatagattgtggccatatattagaacagtgatcccgaagcctatccagtatcccgtctcagagcatggatttgagttccagcagttgcttgtggagactctgtatggctatagcgtgtgggacaggttgcggtcccttgtgaatcttataaagatggttaccgagcagaattctgccccggcttcaaatgcgaccacgaagaaaaggcgatgagacgaatgcccggggggttcattgaatctgtttatggtaagtctgatctctggacgctgtaaacctccccaagctgctgtaatcggccttgtttgctctctgaaacaatctcgagcctgggagcttgtgtattcaagcgctttagctttc

SEQ ID NO: 1814 - DNA, 1114 bp, Zea mays
  Clone ID: 700167464_FLI
acgtatgaaccttacctgtgggagaatgagaagcaatcttacaagcgttatgttgttctttttggttttttggtccaattgaatcacaagtacactagtactgtacaaaaattaccaacaaaatcaaatacagattcaaatatcatgaggtgctctcaggttccaagattcaagtacctaccaatcagtgccccggttatatcatcaagatcacacaaatcgtcactacagtcgccgtctagtgactccacatcgaaaaatacttggaaatcctattcaaatggagatggatctagtacaccagattttgatgataatgcaagtcttgttggtgctgctccgttgcttaagtcatttgttacccaggtggggagcaaatttggggagaacacatcgagatgggggtccatgctctctgacgggcaggttggtaagctaagtgacatccttcctggaccagcagctgggtttttctcttctttcacatctggagctcgatatgattcatagtaattgcaccatgacccttgatctttagcccttactatgcgtcgtatggaaacccacatgtgtcatcaagagaacagaagcactgttggcaggtgtagtatgcctttggaaatctgttgctcacagaatgattccacaatgctggtcccgtgttgcttggcatatcctgccgcgcctcttcgcatcttattgtgactagacagtgtcatggagaagttcaggaaattatgatggaaaagatgagatttattctgtatcggctgcccacaggttgaatgagtggttagggaaatcaaaagtttggtttcaccgtatttcctgcttgcaatttaacttggtacataggacagagaagtgcaactcgccgcggatgcctgcctcacttttttggggggaatcatgttgtggatacacggcacttgaagttgtgaaaagaattttgaggttccattctttctttcttatctttggctcggcgagttgactgattttctcatcggaacattgccggaactgtgaggttgcggttttaccatgtagggaaatttgcagaatgtgtacactggaaatataggaataataaaagtctgtatcatgcattcag

SEQ ID NO: 1815 - DNA, 1138 bp, Zea mays
  Clone ID: 700167489_FLI
ctgctgcttcagcagcagctgttaatttcaaccgccatgatgcatccaccacgcttcagagcgcagcaacatgcatacctcctccaacaacggtccggtcagtgtcgatgagggacatgggcacagagatgacgcccatcgcaagccaagagccgtcccggaccgggacgccggtgagggcgacgagtccaaactgctcccagccaacgactccacggcggacgctcggcggccccagcgcagtcggctccttcatcagccacggaggagaatgcagcagctcggagctgagcgagcaggagctgcagaccaaaaccaggagggagatcatgctccttggcacgcagctaggcaagaccagcatcgcggcatgggcgagcaagaaggaggaggagaaggacgcctcgctctcgctgaaaccggtgcccatggaccagtcgacgcagaacataaccgcgatccgtgcggctgcgtgggaggaggcggagaaggccaagtatttagcgagattcaagcgagaagagatcaagatccaggcttgggaggaccatcagaaagcccagatagaagctgagatgaggaaaatcgaggttcgcagactgttttctgttcttctgttcagtttgccatagatgttcaggttcagaagaacatacaaaaccaaagggtgcagcgcggagctgtgtttgtggatactgcattgttggtatcgatagttttaaccatggcccgtgctttgcgttcctttcctcaaggtcgaggtggagcggatgcgtgcccgcgcgcaagacaagctgatgaccaagctcgcgtcggcgaggcacagcgcagacgagaagcgtgccgcggcggagctgaaacggaaccgtgcagccgcgaggaccgctgagcaggcagagcacatcaggaggacggggcgggtgccgccgtcgtttggctgctggaactggtgctcatgaagtgcccatggaagatgagtcgcccgttgagaatgagtcgcttgtaagctgttgtaactatatatatatatatacacacacacgcgtatgtaagatgtgagatccatgcgtcctgtgctgtggtggttactgtgtaagtgtaacagatgtaccgaattcaaggccgagcttggattcct

SEQ ID NO: 1816 - DNA, 526 bp, Zea mays
  Clone ID: 700167535_FLI
gcagcgtgtggtacacgtccttctacaacactagtactgcaacttaaatttaagaacggccagctactggatttgaactaagacttcggtacattttattttctggtcctgataatcaatccatctcgcttctaggtgatgctttcgttggaggcttcctctcacagttggttctaggcaagggcattgaagactgcgtgagggcaggttgctatgccgcaaacgttatcatccagcgcccgggctgtacttacccggagaagcctgacttcaactagtgcaaaaactgaggcacgtcatgagagggactgttataggcacacttaattgttaaccagtgcgtggttcggtgtctacacaccctgtattcttccgaggcttctcttctgatccggccaatatttttgccgtgaaatttgtgttctgcgactatggacgtctcctttgtcgctgtataaggcatgatttgccatcattctgttgcttcggtgatgcttgcaatgcaatgagaatgtgttggaacgat

SEQ ID NO: 1817 - DNA, 1215 bp, Zea mays
  Clone ID: 700167601_FLI
tcggggatgcccgccccggggacttcctcttcttccactacagcggccacggcacgcgcctgccagccgagacggggcagcacgacgacaccggctacgacgagtgcatcgtgccctgcgacatgaacctcatcacagatcaggatttcagggaactcgtgcagaaggtccctgaaggttgcctattcaccatcgtctctgactcatgccatagtggtggcctgctggacagtgctaaggagcagataggtaatagcaccaagcagaataagacccagtcccgtgaacctgatgagcctcgtcattctggttctggcagcggcttccggtcatttctcaaagagactgtccgcgatgtgttcgagtctgaggggattcacatccctcatagtcgtcgccatggggatgatgaccaggacgacggttacgcacagccaactggaaatggccgcaccaaaaaccgctccctgccactctcgaccctgatagagatgctcaaggaacaaactggaaaggatgacattgatgtgggttctatccggatgacgctgttcaacatctttggtgatgatgccagcccaaagattaagaagttcatgaaggtcatgctcggaaagttccaccagggccagtcaggtgagcaaggcagtggtggtggtggtgtctttggcatggttggtgcccttgctcaggagttcttgaaggctaagcttgaagggaaggaggaagaggctttcaaacctgcattagagcaagaggttcacagtgttgacgaggtgtacgccgggagtaaggcctgggcaccaaacaatggcattgatcagtgggtgccagactaaccaaacatcagcggatgcaactacaccgcagggtgtctcctttggtgctctgagcaatgctatccaaaccattcttgcagacaagcacgggaaggtgacgaataaggatctcgtgatgaaagcacgtgagctgctgtccaagcaagggtacactcaacagcctggactatactgcagcgatgagcatgttcatgtcgctttcatatgctaaaacttggattgttacagcgattgctttcctccatccttttgtgttgatcggtgcaccagaggttgatgtttttcttcccatgtatgttacagctatattgtatcagtgtttgttgcttgaggatatgtttcaatggactatgtcaatattgaaataacttttgag

SEQ ID NO: 1818 - DNA, 598 bp, Zea mays
  Clone ID: 700167615_FLI
ttttgtttcttcttatagggcatattaggacttggaaaagtctataaaaacgtagttcgatcaccagtttttcataaagtatactggtctacataaatttagaattatccaattttgagccttgttaaagaggcaccaaatgatccccgataaactaatataatgctgaattctgtttttctcgccctttgtttcatattgttagcctctgtccatctaatctaattacacaggctcgtcgttaaatttaagtctatgatggtaatcatggaagttaatttggcaatggaatatacaagccaatggagtgacggatagcatactctggagacagtggtgggtctagaaattatttagagcctgggtgatcgtcactgctctaggtaattatctagaaaaatactatgcttacccttttcgacaaataaagtcctctacgctttgccggtggacaaataattcccattttattttgaactgtaaatgtgggattatgagcattgtgatgttatccaatgatgcctgattttacgttattatgtgaaacaataacgattcacatacttgattacgttggaataagagatgttatctaaat

SEQ ID NO: 1819 - DNA, 1108 bp, Zea mays
  Clone ID: 700167617_FLI
ctccggcgtgttggtcgacggcggcgcagatgacgaccctcgatctgatgggagggtacgggcgggtggacgagcaggtggccatccaggaggccgccacggcggggctgcgcgggatggagcgtctcatcttgcagctctcccaggctggcaccggggagcggtcgttgtccccaccggcggtacaggcgcagcgccagcagcagaagcagctggagcagatccagcagcaggttgactgccgggagctcacggacatgacggtgtccaagttcaagaaggtgatctccatcctgaaccgcacggggcacgcgcggttccggcgtggccccgtggcggcgcggtcgcagtcgcagtcgcagggacctgcctcccccgagcccgcgcaatcggcgccggctcccgccgcgaggcccctgacgctggacttcaccaagtcggtgtccggttacagcagggactccgggttcagcgtgtccggcgcgagctcgtcgttcctgtcgtcggtgacgaccggggacgggagcgtgtcgaacgggcgcgcgggaggctcgtcgttcctcatgttcccaccggcgcccggcgcggccagctgcgcgaagccgccgcccgccggtgcggcgcagaagcgcaagtgccacgaccacgcgcactcggagaacgtcgccggcggcaagtacggggctaacggcgggcgctgccactgctcgaagcgcaggaagcaccgtgtgaagcgcacgatccgcgtgccggcgatcagccccaaagtggcggacatccccgccgacgagtactcgtggcgcaagtacggccagaaacccatcaaggggtcgccctacccacgcggctactacaagtgcagcacggtgcgcggctgccccgcccggaagcatgtggagcgcgaccccgccgacccgtcgatgctgatcgtcacctacgagggcgagcaccgccacagccccgcctccggccaggacccgccgccgccgtcgctcgcgccgctgccggagctgcccagccattgatttggcttcctgcctgctctgtcctgtcaattactagtagctgttgtcataagttataaaatcaaaatcgccagttcagtttt

SEQ ID NO: 1820 - DNA, 1315 bp, Zea mays
  Clone ID: 700167620_FLI
gtcaggagaaggtctcagcatggacgatgagagggctcatcacagcaatccgaagctctaggctgtcaaccatatctaatactatcgagagctttgatgatgtagatggcatggaacagaaggataaagaaataaatagtgaatgggaggccaaggccgcggcgtatgccatattcaagaatgtcgcaaagcccagctataagcacattgaggaggtggatctgctgagatttttcaccaaggaggaggtgcacctggtgattccaatgtttgagggagcaccagagaccggaaagataaaaaagtctgcactaaagaattgggtggtgaaagcatacctcgatcgcaagtcactggcacattctctgaacgacacaaagaccgcagttatgcaacttcacaacctcatcagtgttatagtcatcattataatcatcattgttacactactattgatgggcattgcgacaaccaagattcttgttgtcatctcgtcccagcttctggttgcgggattcatatttgggaatgcatgcaagactgtatttgaggcccttatatttgtattcatcatgcatccatttgatgttggtgaccgctgtgttatcgacggaacacagatgatcgtcgaggaaatgaatatatattaaccactgttctcttgaagaatgacaacgaaaagatatattatccaaattctgtgttgtccacaaagccaatcagcaacttttaccgaagccctaacatgtatgacacgattgattttgcaattgatgtttcaacttcagttgagagcattggagctttgaggtccaaaattaaagggtacttggagagcaaaccaacgcattggcacccagtccacactgtaaatctcaaggacatcttggatgtgaacaagattaacatgtctctctcagtgcagcacaccatgaactttcaaaacatccgggagaagaacatcaggaggtctgagctcgttatggagttgaagaaaatattcgaggagatgtccatccggtaccaccttctaccccagaaagttgaactcacctacgtcggctcgaacccactgcccatgggtccttctcatacaagatagaggatgggtgaagacttttaagtctcatattgacaacttgatccatttcatgggatctgacaactgatggctagctgtgcagtctgttctgaagttagtaaaactctgcatagtagatattagctcgtagaataatttatcagataatgcatttgtaagcggtgatggtactggtgatcaatgctttgggattggccattacaccatttgatt

SEQ ID NO: 1821 - DNA, 2025 bp, Zea mays
  Clone ID: 700167678_FLI
agcgcaaacacacaagaagggcggagctgttgtcatcatcctgacaatgggcgcgcgtcgtggtctccggcgaggccaagccgccgtcgccgccgtcttctccgcatgtcccttcctcgccctcgccgtcctcctcgccttgccggagctcgcagccggcgacacccactactacacgttcaacgtccaaatgaccaacgtgacacggctgtgcgtgactaagagcatcccgacggtgaacggggagttcccggggccgaagctggtcgtgcgggaaggcgaccgcctcgtggtcaaggttcacaaccacatcaactacaatgtctcgttccactggcacggcgtccggcagctgcgcaacgggtgggcggacgggccgtcgtacatcacgcagtgcccgatccagggcgggcagagctacgtgtacgacttcaccgtcacggggcagcgcggcacgctgtggtggcacgcgcacttctcctggctgcgcgtgcacctctacggcccgctcgtcatcctccccaagcgcggcgagggctacccgttcccgcgcccctacaaggaggtgcccgtcctcttcggcgaatggttcaacgcggacacggaggccgtcatcaaccaggccctgcaaacaggcgccggcccaaacgtctccgatgcctacaccttcaatgggcttccaggcccgacatataactgctcgtctaaagacacgtacaagctgaaggtgaagcccgggaggacgtacatgctccggctcatcaactccgccctcaacgacgagctcttcttcggcatcgccaaccacacgctcaccgtcgtcgaggcggacgccagctacgtcaagccattcaccgtcagcacgctcgtcatttcaccggggcagaccatgaacgtgctcctcacgacggcccccagccccgcctccccggcctacgccatggcgatcgcgccctacaccaacacgcagggcacgttcgacaacaccaccgccgcggccgtcctcgagtacgccccgacgacgaccaggaacaacaccctgcctcccctaccggccctgccgctgtacaacgacaccggcgcggtgtccaacttctcgcgcaatttccgcagcctgaacagcgcgcggtacccggcgcgcgtgccggtggcggtggaccggcacctgctgttcaccgtggggctcggcacggacccgtgcccgtacaccaaccagacgtgccagggccccaacggcaccaagttcgcggcgtccgtcaacaacaactccttcttccgcccccggaccgcgctcctcgaggcgcactaccggcgccgctacgccggcgtgctcctggccgacttccccacggccccgccgcacccgttcaactacacgggcaccccgcccaacaacacgttcgtgcagcacggcacgcgggtggtgccgctccgcttcaacgcctccgtggagctggtgctgcagggcaccagcatccagggcgccgagagccacccgctgcacctgcatggctacaacttcttcgtggtcggccaagggttcggcaacttcgacccggtgaacgacccgcccgggtacaacctcgccgaccccgtagagcgcaacaccatcagcgtgcccaccgccggctgggtcaccgtccggttcctcgccgacaacccgggcgtgtggctgatgcattgccacttcgacgtgcacttgagctggggcctgtccatggcgtggcttgtcaacgacggcccgctgccgaacgagaagatgttgcccccgccatccgacctcccaaaatgctgatgacgactggtcgtttatcacccgatcgaggggtagatgggcatttaggaaggttctcctgcttcctgcacgtctgcctacttcctttccttacgatgtttggaactatttggtttggactatttaattaccgtgtgccgatttttggcgagtgcttggatttcgcgatcctcgctgaatccccttttgaaacatgttaatctgtatctatgtaacgacaacgtttgttc

SEQ ID NO: 1822 - DNA, 562 bp, Zea mays
  Clone ID: 700167763_FLI
caaaatttcgagtgagagaagcacatacgctaacagtctccagccagccagccatccaccgtcctctcctctcctcatctgttgtgtcggccggcaggggcgcgcggctgctgaggtaagtagtagcgcgatgggcaaggtgtgctgcagcaaggaggcgcaggaggaggccgggatcgacctccttgggctgctggtcgccgccatcatcgccctcgtcctcatgctcctctgcacgacgccccggaggcgctgcgtcgccgtctacccgtgctgctgactgctcagcggcgctcaagcctctctctgtctatatcgatcgcatgcatgcagcagaacagtgcaggccaggcagcaggctgcaggcatgggctcctcatctttttttggttcaccaattaatttctactcggctgtaataatacccatcctactgcaagtcatgtactaaaatatatccatcctaatgcaaagccatctctagcctgaatccgttgctttttgggtagccggcctgaactgaaaggtggtggtggtggtggtaccacatattattgcccac

SEQ ID NO: 1823 - DNA, 1497 bp, Zea mays
  Clone ID: 700167768_FLI
gccgcccagcggatctcggggcgccggcgctggcacaggggaaggtggtgtctgcgccttcgtcgcccgcggttgtgtctcctgccgccgggaagaagagccggcgggggcccaggtcgcggagctcgcaataccggggcgtcaccttctacaggaggaccggccgctgggagtcacacatctgggactgcgggaagcaggtctacctgggtggatttgatactgcgcacgccgcagcaagggcctatgatcgcgctgccatcaagttcagaggccttgacgccgacatcaacttccagttgaaggactatgaagatgacttgaagcagatgaggaattggactaaggaggagtttgttcacatactccgacgtcaaagcactgggtttgccagggggagctcaaagtaccgtggtgtgacactacacaagtgtggtcggtgggaagctcggatggggcagcttctcggaaagaagtacatctaccttggtctatttgacagtgaaatcgaagcagcaagagcatatgatagggcagctattcgcttcaatggaccggatgctgttacgaactttgattctgtttcctatgatggagatgtcccacttccacctgcagttgagaaagatgtggttgatggagacatccttgatctgaatttgaggatttcacaacctaacgtgcatgatctcagaagtgatggtaccctgactggttttggattaagttgtaattctcctgaagcttcaagctccattgtttctcagccaatgggcccccagtggcctgtccatcctcacagcagatcgatgcggccccagcatccacatctgtatgcatctccttgtccaggcttctttgtgaacctcagggaggcgcctatgcaagaagaggagaaccggtctgagccggcgtgtccccagccgttcccctcctggtcctgggcatggcaaacgcagggctcccgtgccccagttctccctgccaccactgcagcatcatcaggattctctaccgccgctgccaccggcgtggacgcggccacagccggccacagcgtgccgccgccgtctggtagcctccggcagttctcgggctaccaccagctccgcttccccccaaccgcctgacggagacagaccacctcctgttgagttggcggcggcggcggcgtctcatagctggccggtggttggctggctgcccatgcaacgccacgccggtgggtgcgggtcggtattcggtaacagtcgccactgttgggtatggttttgtgggactacagaggatgcagtgatctctcgctgctgctgtgtgctgtctctctcgctccctctacccacccacacctgtttgtaatatgaatttatcgccctctcgcgctcgtgattcgtccatcttcgtttcgttttgatggccaccggatgggatcatgagcgtgttgcgagaaattgtgtaataaaccatgcgtatttttatttatatttatttattgtg

SEQ ID NO: 1824 - DNA, 1062 bp, Zea mays
  Clone ID: 700167786_FLI
ggggacctggttccagcactgtgaaagctgcacagcgcaaaggtcaatctgctgtacccatgaagcagggtgattggaattgtcccaagtatgtttgaaaagttaatatgtgtctctatcgcctatcccccctggtcataatgccttgcattcactgtcagatgtgactttctgaactttgcaaagaatatcaaatgtttgcgctgcgatggagaattccaagagaggtatcagttgttgcatgaagaccgagagcatctgcctctcaaaaagggtgactggatatgcaaaaggtgtaactatgtgaacttcaagaggaatgggttctgcttgaaatgtggctggaaaagaccaaagtctctaaacagtcaaaatagtgtcgaattgtgtcatgatttagagcatagtaagaatccacgtatttcatttgttcaagatggtgtccagatgaaggggtggcaaagtctgcaaaagaagggttcaccatccgacacagatttggatttctggagtgcagacgacgaagagggtggtagcagggataatgatacgctgctgcgacagaaggactacagatttcttgagagttttcccattgtcggtggcaggactgctaattcccaagatcttcttgcaagggagaagtggaaggatgaaatgtccaggagagataaaggccttcaaactacggaatcgcaagaaagcaatcggccttctagccacggccgtcttccaagaagcatggagctggttgactctgatgatgatattgcttcttggttttcgggtggggataataataataggaacctggataaggtataaccagatcttgtaagtggatgcagctcatcaataaaagttgcatcctttggaattattgaaattcaggcaaaaagaattattaaagctcactggagaactgtacaatttaatgtttcggaactttgtttatgggctgctcagagatgatatgattttttgcaaggggcttgtgcctgctgtcatgcaattaagttttggggaccaaactagtatgatataactaaggctatctctagc

SEQ ID NO: 1825 - DNA, 1125 bp, Zea mays
  Clone ID: 700167871_FLI
caggcacattgatcagatcatactatgcagcatatatggagttgccaagatctctcaactgcaactttcattcaaggagattgtttttgcgtataggaaacaacctcaatgcaagccacaagtttttcgaagtgtttatgttcattggcccccaacaagccataatgggaaaacaggagaagatcatgttgatattatcactttctacaatgaagtatttattcctgctgtcaagcctttgttagtggaggttggacctggtgctagtccaaagaggaaagaagagggaaaagtaggtccatacccagaatcccctcggctagctcggtttccgaaccttcctgacatgtctccaaagaaggtttctgctactcataatgtatatgtctcgccactacgatcatcaaagatggatactttactctcaccaagcccaaagagctattatgcatgtgtaggcgagagtacctatgcgttccaaagcccctccaaggacctgaaggctatcaacaaccgcctaaatagtgggaagaaagttagcggacgattgaacttcgacattgtcagcgatctggtcgtcgccagtagcctcaacggcgttcaaaatgccaagcccgcagccacggaagtggttcccaccaagacacctgtgaagtgcgagccatctgaatcgtgatctactctgatgctgcatcaccaatccagtgtaacttattataaatggttaggtgtcagatgctctgatttaggagtgtttgaatgcactagagataatagttagttagctaaaaaatgttagtggaattagctagctaactattacctaatttgctaaaagtagttgatagctaaaatattagctagactgtttagatgtctcaattttagcagctaactattagttctagtgtattcaaacattcccttagatattaggtggccttatttctgtttgtatttttgacatgtaaacatctttgtgagcagctctaccatctgtaaaatataagaaagctgctctaagagctcccataacccaactctctttgtaagagatagataagtacgatagtcatgtaactttataagttttgaaaaggtctgtaaatacaaatgatcattgtc

SEQ ID NO: 1826 - DNA, 1563 bp, Zea mays
  Clone ID: 700167886_FLI
cgctgaactttaccgctgtcgacaaactcatgaccaccacagctgtcgactgcttcacctcgtttgctcctttcctggccaatgtcatctgctgcccgcagcttcaggcaacactgaccatcctcatagggcagtctagcaagcagacagggtctctcgcattggatcccacggtggccaactactgcctgtccgatgtccaggagctgttgctgagccaaggcgccagcgacaaccttcacagcctctgctcggttcacctctctaatgtaaccgagggatcctgccctgttagcaccgtcgatgcgtttgagagcgccgttgattcgtccaagcttcttgaagcctgtcgcaagattgactctgttaatgagtgctgcagccagacatgtcagaatgcgataaatgaagctgcccagaaaatctcgtccaaggacgcaggtttgacgagctacaccgggagtcccaagactgacagctgtaggaatgttgttctgagatggttgtcaagcaggcttgacccacggtccgcgaaggaaatgctgaggcagatttccaactgcaatgtcaatggagtttgtcctctaagctttccagacacaagtaaggtggcaaaagagtgtggtggaacaatgacgaacagtactgcatgttgcaaggcaatgttaacttatgtagcccatttgcaaaagcaaagcttcataacaaacttgcaagctttaaattgtgcctctttccttggggcaaagttgcaaaagatgaatgtcagcatgaatgtctatagctcttgtcaaataacattaaaagatttttcactgcaaggtaagttattcaagacttatcaattgattacgcataagggtcatatttatcttctggctctgcattttgtggcaactgaactgatgaagtatttatttaccttttcaaccggtgtgtttgaatgactggcccctactggatttgcaaacagttggatctcaagaatctggatgcctccttccaagtatgccctctgatgcatctttcgacagcacttctgggattagcttcacatgcgatctgaatgacaacatcgcagccccatggccatcttccatgcaagcaccatcttcatcgtgcaacaagtctgtcaatatcccagagcgacctgctgcgacatcggcacaaagtggtgtgaaccacaagaacctaaagctaagactgcttgcctctttggtctcccttcttctggtgctcttggtacaagtttagcaaggtccagttgccctattatcgcgatgattcgttcaggagagctaactggaagtcagtgaagcgctgagttttttgcgatctcgcggtcgcatcgaagtgtagtaggtttcacgtgtattttattttattttattttttgaatctcctggtagcaattagtgtagtttgttgtaaggaatatatgtataatataatgatagtagtaacttatattcatttgtatagcgagaaagaacgtctggtggacggattccagcattgtttaacacaatgtttattgtttactaattgatgtgtttgatgttg

SEQ ID NO: 1827 - DNA, 1272 bp, Zea mays
  Clone ID: 700167912_FLI
gagaaacaagagctgtgcttctctgttgtctcattgctctggcagaagctcatagcttctcccgaaatgcagatgtctgcagaaagtacatcagctcaccaaggatggaggaaggttgtggatgcactttgtgatgtcgtttcagcctcaccaaccaaggcctcagctgctatcgttctccaggtcaagatattgctacattcgccgagaaggacttgcagccttggattgctagagacgacgaacaaggccagaagatgtggagagtcaaccaacgtatagtgaagcttatagcggagctcatgaggaaccatgacagccctgaagccttggtgatactcgctagtgcttctgaccttctacttcgtgctactgatggaatgcttgttgacggtgaagcttgtactttgccacagcttgagcttctcgaagtaaccgctcgagcagtccatcttattattgaatggggagatccaggtttatcagttgctgatggcctttctaatctgctaaagtgccgtctttcaaccaccatccgctgcctttctcacccaagcgcgcacgtgcgcgcgctcagcatgtccgtcctccgtgacatcctgaaccacggatccgtgagccccaacaagatcagccgaggggaacagcagcggaatggcatccagagcccatcgtaccggtgcgtggccgcaggcatcctcaactggcaagcggacgtggagaggtgcatagagtgggaagcccacagccgccgcgccaccgggctgacgctcgccttcctcagtacggcggcgaaggagctcggctgccctctcccgtgctgacgaggccgctcccggatctgatctgacatcggcggccacttgacggccagtgctggcagcttgctgcggggccggcgagtaggacgctaatctctcgaccaaggacgactcgccggtttgttcacgtgatatgtgatcaaactgatattagatggtcggcttgttcgctgcggcttgctgcggctgcaatccggctgcggctgcggcttctacagtatttttctctctatggattgcagctgcagcagtccaaacagctgcaacagtgtcggcttgcagccagccgaacacgcccggtgtttccaaagtatatatctactgggggcttgctcccatgatgcgattttattccaatctgacgtcagatgctttacgagcatatttaactgcttgagctgtacgtagcttgtattacttgtaactttgtgtaatatggttattattaccg

SEQ ID NO: 1828 - DNA, 1534 bp, Zea mays
  Clone ID: 700167917_FLI
cgatgatgatgtaagcgtactcgaatcccagacgatgaacaaagaaactgaactcgatgcgttgtttactgcgtttcttttttcccccttcttcttcacgtacatactgtactgctcttggtccaggtctcaaagggccagtaccactgtgacggatgtggaatatgtaggtaagcaccaccacgctgatggctacgtctaaagacttgacgcgcagaagtgtaaaacttctgtcagccgttcaaaactgataaattcgggttcctcgtcttcttgttgtttatgcagaaccggcggcgtggagaactttttccactgtgataaatgtggtgagtttctgcgcggacttctttctgctaagattctgtaaccatgctatgcagcaaagatttcactcgcgcccttattggtgtccttgttgccgtccgacagggtgttgctacagcaatgtcttgaaggattcccaccactgcgtcgaaagagcaatgcatcacaactgccccgtctgctttgaggtgagagacctccgtttcaacggaacattcactctgaatgttccaatctcttgatattgagaaggtttccctctgttttttttcacagtatctgttcgactccacgaaggacatcagcgtgctgcaatgtgggcataccatccatttggagtgcatgaacgagatgagagcacaccatcagtaagcatatataccgttctcttcggagctgagaaacggtgccacctcacaacatcctcttttagtcgcagtgaccttacagtctcagccctgtttggtctttggcagcttctcatgcccagtgtgctcgaggtccgcctgcgacatgtcggccacatggcggaagctcgacgaggaggtcgcggccacgccgatgcctgacatctaccagaagcacatggtaagaagccgaccgcccactcgttcgtcgtcccgttacatcttttccacagccatggctcgctgtttgacgagctctgaacctgtccggggtgccgattgctggaactgaacggcaaatgaacgctgtggtgtgagtgcaggtgtggatcctgtgcaacgactgcagcgcgacctcgagcgtgcggttccacgtgctggggcacaagtgccccgcgtgcagctcgtacaacacccgggagacgagggctgcgtgccccaggatctgaggcgaaccagaggccatgtcacaaaatgccagggagatgccgtccaacgatcatctgtctgcaggacgttgctgcgcttaaggttaaaggctagcgcgagaccaggcctggtagtccagtcttgagtttggtgctggagcatttgtaatgttccggtaaaatgtaatgcgtccatgagtgctgtccaggcagtaagcacacctgtggatcggggccggcgcaaggtccctaggcaagctgcaggattagtggggctattcatgtttagggcgcgaatgcaacgaaattacccgtgggccgtgggctcggtatgtaacagaaccgattatttctattacaataataacatgc

SEQ ID NO: 1829 - DNA, 696 bp, Zea mays
  Clone ID: 700167949_FLI
ctgaatatggttctcagttgtaacatgtatctaccggttcgttttggtcgactccttttgaatgcatacatgcccggattgcgttgagctggagcccgacaaacatgccaccgaacaagctgcaatttatactgaacaagctgtaagatcagaggcgtggtccggcatcgcgctggcggtggcgtcttgtctcgctgtctcatcccaccgctacgactataaagatcccgacgccggccgaagattagggtgttgtgggcgatgacgtccgccgtggcgtcaacacgcacggctgaggtgcgggcggccccgctgcccgggtcgttgcgccgacgtccggcctccggtgagcctcctcctcaggataatcggtcgcgacgataagataaggctccgcagcggaactggtcaagttggctggggccggcagggcagcgtcgcgtcgcagtgagccagccggtgatgagacaaatcggctccgatcctctcgatgatgattgatggataagatcagagtattatttatacagcccaactttgccttgggacgtacggcatctcactagtaaaataaatcttcagcaatgtgaaatcttcagaagcgatccagaaaataccttgttttggactttggagtgattttcgctcatataccagtaacaataataaaatactacatctatcttttttattttg

SEQ ID NO: 1830 - DNA, 639 bp, Zea mays
  Clone ID: 700167952_FLI
aaaaacaaaaaaaaaaaaaaatatttttctagatttgtactaagatgatccttgtacatattttcctccatgtgtgaatattcccggatggctgttggagggaggggaggcagggaaaggttgatttgttgtggggtttcagatgatggcatgccagtggggaggtagaagggatggccagtaaaacacaaaaggatcaaaggagacatggtatgcgaccagaccatgcatgaggtgtctagatgtacatagcgtctgtgtagtgtacctgtgtgttgtgtgtgtgtggaggtagagcgtggagaggcgaccatgtcggcgatccaagactggaagtaaagatgactggatttttttctatggccgcactgcaccggcggcggctcccggtgacgtttccggcaagaaggcctggagcggttccagaacaacatcatcgtctcgactctcgagtacttgtcattccaccgttcattctgttatttattatctggtattactgctctgtaattttctcaatgtatttccttattgatctcgtctgctctagctaggggccgggagcatctatgtaccttgcactactatgtgctactgtttctgctgataaggaaataattaagaccggccttgttaatt

SEQ ID NO: 1831 - DNA, 1071 bp, Zea mays
  Clone ID: 700168054_FLI
ttggatggaactctgaatagtggtgacttgcttgactgagctttttttcagttcttgctgcttctgatctactactgtatgagcttgttttcaggtgggctgccagggtgctggtgaacagcgtcgaagcctgccggcacggccgcaaggaggtaggactgccaagccatgtcgccacattctcgtcaaagaacgaggctgcttcgcttggggatagaccgttggctagaccaaacagcttcctcaacatgctggggatcgggtcgacagccttcgagcaagggaatggccgcgagattgaggtttcagagtccaagggcggctcgtctactcggcatctgtgcaacatcagcctgccatttaccggatcacataaggaccaccagtgggcgggcccagcaatcagaatgtcactcccgagtttcagcggacgtacagtggaccatcctgatcttctcaagtactcctgtcaagtagaatgcagggtgcgccctgtgaagcctgctaggatctggagtgcaagaaccacagagccccagcaggaaaaatccgacggcgaggtcagcagctccgggtccagcgtggcagccgacttggacgcccgaagccacagcatctcggtcctgttgtccaggcccatcttcgcgctcgagttcagctccctgaggatgcacgtcgacgctcccaggaccgttgttccgcaccgcgacgacaagaaagtcgggtactcgtccagcacttaaaacgtgatgaaggaaggagctgtgcctgtgcagtttctggttggaagcacaagaacccccgggagttttggccgcgtttgacccggttgcttgcgtgaattcgtgcagtttctggttgctttttactgcgcatcatattcgtttcttggttatttttttcttctctcccttggcggtattctttttcttgtttgtgaggaaatatgtcgggtatgcatagcatagcagagcacttgtttggttcaagattgcaagtagtttggttcctgttgcaacattgtcgcagagacttcgacgcatattatgtgttcgaagcagtaattttttt

SEQ ID NO: 1832 - DNA, 810 bp, Zea mays
  Clone ID: 700168111_FLI
gcaccagcccaggctgcaatgcggttggcatgatcgatcgtaaaatcctaggcatccagcatctctacggccgacctgtttatgcacgatccaagcaatgcagcatcgactcgccacaaaatgggccccttcctcctgatgctccatcttggtgcgaggccccttttgaccctgaagggcttcttagttccgtgatggccatcgtcacatgcttgattgggctccaatacggacacgtcatagtgcattttcagaaacacagggagaggatgatgaactggctaatcccttccttcagcatgctggtcctagccttcgccatggacttctttggactacacatgaacaagccactgtacaccctgagctacaccttaggcaccgccggcgccgcggggctcctcttctccggaatctacacgctggtcgacatctacgggtaccggcggccgaccgtcgccatggaatggatggggatgcacgcgctgatgatatacgtcctgatcgcttgcaacgtcctgcccatattcatccacggcttctactggaaggagcccaagaacaacctgctgaagttcatcgggattggagcgtgaggcgatggactgacgacggtacacgagtacggatattgtttaggagtctatttggacagagatagagaagcgcgtgcgttcagcaggccaagttttgctacacggccagtgctgcagctgcagcgcatcattgttgctgcacagagcgcctttctctgtgagctcttgtgtatatgataaaaaagagtgttgcatataatgacgacacgatttg

SEQ ID NO: 1833 - DNA, 1459 bp, Zea mays
  Clone ID: 700168115_FLI
gtttgaagattatttcttgaaacgtgaactgcttatgggaatctacgaaaagggatttgaaagaccatctcctattcaagaagaaagcattcctattgcgctgactggaagtgatattcttgcaagggcaaaaaatggcactggaaagactgctgccttttgcatttcggcacttgaaaaaattgatcctgaaaaaaatgctattcaagttgttatactagtaccaacaagggaactggctctgcaaacttcgcaagtctgtaaagagctcgggaagtaccttaacattcaagttatggttagcactggaggaactagcttgaaggatgacatcatgcgtttataccaacctgttcatttacttgttgggactcctggccgaatacttgatcttaccaggaagggcatttgtgtgttgaaagactgttcaatgcttgtcatggatgaggcagacaagctattagctccagagttccagccttctgtggaggcacttattcatttccttccacctagtcggcagctgttgatgttttcagcaacctttcctgtaactgtcaaggaattcaaagataaatatctgcctagaccttatgtgattaatctaatggatgaactgaccctgaaaggaatcacacaatattatgcttttgtcgaagaaaggcaaaaagttcattgcctgaatacacttttctcaaagcttcaaattaatcaatccattatattctgcaactctgttaatagagttgagctactggctaagaaaataactgaactcggttattcatgcttctacattcatgctaagatgttgcaagaccacagaaaccgagtgtttcatgattttcgtaatggtgcttgcagaaaccttgtgtgcacagatctgtttaccagaggaattgatatccaggctgttaatgtggtcattaattttgacttccctaagacatctgagacatacttacacagggttggccgttctgggagatatggacaccttggtttggcagtgaacttgatcacttatgaagaccgtttcaacttatataggattgagcaagaacttggaacggaaattaagacaatacccccacagattgacctgtccatatactgccaatgatatgtgacagtttcaatgagcatcggacacattttatttattttgagaacatctgtacatagcaacccatcaagtgagttctccaactaaggcgcaactatttcagaagctacctaaatggctacattcctttgtcgtcacacatcaatttctcccccattctcgtcgggttttgttttaatgccttgatgtcgtttgtaagcttacttggattagtagaggaagtgtttcctgtaggctctgatctggtactaacctgtttagctgaggacatgcacattgggtgggctgcttggggcccaaaactatgatgagatgagacattatcttacctcg

SEQ ID NO: 1834 - DNA, 880 bp, Zea mays
  Clone ID: 700168141_FLI
tctcttcttccacccggcggcagcgggcagcgcaggcgggcagaccaagtcgcctgcagagtgcagactgcagatacagtccgtgctctgacggagcaacaggagaagcagagcgagccgaggcggagtcgacaggcgagtggttccaccgaccgtctcccctgccgcaagcgaacgggtgagcggggcgccgtggatctgatgtccctttgagattctactctgcttctgttctccctacagcttggtgccttatcatggaggaagcggggaggggctgcggcttgctcaaggtggttgtgacgcacggccggaacctagccgtccgggatttcacgtccagcgacccctacgtcatcgtccacgttgccgacaagaccacaaaaacaaaagttatcaacagttgcctcaatccagtttggaatgaagagatgacattctccatgaaagaaccagtaggaataatcaaatttgaggtgttcgactgggaccggttcaagtacgacgacaagatgggccaggctttcctggacctgcagcctgtggcggcggcaaccaagctgcggagggcgctgcggctcacagctggcgagaccaacctgcggaaagtgaacccggacgccgacaactgtctgctctcagatagcttcgtgacgtacgccaacggggaggtcgcgatagatgctaggctgcggctgcgtgaggtcgagtccggcgagctgttcgtcactataaagtggattgaacctgacagcgccaacactggaaagcaagcggatcactagctagcgatgcattttgcttgcagcactgcaaatatgtaatatgacctgatgtgggctgatttatgaggattttttttaaatcgtatatttttatt

SEQ ID NO: 1835 - DNA, 838 bp, Zea mays
  Clone ID: 700168142_FLI
cacaaggataccttggtgtactattttgggacatgggaaagctgtcagttatgtgaggttcttggatccagacacacttgtctctgcatcaaccgacaacacattgaagatatgggatcttaaccagactaattgcagtggattatctaccgattcttgccgcctgactctgaatggtcataccaacgagaagaattttgtagggctatctgttcatgatggatacataacttgtggctctgaaaccaatgaagtgttttcttactacaaaactttccccatgccaataacttctcataggtttggttctattgacccgataactggacaagtgacaaatgaagacaaccagcaatttgtgtccagtgtttgctggagagggaagtcaaacatggtagtggctgccaactccagtggtagcatcaaagtgcttgagcttgtgtgaatgaacgagagtcatattggagaagaaggttctagtgttgccatgcgggcctgcgatgctttcgtgcccttggtgatgctctgatggccctgcttatccagtgtctgcaccctcaatggaagcactaaccattggtctgcatttcactgttttgacagggcactaaaagactcgactgctctatgcaagcatcctacaacaccgatcattggttattggaagctttgcttgaaactcacaagcaaactaaagttttttttttccaagagtatgatggcctcacctccatttttgtgtttggcattttgagacggtacctattcatcgtgatgcaaacttcttttgggctagaggtgcgcgggacttgctatgactgttaagagcaaacgatgg

SEQ ID NO: 1836 - DNA, 1305 bp, Zea mays
  Clone ID: 700168184_FLI
gctagctagagctagccaagccgcggcgtgcctccgctccggccggcccgcccctgtcagagcccccaccgccgctgccacctccgccagccgtcaccccaggcgttggatcggggccctctcgatccgcgcccggcgaatccagacggacccgcattggggttggggccccttcgatccggcgcttggtgggggtttggctgggagctccaggctgaggggacggggcggggggacctgatccttcattccgttcggatttcgcttttcccccgtggggtctcgactgcctgagggggaggaggacatggatttggcgtcggtcaacgaggagctggccgagatcgacgggcagatcggcgatatcctccgcgtattgcaaaatgggttccagaagctggagaagatcaaggatgccaaccgccgcagcaggcagcttgaagagcttacagataagatgcgagactgcaagagactcatcaaagacttcgagcgagttagcaaagctgaggctgagcatactgatccagcaacagcaaaaatgttgcatgacagaaagcagtcgatgatcaaagaattaaactcctacgttgctctaaagaaacagcaggcaagtgaaaacaagagaatcgatctttttgatgggccaagtgctgaagatggctttggtgaagaaaatgtcctgttagcatcaaatatgacaaaccagcagttaatggatcaaggcaatcaactaatggatgaaactgatcaagctattgcacgatctaagcagactgtccaagaaaccgtcaatgtgggcacagaaactgcagctgctctgaaagcacagacagaacaaatgagcagagttgttaatgagttggattccatccatttctccatcaaaaaggcatctcaattggtgaaagaaatcggtcgacaggttgcaactgatcgatgcatcatggccatgctttttctcattgttgctggagtcatagctataataattgttaagattgtgaacccacacaacaaggacattcgcgacatccctggcttggcaccacccgtcagcaggcggctgttgcgatagaggacaagtgaattgcatacctggtgtaaaaattgatgtggcgcggcgccttggcaagcccatctgtattctacgtcttgtaaaacgctgctccagtcatgtggtatattgctgtaaaacttctcatgggatccactcctactccttggctacacacagtgcgtatatgttcctcctagttcgccttcctgtttttgcaaaactaactctgaacggtgttctgttag

SEQ ID NO: 1837 - DNA, 723 bp, Zea mays
  Clone ID: 700168187_FLI
tggaggagtaaacaagaccgatacgatgaaatgaggaggaagaaggatgaggagcgtgaggcacaagagaggcaattggaagaagaagctagggcgcggaaagcaaaggaggaggctgctgctgctttagagtttgagaaatggaaaggggccttctctgttgatgctgaaggtacaacagagagtgagacacaagacgatggtcagggtttgctccacaactttgtggaatacatcaagaagcagaagtgtgttcccctagaggacctagctgcagagttcaggatgcgaacccaggactgtatcaatcggattgttactctggaaagcatggataggttatctggtgtgatggatgaccgtgggaagttcatctacatctccactgaagagatgaaggcagttgcagagtacatgaggaagcaagggagagtgagcatatcacatctggccaacaactcaaaccagttcatcgatctggagccgaaggcccagtacgaggtggagagccagcaggatgacagtgcagaagcaggcacagaagcatgagaattccttgtgacctggcaccatgtcgtgctcaatgatgttttgtagtgtgatgacttaacatggtttgagttgggcactggccatataatatatgcagtagtcggtataaacatacttgttctgacatgctagataccattaccccatgcagagaactcaggcttttgttct

SEQ ID NO: 1838 - DNA, 664 bp, Zea mays
  Clone ID: 700168195_FLI
ctgtgtccggacgcccggtctagcaactagcaagcgccgcatccctcgcctcttcccgacttgccccctcgattcgatccgagcttacttctagggttcttggccccgctccaccgtcgcccatggcagacgatgccaaccgagcggccttcatggagctgcagtcccggatgatagataccaccgcgaagatcaagcagttacaaacccaaatgcgttctaaagaaggggaaaagaagcgtgcctaccttactttggaggaacttcgccagttgccagatgataccaacacctacaagactgtcggaaaagtgtttattctggagccaaagtcagttctgttcaatgagcaggagcaaaagcttaatgacagtgagagtgcgatagcttcaatgcagacatccaaagactaccttgagaaacagcagggcgaagtggagaacaatattagggagctgcttcaacaggacccaggacttgcgcgtcagatcctctcaatgaccgttcaatgagagttgtttttctctccatttaattttttagataatttgtaatgtcgcagtttgatcagtcatgctgtggtcttgccttatctgtgagacatgtgcggtctgtaatttctgaggtgtttggctggtggaatgatgtggtccatcattatctc

SEQ ID NO: 1839 - DNA, 777 bp, Zea mays
  Clone ID: 700168203_FLI
gccgtttttcctcgttctcgatcccccctgccgcttccagctccgatcgatctgatccctccccaccaccacgcccatggcggaccaactcaccgacgaccagatcgccgagttcaaggaggccttcagcctcttcgacaaggacggggatggttgcatcacgaccaaggagctgggaactgtcatgcgttcactggggcaaaaccctacagaggctgagctccaggacatgatcaatgaggtcgatgccgatggcaacggcaccatcgattttccagagtttctgaaccttatggctcgcaagatgaaggacactgactctgaggaagagctcaaggaggcctttcgtgtgtttgacaaggaccagaacggcttcatctccgccgccgagctccgccatgtcatgacaaatcttggggagaagctaactgatgaggaggtagacgagatgatccgtgaggctgatgtcgatggtgatggccagattaactacgaggagtttgttaaggtcatgatggccaagtgagccacaaaagcataagctcaaggcggagaggattgtgcactgcatattagtcaagatgcaatgcaactcttatttcatcgaattccagtgaaacattctgctagttgtagtttttgaaaggcaatgcagttgctgctttgttcttccctccagtgtgttttcagaactgttgattcatgtgaaactgtaatgattgccctccctgctgtgtcttggttgcagttgaaaccatatgtagctacattccccct

SEQ ID NO: 1840 - DNA, 573 bp, Zea mays
  Clone ID: 700168244_FLI
aattctgaaatagaaaagttaatgtgactatatgccgaagctatatcccgctgcgagttgtgcagttgtgcactaaaacagtaaggacaagagtggagtcaatagctgacatgccagggacgaaagacaaagggtgcactggcaccagcctaaccggggcctttatacaccggatggtaccatattgcgcaaaggtttctcacttttgtcactgccacctacacaacccgcacaacttcactcttcaatgaggaaaactattgacatacatattgttttctcctcaaaaccatatatgaccagacctattcaaaatctggttcaatgctctccctgaataccaccagataccacacctcagcatgtcaaccgctccagtttgagccatcaattaatacattccttgaatatagttgtatctggatttctctgatgaccattccaagtgttcaaaatgcttccgagcagtaatccctagttgatcagttaaatcgtcagctcttctatttggctggatgggtcagtctgattagaggctcttgcttcttccatttcttcttcgctctggaactg

SEQ ID NO: 1841 - DNA, 1462 bp, Zea mays
  Clone ID: 700168322_FLI
cacacagaagcgaggagcactacttgttggttggattctcttcagtctagcagctagtccagttaagtttcagacacacatggggagcattggcagaggcacggccaactgcgccaccgtgccgcagccgccgccgtcgacagggaagctcatcacgatcctgagcatcgatggcggcggcatccgcggccttatcccggcgaccatcattgcgtacctcgaggccaagctccaggagctggacggcccggacgctcggatcgccgactacttcgatgtgattgccgggacgagcaccggcgccctgctcgcgtcgatgctggcggcgccggacgagaacaatcggccgctgttcgccgccaaggacctcaccacgttctacctcgagaacggcccaaagatcttcccacagaaaaaggctgggttgctgacgccgctgaggaacctgctgggcctggtgcggggccccaagtacgacggcgtgttcctgcacgacaagatcaagagcctgacgcacgacgtcagggtggcggacacggtgaccaacgtcatcgtgccggcgttcgacgtcaagtacctgcagcccatcatcttctcgacgtacgaggccaagaccgacgccctcaagaacgcgcacctctccgacatctgcatcagcacgtcggcggcgcccacctacttcccggcgcacttcttcaagaccgaggccaccgacggccggcccccccgcgagtaccacctcgtggacggcggcgtcgcggccaacaaccccaccatggtcgccatgtccatgctcaccaaggaggtgcaccgccgcaaccccaacttcaacgccggcagccccaccgagtacaccaactacctcatcatctccgtcggcaccgggtcggccaagcaggcggagaagtacaccgcggagcagtgcgcgaagtggggcctcatccagtggctctacaacggcggcttcacgcctatcatcgacatcttctcgcatgccagttccgacatggttgacatccatgcgtcgatcctctttcaggccctgcactgcgagaagaagtaccttcgcatccaggatgatactttgactgggaacgcatcgtccgtggacatcgccaccaaggagaacatggagtctctgatatcgatcggccaggagctgctcaagaagccagtggcgagagtgaacatcgacacagggctgtacgagtcctgcgacggtgagggcacaaatgcacagtcgctagctgacttcgccaagcaactctctgacgagcgcaagctacgcaagagcaatctcaactccaactaataaatacctctctcagtcacagcatgtgctctttccgcagattcaccgtttcttatttttaatttaatttcaattctgtgtgtgtgtgattgtgtgtgtgactgtgtgtgtaccaataaacatttaagttcaatcatttgcttgtctatg

SEQ ID NO: 1842 - DNA, 1107 bp, Zea mays
  Clone ID: 700168401_FLI
ctactatagctcctcatctcattctcaagtgtgtagccgagagagcgccatggccagcctccaagtcactcctacttcggcgttcactcagtggaatgagctgaagttcgaaggcctgtacttgttccacaagtaccagggctcaggcgccaaccaaactcaggtcataagcaacaaggcgccgattggcatcggtgccaccgtagttaacaactggacagtgtgtgacgggccagggccgaacgcaaagctcgttgcccgtgcacagggcttgcatatccaagccggcaactgggtcaactccttcagcctagtgttcgtggatcaaaggttcagtgggtccacgcttgaagtgaccgggatagtagttgaatccggggagtgggctattgttgggggcaccggtcagtttgccatggcaaacggtgtcatctccaagaagttacatgggaagaccagcgaaggggacatcatacaactcaccatccatgctttctgtccggtgctcggaccgacaaagcgctcggccacaaaagttggaccgtggggtgggagcggcgggtctccgatggacatcacggcagagccccagcgtctgaagagcatcaccgttgctactggcatcgccgtgacctcgattgccttctcctacgtcgactccgccggccaaacccaatctgctggtcgctggggcggttccggtggagaaactgagccggtgatccagctcggcgactccgaggtgctcacggagctgtccgggacgatcggcaacgtcgacggcctcaccgtcataacctccatcaagttcgtcacaagcctcaagacctacgggcctttcggagcatggggggacgggagtgacactccattcgcgatccccgtgcagcaagggagtgccatcgtcggcttcttcgcacgagctgggatctacctcgacgcccttggcgtttacgtgcgatccctgtgatgatgactctgacgacagaggcagctacctgctctgctccagtcaccctccgttttatttcctactgctacttgttgtgtcttgaataatttcgataaataaaggactccgccagagattggcacttgaatcgatcc

SEQ ID NO: 1843 - DNA, 890 bp, Zea mays
  Clone ID: 700168432_FLI
aaaccagatgttcgatttgttattcatcacagccttagcaagtctatggagacatactaccaggagagtggtcgggccggacgggatggattaccttcagaatgtattttgtattatcggcctggtgatgttccacggcagagttcaatggtgttctatgaaaactgtggcctgcaaaatctttatgacatcgtgcggtattgtcagtctaagaggagttgtcgtcatggtgcattctttcgccattttggagaggtccctcaggactgcaacggaatgtgcgacaattgtgcttccagtattgagcagaaggatattgatgtcacctgtatgatttattttgcatcagtttaaaaattacaacaaatgaccaacatttattcactttatttcagggggaaaatgttttttatttcatgatattctcacagtaattttttctacttcctgtttagaccatacaaaaattatagtttcacttcttcacgatatgcaacttaatgatcaaagagctacactactacagctggtggataagttcaagtcaaagtggaaaggtttaggtacatctcctcgacaaaatttttacgatgttgtaactttttattgatgtaattttacctcttttgttgatagagatggatagtcggcctgtgcctgccccctcggctcatgcccccaccccttgtttcccaccaatgtcggcgccacgcaacccccagcccctcgccagcaaccactctggcgatgacgaccaccctccccgcccaggcggcactggcttcctccccctccttggctctgtgtacttttttttctcgaacacgcaggagagctgtgtatcattaaattaagaaaggagggtccaaaaatagaccaattacaaatac

SEQ ID NO: 1844 - DNA, 674 bp, Zea mays
  Clone ID: 700168513_FLI
cttccagtgtccgccgtcgtgcgctcgctacccctctccctcgaggcctttgccggcgaagagcgcccagtcgcccaccaggatgaagtttgttgctgcctacctgcttgctgtcctcgctgggaactccagcccctctgccgaggacttgacagccattctggagtcagttggctgtgaagttgacaatgaaaagatggaactccttctgtcccaactgagcggtaaggacattaccgagctcattgctgctggcagggagaagtttgcttcagtcccatgtggcggtggcggtgtggctgttgcggcagctgcccctgctgctggcggcgctcctgcagctgaggcgaagaaagaagagaaggtggaggagaaggaagaaagtgatgacgacatgggcttcagcctcttcgactaagcctgtgcaatagtcaagagtattgtttttgagtcgcggaagcagagggaagaaaaatcgtagtcatgtttggactttaactttgttttatgttggaaagtacttgaaagacttttcctgtggtaattctaggcgtaggttgctgtgctggttggggtttactggtgaaccagagtttttctatctcccactatgaatttgttacctcaagttacctggatgttcactattttgttggtacatgtcgattttgcct

SEQ ID NO: 1845 - DNA, 700 bp, Zea mays
  Clone ID: 700168518_FLI
aacagccccgactgggctatattcgttctcccggcgtgctccgtctctcctctcagcgcgacgattacggtaacgccgtcgccgccctacggctcagatcttcgtcgtcatcttctccggcaacgagcacccaaagatggtggtccttcaaccagatcggttcctgagcgagctgacgagcatgtacgagcggagcacggagaagggctccgtctgggtcaccatgaagcgatcaactctcaagggcaaggcacagttgcggaagatggagaataaggggcaggaggtagagcacaggtgcctcgtccgcgcctccaatggcaagaagaacatctccacctcggtttctctaaaggagtacacaaagtttcaagcttcatacgcaacagttcttaaggcccatatgcatgctctgaagaaaagggagaggaaagacaagaagaagactgcagatgctgagaaggcaattgagaccgcacccaagaagcagaagaaagcatcttcaaagaaatcttcagggtccaagtcataaggcgctcacagaactcagtgtgtcttctcctttatgttgtttaccgccagactaattagagtgtcgtgaagttttacttatctggtttttattcgaattcgtgtctggaagatgaaagcctgtgaatacacctttatagagccgtgtcatcgatgctaacattttttg

SEQ ID NO: 1846 - DNA, 627 bp, Zea mays
  Clone ID: 700168541_FLI
agccggctcacaggcaagtccccattcccgcgccgccgtcgccgtcgctgatctgaaacccagcatatctcctgcttatcctcggttgtttgtccccgcgcacaggaaagtgttcgtcctcatggcgccgccgcagccgaagtcgggcctcttcgtgggcatcaacaagggccatgtcgtcaccaagcgcgagctgcctctgcgcccgtcccaccgcaaggggaaagcaacgaagagggtgtccatggtcaggggcctgatcagagaggttgctggctttgctccttatgagaagcgtatcaccgagcttctgaaggttggcaaggacaagcgcgctctgaagcttgccaagagaaagcttggaactcacaagagggcaaagaagaagagagaggagatgatgggcgtcctcaggaagatgagatcggctggtacgcacactgacaagaagaaataaagcatttcaagttcatgaatgtggcagccagagattatcaactgtgttttttccctacctctagaaactagacatggcaaagtatttttgaccgaaacattgtttgttagtaatgtattgaaccacctcgtggtattttgccccaacttccaatgcatcaatggtttgtt

SEQ ID NO: 1847 - DNA, 745 bp, Zea mays
  Clone ID: 700168569_FLI
gttgacaagtacagcacacattctaaaaacctggggaaagcagaacagccttcacttgacttgaacttagaacatagcaaatatgcaaatttgaatgagcaacttgtggaagcaagccttcgactcaggcagatgagaggtgaagaacttgagggattgagtgttgaagaactccagcaattggagaagaatctggaatctggtctgcatagggtgcttcaaacaaaggatcaacaattcttggaacagatcagcgacctcgaacaaaagagtacacaactggcagaggagaacaggcaactgaggaatcaagtatcccacatacccccagttggcaagcaatcagttgctgatactgaaaatgttatcgctgaagatgggcaatcctctgaatcagtcatgactgcgttgcattctgggagttcacaggataatgatgatggttcggatgtctctctaaaattagggctgccttgtgttgcatggaagtgaaaaaacaagatggtctgtgttgatctgggtggagctgcggcttcagcagataggcacttgtgttattgtcttatggacgacccccgactactgcaataatcttgcatcggaagcgagatcagttaacctgatttgtcatccttgtggcttcatgatgcgatgttgcgcttgtaccgtttgctaggatgttaactggactagaatcgtgtctacttttgtactgctcgtgaatcctatctactttgtgctatcc

SEQ ID NO: 1848 - DNA, 1491 bp, Zea mays
  Clone ID: 700168591_FLI
gggctgtcgctctcgctctcagacgactgggccgccgccgcttggtgctgaggctttggttggtctcttcggcggcgacgagcacccaccagcagttctgtagaaatggctgatggtgaggacatccagcctcttgtctgcgacaatggcaccggaatggtcaaggctggttttgctggcgacgatgcaccaagggcggtttttcctagcattgttggccgtcctcgccacactggtgtcatggtagggatgggacagaaggatgcatatgttggcgatgaggcacagtccaagagaggtattctcacgctcaagtacccgattgagcacggtattgtgagcaactgggatgacatggagaaaatatggcatcatactttctacaacgagcttcgtgttgccccagaggagcaccctgtgttgctcactgaggctcctttgaacccaaaggccaacagggagaagatgacccaaattatgtttgagactttcaatgttcctgccatgtatgttgcaatccaagcagtgctctcactctatgctagtgggcgtactactggtattgttcttgactctggtgatggtgtgagccacactgtgcccatttacgaaggatatgcccttcctcatgcgattcttcgtttggatcttgctggtcgggacctcacagactccctcatgaaaatcctgactgagaggggttactccttcacaacctctgccgagcgagaaattgtaagggacatcaaggagaagctggcatatatagctcttgactatgagcaagagttggaaactgccaagaacagctcctcagttgaaaagagctatgagctacctgatggccaagtaatcaccattggtgcagagagattcagatgccctgaggtcctcttccagccatccatgattggtatggaggctgccggaatccatgagacaacatacaattcaatcatgaagtgcgacgtggatatcaggaaggacctctacggcaacattgtgctcagtggaggttcaactatgttccctggaatcgctgatcgtatgagcaaggagatcacttcccttgcaccaagcagcatgaagatcaaggtcgttgcaccgcctgagaggaagtatagtgtctggataggagggtccatcctagcctcgctgagcactttccaacagatgtggatatctaaggaggagtacgatgagtctggcccggcaattgttcacaggaagtgcttctaggcttcgcaagttcctcatcgttgcctagtctcaagttatgtccccttcatttctcaagatacgtgtggcagatttgcatggtacggttcatttatcaagttatgcccaccccctctttgtatgttgtggctccatgtgcgagcacgctgtctgtcgtgacacctggttcgtcagatgttttgtcaaacttgcttggcttgattggttgtacttgtacctgtaagagctgatagttatatgaatggtttggac

SEQ ID NO: 1849 - DNA, 521 bp, Zea mays
  Clone ID: 700168602_FLI
cttgaaaagcgtgtacatagatcccagcaacgtcgacgactacctggtcggctccatcacggcgccggcggcggaccccaacgccggcgaggtgtactacaggctgatgtcgcggttcatgtcgaaccagagccggtacacgctggaccggctgctggggaagatgtcgtgcccgctgctgctgctgtggggggacctggacccgtgggtcggcccggccaaggccgcgcggatccaggagttctacgccgacaccgccgtcgtgcacctgcaggccggccattgcccgcacgacgaggcgccggagcaggccaaccgcgcgctgctcgagtggctcgcggccctcgacgcccgcgccaagtcggccgagcccagcctacagaccgtctgatggatcgagcgcaaggggcttagcgaatgctagtcaaagaatacaatttggtggcctatatctatagtttgatgtagtatgtcctgtagtaggaacagtaatttcttacggtgacttagtttactgttcc

SEQ ID NO: 1850 - DNA, 1217 bp, Zea mays
  Clone ID: 700168616_FLI
tccacctcctgtagctacagttccgctggggactggaaataacttgccatattcttttggatggggaaagaaaaatcctggaacagattatgattcggtcatatcatttcttcagttggtaagagaatcaagagagatgaacattgacagctggcacattgtcatgagaatggagagcccaaaagattctccttgtgatccaattgcacctcctgacttgcctcattctttgcatgcatttcgacgtatgccaaagacagatccacaagatatggagtattcttatacatatcgtgggggattttggaattacttcagtatgggaatggatgcccaagtgtcttatgcatttcattctcagaggaaactgcatccagagaagttcaagaatcagttgtccaatcagaaaacatacttgaagctggcatgcacacaaggatggttttgtgcctctttgtttcatccaatgtcacggaacattgcttgccttgcgaaagtgaagataatgaaaaaatctggaaaatgggaaaccatggaaattccacaaagtattcggtccattgtttgtctcaatttgcccagcttctctggtggactaaacccttggggaacaccaagtaagaggaagcaaagaaaacgagacttggtgatgcctccacttgtggatgatggccttctagaggttgtgggtttcaaagatgcttggcatggccttgtcttgctatctccaaaaggccatggaactcgccttgctcaggctcaccgtgtccgattcgagttcctcagaggcgcaactgatcatgcttacatgagaatggatggggaaccctggaagcagcctcttcccacggatgatggcaaagtcgtggtagagatctcccatgctgggcaggtgaagatgctcgcgaccaaagactgcatagccaaaggggtccatgaccatgagtcgtgcccagctatttcaacggttcatccagagtccatctacaacgacatgaacgatgacttcgaggaggaacggaggaactttggtgccgccttgtcgtttcgatacttgagtgatgtgaacaaacaataagaactcatgtttttattgagccttgggacaggttgcttgcatagggcgtagcaaagtagtttgatgcactaacttatgtaagattgtaagttgcccatgtaagataacttttgctggcaatacaacggattctgggttg

SEQ ID NO: 1851 - DNA, 1244 bp, Zea mays
  Clone ID: 700168647_FLI
caaccgaggaggaggcctgccaggttcgttgccggccgtgtgtttgttcgcccggccggccggcccgaccaaggggaagctgcagcctgctcgctcgatcgagctcttgcgtaggccgttgacgatgtcatgtggcccctgtgcgtcatctccgagaagctcttcaggatggcgggcgacgacggcgcgcagggggcgccgggctcgccgtaccccgacgggcggatttcactagcacgccgatcgtactacgtcgatgttccgcatgtgcagcaggccttcacctgggactgcggcctcgcttgcgtgctcatggtgctcaggacgctagggattgattgctgcgacggcattgccgatctcgagaggctctgccgtaccacgagcatttggacggttgacttagcatatctgttaaacaagttttcagtcagcttttctttctgtaccgtgacccttggagcaaatccacaatattctgctgaatccttttatagggagcaattgcaagaagacatcgatcgagtggatgagctatttgggaaggcgctcgatgctggaattagcattcaagtccatcaccgcatacgacattgcttttctactgttatctgggcactgcattgctattgctttagtggacaaatcgaagctaaatttgccctgcatgagtgatcatgatgtacaacagcacaacgatgagcctgactacatgggacactatgtcgtaatatgtgggtatgatgctgatgattgtgaatttgagataagagatcctgccagttccaggaaacgcgaacgggtgacaatgaagagcttggacgaggcccggaaatcctttgggacagacgaggacattctcttggtctctttaacaggaaagagtgggatgaagctgtcgcgtaagctacttgcctgctccatgtagataaataaataggtcactagcaaccttgtgaatacgctgtacatgtccctgtagtagttatgactgtcgagtgccagccctgtacgtagctgagaacgttctcgcagttaccgctgataacagcagtgtggtagtgagcttagtaggcaccctgtatgttggcccatgccgtcgccaaaccatggccgcgcaaaggggttcagcggcagcaaaaggctctgctgaccttgtaaacgagcaagtgttctatgtacgattgttaactgaacgtgtacagatctccggaaataagaattaaaatcgtgctcctctctgc

SEQ ID NO: 1852 - DNA, 1245 bp, Zea mays
  Clone ID: 700168653_FLI
caccactccactccctccatttccctcacctcccgcagcagctagccgccagccaacaaccgaaccaaccaaccaacccacaggccacagcgagcgagtaaagcgtccaatggtagcgatggcggccgtgcagcagcagcagcagcagcagcgccgcgacgcggaggcggagctcaacctgcccccgggcttccggttccacccgacggacgaggagctggtggcgcactacctctgcgcgcgcgccgcggggcgccgcccgccggtgtccatcatcgccgaggtcgacctgtaccgcttcgacccctgggacctgccggagcgcgccctcttcggccgccgcgagtggtacttcttcacgccgcgggaccgcaagtaccccaacggctcccgccccaaccgcgccgccgggtcgggctactggaaggccacgggcgcggacaagcccgtggagcacgggggccggacggcggggatcaagaaggcgctcgtgttctaccacggcaagccgccgcgcggggtcaagacggagtggatcatgcacgagtaccgcctcgccggcgacgcgaagaagtccggcgccggcacgctcaggctggatgactgggtgctgtgccgcctgtacaacaagaagaacgagtgggagaagatgcagcagcagaaggagaaggagaagaaggcgatggagtcggaggcgtcgctctcgctctcgcactcccactccgacacgcggacgccggagtcggagatcgacgacgacccgttcccggagctgggctctctgccggcgttcgacgacatgggcccaggcgcagccccagcccctgccggcgtcgtcctgcccaaggaggaggtggaggacttcggcgacctcggcggcgacgactggctcgcgggcatcaacctcgacgacctgcagatgccgggggacgccgccgatttctacggctccatgctcgtctcgccgatggccgccaagatggagccggacggcggcttccccttcttctgagatccttcggcgactccggggaccggatgcagcgcaacgcaaactgtgtatagttcagattttcttcatggaaccaacaacaacaaaaaaaagttctgctaatatcttgttctagtggtgtagtggtgtagtgcagaagtagcagcaggcatgattgaagttccattgtagtgctgatgttcatcgccacttgatctgtgacaagtgacggcattctttcgtttcttggctgc

SEQ ID NO: 1853 - DNA, 1002 bp, Zea mays
  Clone ID: 700168731_FLI
ccactcttcctccccttctctccggctcccccgaggcccccgacagcgaactcgggactcgccaaccgagaaggaagaactagtcgcgaggtgaagaggagaacctgaggtggtcccgaatcagagacggaagaaggtgggttcaggagcaagccagcctgccgccgccatgaggcgcacctcgaagaaatcgtcgtcgtctacggcgaccgccagcgctggccctactaaagcagtttccaaggaagtagaacggattgatcaatttttctatacttacgctgataactcatctggcatgattgacccagaaggcattgaaacactctgttctcaccttgaagttccccacactgatgttaggattctaatgttagcatggaaaatgggctgtgataagcaaggttattttaccttggatgaatggagaactggcttgaaagctcttcgagctgacagtattagtaaactgaagaaagcatttccagaactggtccaagaggttacaaggccatccaatttccaggatttctacatatatgcatttcgttattgcctcacagaggataagaagaaatgtatagaaataccagttgcttgtgagttgctgaatctagtattaggcttgcagttccgccctcaggttgacaagcttaataattacctcatgtaccaaaatgactacaaggtgataacaatggaccagtggatgggatttattcgtttctgtaatgagataaacttcccatcgcttgacaattatgattcagaccttgcctggcctttgattctagacaattttgttgagtggctacgagaaaataaaagctagatattctattcctgtggtgaagttgtcatccaaaatgtaattttcaagaatgtaggtgactatatcattgtttgcgtttgtaagacatcaattttggaccacccacatgtatatacttcggcagtagtgcaaactcactgataacccccttaccgaattttgtgtttagt

SEQ ID NO: 1854 - DNA, 2319 bp, Zea mays
  Clone ID: 700168739_FLI
ttttggctttcggtactaggtgtatttgaatggtctggtaacaacccggtgccaccagaagtatggctactgccatatctcctcccatttcacccagggaggatgtggtgtcattgtcgaatggtgtatttgccaatgtgctacatttatgggaagaggtttgttggccgaatcacaccacttctgttggaattaaggaaggaacttttcaaagacccttacagcaagattgattgggacaaggcccgtaacctatgtgccaaggaagatctgtactacccacacccattcgttcaagatgtgttatgggccactctccataaattcgttgaaccagttatgatgcattggcctggcagcaaattgagggagaaagctctggaaacagtcatgcaacatgttcattatgaagatgagaacactcgttatatttgcattggtcctgtaaacaaggtattgaatatgcttgcttgctggattgaagatccaaactcggaggccttcaaacttcatatcccacgagtctatgattacttgtggcttgctgaagatggcatgaagatgcagggttataatggcagccaactttgggatacagctttcacagttcaagccattgtggctaccaaccttattgaagagtttggtcctacccttaaactagcacacaactatatcaagaattcacaggttcttgatgactgccctggtgatctgaatgactggtaccgccacacatctaaaggtgcatggccattctcaactgctgatcatggttggcctatatctgattgcactgctgaaggactaaaggtgaatgcagtcatcagcattaccaataaggaaatttactttagaaggttaaattgtcttttgagatctaggatcctttgttctttcagcatctctaattcttcccacataaactatgagtaaagtgctctcatagctaacaaagtttagtttgttccttcacatttatgttccagcattctgaggagagggatttgtgggtgctggctggggccaagaatttggatcttctaacagcccctataccagggttgtaggtgttctgttgtcagctctctagctatggactgttttttgtattttcgtttttggccaccgtgaggtgccttgtttttgtacctgtctcgtccattttggaccttttatcttcttaatataatcatgtgcaactctcttgcgcgttcgagaaaaaaaatgttccaacattcttgactgtatagtgtctggcacattgtcataatttcataattatttgttttaataaatagtaattgcttattttcttttactccaggcctcattattgttatcaaggatctctcccaaaattgttggtgaaccgatggaagctaatagattttatgatgctgtcagttgtctgatgtcttatatgaatgataatggcggcttcgcgacatatgaactcacaagatcttatccctggttggagctgatcaatcctgctgagacctttggggatattgtgattgattacccgtatgttgaatgtacatcagcagcaattcaggccctgacatcattcaaaaaactataccctgggcaccgcaggaaagaggtggataactgtatcagcaaagcttccaatttcatcgagagtattcagaaaagcgatggttcatggtatggctcttgggccgtttgtttcacatacggcacttggtttggtgtgaagggactaattgctgctggtagaacatttgagaacagtcctgcaattagaaaggcatgcgactttctgttgtcaaaagaacttccttccggtggttggggagaaagctatttgtcatctcaagaccaggtttacaccaatctcaaaggcaaccggcctcatgcagtgaacactagttgggccatgctggcgctgattgatgcaggccaggccgagagagatccaacgcctctacaccgagcagcaaaggttttgatcaacttgcaatcacatgatggagaatttcctcagcaagagatcataggagtgttcaacaagaactgcatgataagctactcccagtacaggaacatcttcccgatttgggctctgggtgagtaccggtgccgagtcttgggggctggcaagtcttggcggtgaacgggaggtgtgcgtgtgtgtgtgtcatggatcggcttttgtgagtagccatgtggaagttggaataatatagctacgttacgttcagggggttgcgctactagtggtcctagtaataatagtgatggtgatagcaatgtactcctcattattacaatctcaaagtggttcatgcc

SEQ ID NO: 1855 - DNA, 1128 bp, Zea mays
  Clone ID: 700168817_FLI
gggatatctctctccatccgtcgggtgtcccttcctctcccagtctttctcgccttttctcctctctgcttttctttgttaccgtcggcgtcgggaactccgcttccgcacaaatattgcgtttgctgtcagcttgctcaacggttctgtttgtttggttgcaaaacaatgacctccaactaatacaacccacaacagctgaagaagaaatccagctttctcaaccaccaaatttggaagacaagaccgttgaagagctgctcaacatagatccggatatgtttcccgaagaaggatgtactgttactatatcaagcatcgtgcaaaatagcagatggtggtacccatcttgctccaggtgccacaaatcttcatctcaaacctcaactggatatcactgcacatcatgtggctgcacaaatattaaatttagatacaagctcagcttcattgctactgatggaacatgcgaagcagagttcttttgttttgatagcatagccagaaaaatagtaggagaaccttggggcaaccttgttacagcagttacaacttctgagagtcccagcagccctagccgctattgtgtgtctgaaatttactcttgcagttgccatcaatatgtcagcctactatgtcacgaacagagtattctctattctatctattttaacaaatcatggaagacagaccttcataccatctaacatgcctagccatcctcaacaagagttgcatacacaagatgaagtacctagccttccgaccacacaagactctccagcaacatcaatggcaaaactatctacctgtagcaacgaaagaaacgagggtgatgatagcgcataagtgaactcaacaagcaagagatatcgtcaccaccaaaatggtgtttgctttttgcgcacctatcaggagcaccatcacttttggaccatgaatgcttccctatagatatgaacctactgttagactatttgtggatatgtacatattgacttaacacctgcaagcacactgttgctaagtgttgatgtatgatagttgaatgctacttagtatgtattgtagtctaaatccactctacaactggtatcaactattacataaaaacaacgttatatgctt

SEQ ID NO: 1856 - DNA, 707 bp, Zea mays
  Clone ID: 700168880_FLI
gggaccgactacccttcttcactgacgaggagcgagagaagctagtgggctcatatgacatgctggggttaaactactacacctcaaggttctccaaacacatcgatatcacgcaacacaacacactaaggctcaacactgacgatgcatatgccagtcaggaaacgaaagggcctgacggcgagcccattggtcctccgatggggaattggatctacctgtatcctcaaggcctaaaggatctccttaagatcatgaaggagaaatacggaaacccacccatgtacatcactgagaacgggatggctgaagttgaccttggcaataacttgaatgaccagaaaagaatagattacctccagagccacttggcagctcttcaggagtcagtgcagtcgggagcaaatgtgaagggctacttcctttggtctctgctggacaacttcgaatggttctgcggctacacccaaccttacggcatcgtctatgtggaccgcaacgatggctgcaagcgctacatgaagcagtcagccaagtggtacaaacgcttcatcgctgcgaatgataaatgaagtgcacccatacgtataactcactaccagaggaggtagtggagaggaccatatgcattgttccagtccagggttaccgtaccttattatatatgcaataaatgaagtgctctaatatttcgtcctgtgggaatt

SEQ ID NO: 1857 - DNA, 589 bp, Zea mays
  Clone ID: 700168882_FLI
tgtttagtccctccattttattccactttagtctataaattgcaaaatatggaaactataactctattttagtttccatatttgacaatttagtgactaaagtggaataaattggagagactaaaaattagtctctaaaaccaaacacccccgttagtaggagattcgtttctagggactaatttttagtccctccattttattccactttagtctataaattgcaaaatatggaaactataactctattttagtttccatatttgacaatttagtgactaaagtggaataaattggagagactaaaaattagtctctaaaaccaaacacccccttagtagtatatgcagaagcttccaaaagcctgatgagcaaggtagatgaggtctgagaaacactgcattcgatatatatatgccttatgtactaccttcatgcagtaggtctgtagtaaatttgtgcgtaactcttcttctgcgtattccagaaaaaaagtttgtagtaaatttgtactatatggtagtaaataggggtcaactattgtaatttgtagcacaatgaatcttgtaagaaatctcagtttagcaat

SEQ ID NO: 1858 - DNA, 1056 bp, Zea mays
  Clone ID: 700168917_FLI
aacgccacagcttgcgcccgcaatggcactcgtctccgcctcctcgtcctccaccaccgccgtcacggcgctccccaggaatgggcagcgggcgtcgtcctccttcctcggcggcaagacgctgctgagacaggccgaggcggcccggccgtcgttcgccgtgcgcgccgcggcggaccccaacaggccgatctggttccccggcagcacccctccgccgtggctcgacggcagccttcccggcgacttcggctttgatccctggggcctcggatctgacccggagagcctgcggtggaacgtgcaggcggagctggtgcactgccggtgggcgatgctcggcgcggcgggcatcttcatcccggagttcctgaccaagatcggcgtcctcaacacgcccttctggtacaccgccggcgagcagcagtacttcaccgacaccaccaccctcttcatcatcgagctcatcctcatcggctgggccgagggccgccgctgggctgacatcatcaagcccggaagcgtcaacaccgaccccatcttccccagcaacaagctcaccggcaccgacgtcgggtaccctggtggcctctggtttgacccgctcggctggggcagcggctcgccggagaagatcaaggagctgcgcaccaaggagatcaagaacggacgcctcgccatgctcgccgtcatgggcgcctggttccaggccgagtacaccggcaccggccccatcgacaacctcttcgcccacctcgccgaccctggccacgccaccatcttccaggccttcacccccaaatgaggagttgaacttattattagcattttgaggagtgctaccacacatgcatcgtcaggttgatggccgatatatatgaaacttcacattttttttggtggggaaggactgctgagtagactgtcaatgatggaatgctcgtggtgcgagtgcgatgcatggtgtacttgtactatgttgtaaccagtgtaaaaaggggatactcgttagatgttatgccatgttcactgaatcaacggcttgatgatttgtgc

SEQ ID NO: 1859 - DNA, 248 bp, Zea mays
  Clone ID: 700168932_FLI
catgatcaaaccttggttacatcacgaaactcttccttggagtgcagagaagtgtacatgtgacgagttatgacagtattacgtgacataatttttccaaaatatagctgagtgtagttatgttttctcaatttttggttcatccagaactgattgatcatgtagctaaccatttagcataccaagaacatttattgacacattccttgctggaagttgacaccagtaatgagaaaatgcaaataatt

SEQ ID NO: 1860 - DNA, 3019 bp, Zea mays
  Clone ID: 700169029_FLI
cgccgtctgcgttgcttgggtggggaaggagcaggcggccaggcgcagagccgcaaaagcagacgcgaaaaagcccaggcccgagccgaagcggggaggcgacaccgctgcacctgcactaccgctcgcacggtcagcgatttgccgcctcgcgggagccagctttggcgtcggcgtcggcgtcatcgtcggcggggagttcccggagagggattccggtgaggatgagcagcggcggcggtggagggggagccaggggaccgtcggggcccgtgccggcgtccgcgaggaagctcgtgcaggggctcaaggagatcgtgaaccgccccgacgcggagatctacgcagcgctgcgggagtgcaacatggacccggacgaggcggtcagccgcctcctctcccaagatacttttcaagaggtaaagagcaagcgtgataggaaaaaagaggttaaagaaactccagagccaagatctcgaggagcaagtaactccagtcgatccagtagaggtggtgtggaccgtgctggacgaggcaattcagttcagtctggatcgagtggcactgattatatggcttcaaggtcatcaatattgggacctgctgtggcagctaccaatgccatgcagaagccaacagttcctagtttgtccacaaacaaagatgtggttcctaatggatcagttggagcacaacaatcatcatctggttttcagcacaattggtttggggtgccaggtcagatgtcaatggctgatatagtgaaaatgggaagacctcaagtgaggtcttctggcaagcctatggctgcaggagacacatcatatgctggtcaaaccccatctttatctagctctataaaccagaactcaaaacaatcggcaagcacagccctaccaactacttttgaccagggctttcctgctctcccagaccctattccacacacagtgaattctagtcatggttcagctgggaacaaccatacacatgagaatgattggtttcctcaggacgacctgccatctggagttcagcccacatgcattgaggcgtctggtgaccagtcgctatttgtggcatcactggaccaatctatgttggttgccgatgcttcttactcacaagaaatttctcatgcagaagagaacaactccactgcagttgaagcaacactgtcttccgaaagacacttggaaattgtggaggatgacaatcatttcaacgacgggttattgcagaactcaagcgcttaccaggctcaagtgcattcctatgttgataatgaagttgggatttccaatgttgatgcagaatcagcttcgatgaacttccagcatttaagcctgcagaatgaagatatagctgcaaccaagtctgctgaggataaccctgcggttatactccctgatcatctacaagctgcaaatgcagattgtgctcatttgagctttggtagttttgaatctggtgccttctctggcttgctttcatcaaaggtcccaaaaggcagtttggaggacgacgaggtgctcattccagatgaatcccgatcagttaatcgaatagatgttaggaatcaagattactatgatgacgatgctctaaattcttcagaaaatgtggatgttgagacaagaattggtaatatggataacattgatggaccttcagtttcagaatctgatgcactgaggcagggtgccatagatgtgcctggtcttcaatatgacctgccatcagtttcaagtcatgcatattcaaacacaacacagccaagtacaatggaagaaccacaaggaaacacacaagcacaacccctttcccatttttctggcttactgcaagcaaatactctacccaataacttgttggggtcaaatcttacccctcttcgggagtttgacttctcccagttccttcagacacagtcagctacaaaatataacccatctgttgcacctaataatctgccaccaatctccatgcaagagacttcaaaacagggaggcttccccaatactcagtctacgcaacatgttcccagtacaagcatttcgtcgggtcttcctctcccacaacaattgcctgtatactctcagccaactctgccccttgggccttttaccagcctggttggctatccatatttgcctcagaactattacctaccttcagcgccattccagcaagcgtactcaagtaatgggcctttccatcaatctgctgctcctgccgtgcctggagctggtatgaagtatccgatgccacaatacaagagcagccctcctgcttcgaccctaccacaaccatcatcactctctggttacggagggttcggaagtgcaaataatatccctggaaatttcagccaaaatcagggtgctcccgctgcacctacaactttgggatttgatgaagctttaggcacacaattcaaacaccccaatcattatgcagcactacagcagagtgataattcaacgatgtggcttcatggaggcgctggttcaagaacaatttctgcagttccgcctggtaacttctatggtttccagggccagagtcagcatggtggcttccgccaggcacatcagccatctcagtacggtggtcttgggtatccaagcttctaccagtcgcagaccagtctgccacaggagcacccccagaaccccactgagggaagcttgaacaatccccagggggtaccatcccagccttcacaccagctctggcagcacatctactaaaccttctgtgctctccttggagatgcctctctacgctgccagcttacctgcaagcgagcagactagctgagcccaacagcaatgaagtgtgttgtttttctttctttcttttttttctccagctgtgtgttctggaactaaattaggctgtcgtggtttttacttgatagtgagtggtgttgcagaggtgctatcttgtaacggtaaagtcctaactcatctaacagatctgcttttcataccctgtaatgtgccgttttgttctt

SEQ ID NO: 1861 - DNA, 1056 bp, Zea mays
  Clone ID: 700169133_FLI
ggcgcagcggccacgtccctccctccccagctctcctctcctcctccagtactccacaccgcacccctcctggacgtcgccggccgcattaacaccaagaacagaagagaggaagagacaccgcaaccgcattaccatgagagagagctaggggggcctggcctgctgcccctgcatcgtctgaccctgaagatggcggcagcagcatccatggcggcccgtagccgcgcgctcgttgcgagcaggaggaggatgggtggcccgccgcgtctcttggtcgtcagctgcgacgccaggacagcggatgcctactgctccctggccgcaaagattttgggacctcccacgaccttcaatgcagcgaagctcaaggtggagttcgccggggaggagctccggcctcctttccccagagcctacactctgacccactgcgacttgacggcgaacctgacgctgggcgtgatgagtagcgagcagctgcgcaagtcgacgctgcagagggacgacgtggtggcagagtggaaggaaaccgccggggagatgacgctgcaggtgcattgcttcgtcagcggcgccaacctcctgcaggagctggccgcaggtttcagatactacgtcttctccaaggagctaccgctggtcctcaaggcggtggttcatggcgacgccgctctgttcgccgacaggccggagctgatggaggccaaggtgtgggtgcacttccactccagctctcgcaagtacaaccggttagagtgctggggcccgctctgggaggctgccacaactaccaggaggaaccaccacctgctggagctggaccaactgcagagcgccatcaccaagaagaagactatctttaacgccctgctcgcccttctcctctgattttgattcagccgcctatacaatgaacggacggactatagagtgatcaagcaaacccaccaagcattctgcatctctgtctgactgtaatggttgctgctttgtctggggattatattattcatataatcatcatcagaaaaagcattgtattgcataaacgat

SEQ ID NO: 1862 - DNA, 720 bp, Zea mays
  Clone ID: 700169189_FLI
cgcagttcttcaataacgcttgcccgcgcgcctacagctacgcctacgacgactctacctccaccttcacgtgcgccaccggcatcagctacgccatcacattctgcccgagcaccaccagcggcaaatactccggcgagaacccgcaggccgcgggcgtgcagcccacgaacggctcgatggtctacctcggcggcgagcaactcgccacctccgtcgccgccgcggcccgtgcgtcacagctcctcctagccgccgccgccctcgccgccggcgcgctgctctgaacttcgttcccgacgtggccgtgtgaagtcggcggctcgagtctttgtcctcttccggcgtgacggggccagcgataaaagattcgacaaccagaagaggctcagacgagacgagtgacgacggtgctgctacgactaaccgagagaaaaaaaacaatgatatataggtagcttatggcgtagggtttaggataactggtagcatgagttaacctttgcattcttctccacgcttcctcgatttgttgagccagccgaaagatgtattctatatttctatccatcgttgttcgccgtgatgctatagattacagcaatgatgattatttactctttaccagttgaacatagaccctatttgtttcggattataatctctctagattatataatccagcgcaaataatttaatagataaacaaacacctagttt

SEQ ID NO: 1863 - DNA, 604 bp, Zea mays
  Clone ID: 700169246_FLI
atccaggacaaggagggcattccaccggaccagcagcgcctgatctttgctggcaagcagctggaggatggccgtaccctcgccgactacaacatccagaaggagagcaccctccacctggtgctccgcttgcgaggtggtatgcagatctttgtgaagaccttgactggcaagaccataaccctggaggttgagagctccgacaccatcgacaacgtgaaggcaaagatccaggacaaagagggcatccccccagaccagcagcgtctgatcttcgctggcaagcagctggaggatggccgcaccctagcagactacaacatccagaaggagagcactctccacctggtgctccgcctccgtggtggtcagtaagccatggttcatttaagctgctgctgtacctgggtatctgcgtcgtctggtgccctctggtgtacctctatatggatgtcgtcgtctaataaacatctgtggtttgtgtgtcatgaatcgtggttgtggcttcgttggtttaatggacctgttgtgtcctctgtgttgtacccaaaactcttctgcagcagtatggcttgaatccttatgaagtttgatgtttgaactt

SEQ ID NO: 1864 - DNA, 639 bp, Zea mays
  Clone ID: 700169261_FLI
catcttctaactgaatatgccaagctcctaaaattcaaacccactaagccacctgatgctattgaggtatgttcagagtctttggcctgccaagctgaaggcctcgagaagaagtttcttatggaatccatggtgaagtttccccgtgatgcatgtgatctgcctcctcccttcaacccacatgagctcaagttgctaaagcagaagaaagaaaattcaataaagcagatccatatgtgggagcaaaaagattggggggcttaaataacaattttgacccccctgcttttttttcttccaatcgtaggcacacataattggtgtcttataatttggaattggggaattggggagtatgatctaactcagtgtcattgaggtgcaaccaaataccaattatttattgactgcgatcaacttagaagaatctagataaattgagcagatacccattccttaggtatttttgtataaagcaatcaatagctacttagctttaaacatttttctgtatttaattttgttttgattggctttactttgtaaagcaactgtaaatgtgacacagaaattatacataatatataattctcaacaacaattatacagaatatataattctgatccgatattcacttc

SEQ ID NO: 1865 - DNA, 764 bp, Zea mays
  Clone ID: 700169404_FLI
aatcgttggacggggaaaggaaagcgaaacaagccacgctaagcaagatgcaccgaaaccctcgcgccgtcatccgcgccgccgtctccctcacccgccggccccccgccgttcctgccgcggaggctctccaaaccctgcctaaagcgacgccctcgcctgcgcttggggcgtggcggccagaccaggcggtggggcctttgggtagcgtcagccgccgccgcgccttctcctcctccgcggcagagtatggcaaggatgtggacgaggtgaaccgcaagttcgcggaggcgcgggaggagatcgaggcggccatggagagcaaggagacggtctacttcaacgaggaggcctccatcgcgcgtgacgccgccaacgaggcgctcgctgctttcgacgcgcttttagcgcgcctcccgcccaccgacgccgacgcgctccgccgctccatggggctaaagatggaacaactgaaggccgagctcaagcagctcgaggactagccgactaggctgcggaaaggtttgagttttgcgagaaaatttgggcggaatgtttggttatacacctgttcttttgagatagagattcctaggtgttccgcttggtgaataaattttagcacaacaatctgttgcattgcctgtttctgttggttcttggtgagaggagatccgaagctaatttgtaatgtgcctggtttaccaccttcacatgattggccactgttgaggccttaaattgatttgatagaagttagaccg

SEQ ID NO: 1866 - DNA, 519 bp, Zea mays
  Clone ID: 700169430_FLI
gtaccgagtaggagcaaccgcttgcgtcagacgcacactgacggagagtgatcactgatttctggtcatggcaaccgtaactgaggaagttgctccggtcgtcaccgtctccgaggagccggcgccggaagcggcgaaggaggtggtggagaagccggaggaggggaagaagcccgacgaggagggtgacgagaggaagaaggccgaccccgccgccgagaaggagaagaaggcgaggaagccgcggagcaggaagcccaagtccgccgggctgcaccacccgccctatttcgagatgatcaaggaggcgatcctgtcgcaggacggcgggaaggtcggggcgagcccgtacgcgatcgccaagcacatgggggagaagcaccgggacgtgctcccgcccaattaccgcaaggtgctggcagtgcagctgcgcggcttcgccgccaagggccgcctcgtcaaggtcaaggcttccttcaagctcgccgccgccgaggagaggaagccctccgcggccgc

SEQ ID NO: 1867 - DNA, 866 bp, Zea mays
  Clone ID: 700169450_FLI
aagaattcctggtcctgaagggggaggctgctagtgccgtccacgggaaggaaggaggagatgacccggtcttgcaggccatcgcagcgagcttgctgcagaggaagtggaaagagttcaagcagtccgatgaatcctggaaagaagccccgaggaacttcgttaacctgggaggcatcgacgaggacatcagcgccatggtgggtatcctgaagcggggcttgggtgttggatgcatccactcatggctgtcgagcaatcagatgcagcgcgcgacagctacaggcggcttgccaggggctcacatggttgcaacaggccaattccgcacgccagcgatgaacgcaatggtgcaggaggcccataggcatttggccagggaagcatctgcccatgatgcggggacatcaattgtttgcaagcgcgccgtcgagcttctagatgggataaacaagcgattcgatctctggtgcaagctggaccaggaattgccgcgcacgaaccaaccgtcaccacaccaggaagaaggccatgagtcccgtgacctcaccgccgtcctacggggggacatcaaccgagcgaggcagcatgacatatacctggctgccgatcacgcgatcaagcaatggcgcagcttcctcacatccgtggagaagacgcatggccacgggcatatatgatgaggccactggcaaccaccacagcgtgagtggcgttcagtcgatgcagactcagacatacacaattaatataagtaaataaataaatttaatgagcgagaggccgtgacaccagtccctccgatcctgagaataattaatatttgtgcgtactatcctcatcgtcaatatattggtcctttgatt

SEQ ID NO: 1868 - DNA, 1346 bp, Zea mays
  Clone ID: 700169504_FLI
cgcaatctgtaagtgcaaatgagatcaagaaatatacacgtaggtagagcatacgtgtatcctttcctttcttgctagctccatccactccactccactctgctactccacctacctcccggctcccggatccggcgatggagaagatgctccactcagccccggcccacggcaggctcccggagtgcttcatcttcccggccgacaagctcccgcaggccaaggccacctcagcgacggtctccctgcccatcgtggacctctccctcggccgcgacgaggtgcggcgcgccatcctcgaggccggcaaggagatcggcttcttccaggtggtgaaccacggcgtctccctggaggcgatgcaggacatggagacggtgtgccaggagttcttccggctgccggcggaggacaaggccgggctgtactcggaggacacggggagggcgacccggatctactccagcaccatgttcgacacgggcggcgagaagtactggcgcgactgcctccgcctggcctgctccttccccgccgtcggcgacagcgccgcggcctggcccgacaagccccggaggctccgggaggtggtggagaggttcacggtgcagacgcggggcctggggatggagatcctgcgcctgctgtgcgagggcctcggcctccgccccgactacctggaaggggacatcagcggcggcgacgtcgtcctccacgtcaaccactacccgccctgccccgaccccaacgccacgctcggcctgccgccgcactgtgaccgcaacctcctcaccttgctcctccccagcatggtacctggcctcgaggtcgcctacaggggcgactggatccgggtggagcctgtgcccggcgccttcgtcgtcaacttcggatgccagcttgaggttgtgacgaacgggatcttgaagagcatcgagcaccgggtgatgaccaacctgggagtggcgcggacaacggtggccacgttcatcatgcccaccacggactgcctcatcggccccgccgccgagttcctcagcgacgacaacccgccgtgctaccgcaccctcaccttcggcgacttcaagcgcatctacagcgttgtcaagctgggctcgtcgctcaacctcaccacaaatctcaagaccgttcagaaggagctctgattatccatcaaactttgtagcctccctcgaattggcggcgaggaactagctagctagctggcaagatgtagtctgtgtcatcactgtcatgttactgcccggacgtcatgctgatgatagaaatgacggaataaaaatgaaatgccaaatatgcgtgtatggcgcacgcatattcttgct

SEQ ID NO: 1869 - DNA, 968 bp, Zea mays
  Clone ID: 700169506_FLI
gcgaggcgaacaactaactgcttccttccccgccgccgcctacaaccaacacttcacgtgcccccatccttttccgcctcaagtcaagtgttcacggtccatcctctcgagagtctaggcccttctcccgaagccgcagacgcagaaaacggctctacatatggaggcgaagaagaagccgtcggcccccgccgccgtcggagccgcgccgccgccgccgggtaacgggtacttcagcaccgtcttctccgcgccgactgcgggaagcgcaagtgacgcaaagcatgcggacttgtacacgatgctgaacaagcagagctccagagggcagaatggcagagatggcaaatcccacagccgccctacttacaaggatggcaaacatgctcatccaaatgagccatcagaatctccttactttggctcatccgtgcattacggtggtcgggagttctacagcagcgttttacggaagcaaccagccaatgaaccccatacggattacaagggggacaacccggatggctctgctaccagaggtgattggtggcaaggttcactttattactgaataatctgctgggacctctcccttttgtgaacaaggaataaaaggggtagagctgagaatggtttgttgtagtgttggaagtgttgacgcgagccgttaagcatcgatcgatcgtaatagttgaaagctgcgtcgtgactacaagcatcctgttggtggaggcagtattttagatccatcatcacgcctggacagatgtgggtgtccttttgtattcctgtttcccctgtgtgttcttgtggtttaggtgcaggtgctgtactaaaatgttgaaactcgcagttcgataaaagcagttgccaaagagtctcagctcgcaggattacttgtctacatgatatggcatggtttggcagccaccgtatctgaataaatactgaatatatatgtcatacgc

SEQ ID NO: 1870 - DNA, 1351 bp, Zea mays
  Clone ID: 700169543_FLI
ccattcgtgactcgtggcctcgtggggtggggttgcagaaaccagcccttttggtcctgtcagctactacccactggccactgcactagccgtctgcggagccgagtgttcctttctagccttcacttctcagcacggcagccttcgacccccgactgcagccgccagccgcgccatggagcaagccgccatgccgcaggttccccgcgtcaagctcggcatccaggggcttgaggtgtcgaagctggggttcgggtgcatggggctcacgggcacctacaacgcgccgctcggcgacgaggccgtggccgccgtcgtcgcgcacgccttccgccgcgggatcaccttcttcgacacctccgatgcctacgggccccgcaccaacgagaccctcctggggaaggcgctcaagcagctgccgagggagcaggtgcaggtggccaccaagttcgggataggtcagggcgccgctggcatgaccgtgtgcggcacgcccgagtacgtacgcgcctgctgcgaggccagcctgcgccgcctcgacgccggctacatcgacctctactaccagcaccgcgtcgacaccaccgtccccatcgaggatacgattggtgagctcaagaagttggtggaggaggggaaggtcaagtacatcggcttgtcagaggccagcccagacacaatccgccgtgcgcacgccgtgcatcccatcaccgccgtgcagatggagtggtcgctctggtcccgagacatcgagcccgagatcgtgccactctgcagagaattggggattggaattgtggcttacagtccaattggccgtggattttttggtggaagaggagtgacacagcaagtttcttctgaatctagtctgcaaaggcatccaagatttacaacagaaagcttggagaagaacaagcagatttacctgaaaatagaagatttggcgaagaagtaccagtgcagcccagctcagctagctctagcctgggttctgcatcaaggggatgatgtggttcctataccagggacaacaaaaacgaagaacctagatgccaacgttgactccttgaaggtgaagctcacagctgaggacctgaaggaaattggcagccagatacgtgcagaagatgtggctggtggaagacaatacaattcctatgcacatacctcctggaagtacgcagatacaccaaaaaagtgaagttctggtcctggaaaccttgtagcaatcacaggcgtatgcaaatgttgaactatttccctgcatttgagccggaatcgtacgatgatgcatcttgtgaacatgcggcactaataaatcgagacgaagaataatgtgttttccatc

SEQ ID NO: 1871 - DNA, 1515 bp, Zea mays
  Clone ID: 700169575_FLI
cccacggtccgcccacggtccggggcacttgcccccgcgatcataacctcacaccgcccgccaccagctgcgcagcgctcgacagcctcaccagccgccatcactcgcggcagtacacggccgctgggactgggagagtgggagtgagacgctgctgttgccgagtgcgaggagacactactactcactctcaagactcgagagcagcaggggcgaccgagctctgcgtgcgtggggagaaccggagaaggcagcagaggagggagggagcgcgtggacgggctaggcgcagcagcatgggcgccgggatcagggtcctggcggcgctcttggcggcgctcgcggcagccaccgccggcgtgacggcgcagctgcggcaggactactacgcggcggtgtgcccggacctggagagcatcgtgcgcgccgcggtgtccaagaaggtgcaggcgcagcccgtcgccgtgggcgccaccatccgcctcttcttccacgactgcttcgtcgagggctgcgacgcgtcggtgatcctggtgtccacggggaacaacacggcggagaaggaccacccgagcaacctctccctggccggcgacggcttcgacaccgtcatccaggccaaggcggccgtggacgccgtgccggcgtgcgccaaccaggtgtcgtgcgccgacatcctggcgctggccacccgggacgtcattgagctggctggcgggccgtcgtacgcggtggagctggggaggctggacgggctggtgtccatgtccaccaacgtcgacggcaagctgccgccgccgtccttcaacctggaccagctcacgagcattttcgccctcaacaacctgtcgcaggccgacatgattgctttatctgcggcgcacacggtggggttcgcgcactgcagcacgttctcggaccggatccagccgcagtcggtggacccgacgatgaacgcgacgtacgcggaggacctgcaggcggcgtgcccggcgggggtggaccccaacatcgcgctgcagctggaccccgtgacgccgcaggccttcgacaaccagtacttcgccaacctggtggacggccgggggctgttcgcctccgaccaggtgctcttctccgacgcgcggtcgcagcccaccgtggtggcgtgggcgcagaacgccaccgccttcgagcaggccttcgtcgacgccatcaccaggctcggccgcgtcggcgtcaagaccgacccgtcgctgggggacgtccgccgcgactgcgccttcctcaactgaaaaggatggacatggagagctggtttatatctcacacaagtgttcatacacaatctagagtaaagtttttttgttgttgttattattatcatgtcaggtatgagcacaaggttgaattaatggttaatgcgattgatatactgtaagtggcacttgcattggtaggccaagaccgagatgtattccttttccttgttgattttgttcggtctcggagcaatatttgtttcagtgtttttct

SEQ ID NO: 1872 - DNA, 586 bp, Zea mays
  Clone ID: 700169578_FLI
ccgacccccacgcgcatagatgaagactaggtcgcagacgtcgccgaagcctctcaagacggtggcgatggctcccaggccgagcagcaccaagcggaagccgaggcccaagccggcggggaagggcgacccccgcgcacccaagaagccacccaccgccttcttctacttcatggaggattttcgcaagatctataagcaagaaaaaccaagtgtaaaatcaatgcaggaaatagggaaggcatgtggcgaaaaatggaatacaatgacatttgaggaaaaggtcaagtattatgatatagctactgagaaacgtgcagaatttgagaaggcgatgattgaatataacaagaaaaaggaaagctgaacatttgtctgttccaaattcccgatggttcactgtaactggatgaatcaatcagctgtatattacagaactgtgatttttagtggaatttataaataccactagttggaaccgtcagctcacgcagatatgtatcttttgtagtcgacttgcacattttgatgacaccgagtcttctacccggtgtttttcatctggagataatttgtgtttcgtgct

SEQ ID NO: 1873 - DNA, 867 bp, Zea mays
  Clone ID: 700169581_FLI
acccttccaaacctgaggagttgtgcagtcaggcttgcacagatcggctggcagaatatggtcaagaaatggtgaggcgccatgaaaaggactacgaccggagaaaagcaccaatcgatcccatggtggtgtatgctactggaggcagaaagagtcatgggcggtactccatgtttaatggagtgattgactccagagaggttagatctcagaggtcggggtcttcctccgaacgatcaggggctagaactcatcgccaatcagagcatgagttggaggttgcaagggtgcaagaggagataaggcaacgtgatgcattccaaaggcacaacatgagtactttgcctcattcttggcgcagcagcagaccgtgcttcaagcaactttccaacagcaggggataaacgtagtccttccacaatttcaacctccaccactgccaccaatatggggatcgggtacccaataccttctgcaagtcaaggatcggcggcacaagggccccagatttaccatactccacctgcatagatactagcacctggagaccagttctgttaagttctcgttatattcctgacaattcttactcatattttcatctcaatgactaatttttcactaattccatatttttctgcatttagacggccgatgctggaactacatttgtaaatgcaatcttcggtccaccctctggaggcagcggccaaaactccaatcatctgagaggtggcttgtcacactcggatttaagggcaaactcgggcgcatctcaaatgtgtgctaggatcaagtctcacacatatgatggctcatggtacagaaatcaatgtcatatctttattaaataatcggagttttttt

SEQ ID NO: 1874 - DNA, 172 bp, Zea mays
  Clone ID: 700169616_FLI
actcaggcaaatgcacaaatcttacagaagcaaacgggtccggaattcacggttacaagcagttcagcctgacggcgacgactgctggtccaaggaagcaaacgatgcgagcggcgccggcgcagcggcggcctgagacagtcgacgatgcatgcacgtgcacgagagaaac

SEQ ID NO: 1875 - DNA, 710 bp, Zea mays
  Clone ID: 700169649_FLI
tactcaagagctaatagatgcattgccaacctacaaattcaaaccaaaacgtgtcaaaaactgggggattgaccatgcttcaagctcagagcatcttgatgagggtggcattcttggcccaggaactaagaaggaaagagttgtttcagctgaagatgctcagtccagctccatgtaccaacttgcgttttggtggaatccagtttatcacaaactgtgaatcagttcatgaattctggtgacagtgagtgtgctgcatctgtcttacgaagtatggagatgatgatgagcttcgtgagcttccttgcacacacttctttcatgttcaatgtgtagataaatggcttaagataaatgcggtgtgcccactctgcaaaacagagattgggggtgtggttcgatctttctttggcttgccatttggccgccgccgtgtcgataggatagcggcaagaggtgtagctagctcaagattcagtgtatagaacaatgctgtttttccgcataaagagctctgctctgttgcaatggtttgattgattgtcaaggaaagcgctgtgtgcatgacttgaagacaatgacacctggtgggagacctgatgcttgtaggggcaaatttctaagaaatgtaacggactgaaggtgctgctatactctgatgaacattttttttccaagtatgtaaataaggaacacgaagttcgcttgcc

SEQ ID NO: 1876 - DNA, 834 bp, Zea mays
  Clone ID: 700169668_FLI
cactattcctttctgctgagctcaggaaatcccctctggtctccccgtcccccattccacccgccgccgccgacgcgccgcgcctgttcaagatgaatgtggagaagctcaagaagatggcgggtgctgtgcgcactggaggaaagggcagcatgcgcaggaagaagaaggcagtccacaagaccgcaaccaccgatgacaagcggcttcagagcacgttgaaaagaattggagtgaacactattcctggtattgaggaggtcaacatcttcaaggatgatattgttatccaattaccagaaccctaaagtgcaagcatccattcctgcaaatacatgggtagtcagtggagtaccccagacaaaaagtctacaagaccttctgccaacaattatcaaccaactgggccctgataacctggagaacctcaagaggcttgctgagcatttccagaagcaggtacctggtgccgaagccagcgccagtgcagctgcccaggatgaggacgatgtccctgagcttgtcccaggagagacatttgaggaggctgccgaggtgaaggaggtgcctgaagcggaaccggaagagaagaaagactcgtaattttgttgcgtgtcatatccattgtttgtgaagggtcgttgtgtgtttaccatacaccatgggagagacctggtcatctatgaacccctgatgttcctcattcgtttacatgtgctccagtttttcagtttcttatttacctgggttttggtccaaacctgacaagtcagcatttggtttggcgtcaattgtgcttcaggttccaaaaaaaaacattactgcagtatgatt

SEQ ID NO: 1877 - DNA, 1105 bp, Zea mays
  Clone ID: 700169670_FLI
ctcgactccagcatcaggaagctgcacagaattttaaggcatatgagccagattctggttatgggatgtcatttattactaaagttgatggtgaagcagcccaaggtatagcttattcatctgaggctatggttttacattctgtaaatggctatcagttacctgcatctacagcaactcaacaaccagtgccccagatgttttctcaacaattccaagcacctcagtatccaaactttttgccatatcggcatgttttctcaccacagtttgggtctctaatggttgttccaaactattcaagcaaccatgcatttcctcagttgccacatgccagcagctatctggtaatgccaaatggagcctcacaactagctgccaatggcatgaaatatggatcaaaccatcagtataagcaagtatttcaaggagcccctgctggatatggctacggaaatcataatggttaccctaacggtgttattggcggcacaggtgctattgaggatatgaatatgagtaaatataaggacaactgcctctatgcacccaatccacagccttttattttccgtgattgtcaggtggaaacagcagatgtatggattcaaagtcagaaagagagtcccaatatgccatctgcaccgttctacaatatggtgggacaaccagtgtctccacatgcagcatacttaccaccacaaagtggccacactgccttcagtcccgccccttcccatcctggtcacttgcagtacccgggctttgtgcatgcactgcagccaacatccatgaccatggtgcagaacccgcagaccatgatacatcagccggctgcaccgccattggcaggaaatctaggcctggacatgtcggccatggttcctggaaatcaagtaggagcgtttcaacataaccagcttgcccatcttggctggaccacacaatccttttgagattttggtgtgcttctatggctggataagtgaaatttcggttccgtgtggatagaacctaattgaagtgatatgctgtaatatgcaggataggcctgatgaataccaggtttttctttgttttaattataaaaggggaaccgtttttt

SEQ ID NO: 1878 - DNA, 838 bp, Zea mays
  Clone ID: 700169781_FLI
ttcggaaaacctccaaggctccaaccctagccgcgatccgacaacgcctccatccctagccgactgctgcaagcttcagagctcaagagtcagggcgccatggcgacagagacggagaccttcgcctttcaggctgagatcaaccagctgctctcactcatcatcaacaccttctattccaacaaggagatcttcctccgggagctcatttccaactcttccgatgcgttggacaaaatcaggttcgagagcctcactgacaagagcaagctcgatgcgcagccggagctgttcatccacattgtaccagacaaggcttcgaacacgctctccatcatcgacagcggcatcggcatgaccaagtccgaccttgtcaacaacctcggtaccatcgccaggtccgggaccaaggagttcatggaagcccttgctgctggcgctgatgtgtctatgattgggcagttcggtgtcggtttctactctgcctacctcgtcgccgagagggtcgtcgtgaccaccaagcataacgatgacgagcagtacgtgtgggaatcccaggcgggcgggtcgttcactgttactcgtgacacgtctggggagcagcttggcaggggtactaagattacacttttcctcaaggaagatcagttagaataccttgaggagcgtcgcctcaaggatttggtcaagaagcactctgagttcatcagctaccccatctccctgtggaccgaaaagacaacggagaaggagatttctgatgatgaagatgaggaagagaagaaagacgctgaggagggaaaggttgaggatgttgacgaggagaaggaagagaaag

SEQ ID NO: 1879 - DNA, 567 bp, Zea mays
  Clone ID: 700169810_FLI
caagtacctcgacgcggcgcacttcgccgtgccgcgcggctcgcgcgccgtggcagctggtggccggcacggaggccgcgctggtgcaggaggtgcggacgacacccgggcggtcctacacgctgtccttctccgccggggacgcggccgacgggtgcgcgggcgccctgcgcgtggacgcgtacgcggcgcggggcaggctgccggtctcgtacgagtcccgcggcacgggcgggttcgtgcgcaacgagctggagttcgccgcggtggcgaacctcacccgcgtcgtcttccagagcatgggccactacatgaagcccgacgggacgctctgcgggccggtcgtcgacgatgtctccctagtcgccgtgcacaaacacgctgcccgccggttgttcatgtagtccgtttccccgcgtgcagtgtcagtacaaccatgtaccagctttgacccgagaaactaacaagccccgaaccacagaacttttcattgttctttttttttgttttttactttcatcactagctgttcaatagtgcaagtaagcaccaaagggattcaaggtg

SEQ ID NO: 1880 - DNA, 1055 bp, Zea mays
  Clone ID: 700169861_FLI
ctcagatggtgacaaccggcttctggtgtatgaatttatgcccaagggaagtttggagaaccatctgtttagaagtgtgtgcttcatctctatggctctgctttgttaagacccagtttcttataactttcttgttcattccctttaaccatgcaatatttctcctgtttaggaggtgctgatcctttgtcatgggcaataaggctcaaagttgccattggagctgctaggggcttgtcatttttacatgatgctgaaaaccaagtcatatatcgtgatttcaaggcatcaaacattcttctcgactcagaattcaacgcaaaactttcagattttggcttggcaaaagctggtccaactggggataaaacccatgtatccacacaagtcatgggtactcatggatatgcagctccagagtacattgcaacaggccgcctctctgcaaaggcagatgtctatagcttcggggtggtgttgcttgaactgctcactggaagaagggctctggataaatcaaaaccaggctttgagcagaacctagttgactgggccagacctcacctgggcgacaagcgcagactgtaccgtatcatggacacgaagctgggaggacagtaccccaaaaagggcgcaaatgccattgcaagcattgcctcgcaatgcatttgcggtgacgccaagctgcggcctccaatgtcgcaggtgctggaagagctggaacagctacaagatgccaaatatggtgcaccatcgccattagtcgacatccggaaagcctcgcacgccgcccccaaatcgcccatgagcagcaccccaaaatcgccgctgagcagcaccccaaaatcgccgatgagagctcaaccggcagcacggccttcgccacggcgctcgcttggagcagcagcacctttggcaggataccgcactgcccaagtgcactagaactttgcccaagtgcactagaactggacttattagcggggccaaggcccctgtaggctgtgtgtttgtgggctcaagctgtgagcactgagcatgttgtagcttttgct

SEQ ID NO: 1881 - DNA, 1610 bp, Zea mays
  Clone ID: 700169889_FLI
gcttgccggtcccgaataaagagcagcagcgcaagaggtcggtagagcgagaagaaggcaatggcggccgagagcttccttttcacctcggagtccgtgaacgaggggcaccccgacaagctgtgcgaccaggtgtcggacgccgtgcttgacgcatgcctcgcgcaggaccccgacagcaaggtggcctgcgagacctgcaccaagaccaacatggtgatggtgttcggcgagatcacgaccaaggcgaccgtggactacgagaagatcgtgcgcgacacctgccgcgagatcgggttcacctccgacgacgtgggcctcgacgccgaccgctgcaaggtgctggtgaacatcgagcagcagtcccccgacatcgcgcagggcgtgcacgggcacttcacgaagcggcccgaggagatcggcgcgggcgaccagggccacatgttcgggtacgccaccgacgagacccccgagctgatgccgctgagccacgtgctggccaccaagctgggcgcgcgcctcaccgaggtgcgcaagaacggcacctgcgcctggctgaggcccgacggcaagacccaggtgacggtggagtacgtgaacgagggcggcgccatggtgcccgtccgcgtgcacaccgtgctcatctccacccagcacgacgagaccgtcaccaacgacgagatcgccgccgacctcaaggagcacgtcatcaagcccgtgatccctgagaagtacctcgacgagaagaccatcttccacctcaacccgtccgggcgcttcgtcatcggcgggccccacggtgacgccggcctcaccggccgcaagatcatcatcgacacgtacggcggctggggagcccacggcggtggcgccttctccggcaaggaccccaccaaggtggaccgcagcggcgcctacgtggccaggcaggccgccaagagcatcgtggccagcggcctcgcccgccgctgcctcgtgcaggtgtcgtacgccatcggcgtgccggagcccctgtccgtgttcgtcaactcgtacggcaccggcacgatccccgacaaggagatcctcaagatcgtgaaggagaacttcgacttcaggcccgggatgatcagcatcaacctcgacctgaagaagggcggcaacaggttcatcaagaccgccgcctacggccacttcggccgtgacgacgccgacttcacctgggaggtggtgaagcccctcaagttcgacaaggcatcggcttaaggttgggagtgtcactgtggacatgaggactaccttcctctggctctgctgttacctgcaagcattgctgctgctggatgtgtgtgtttgatcagtgactggctgctgctccatagaagatgaacggagagaaggatgatgaagggctttggcaatcgccgctgcaactgcaacccatgccatgccggcttagtgattgggtataatttggcttggcagcagccagcattattatgtgctgatctgttatcttttactagtttggtcgtccgatatctttctttctttttccccccttttcgactctgtactgaaactgctgagagattcgcagtattgttgtatcgtattcatatgctactgtt

SEQ ID NO: 1882 - DNA, 1459 bp, Zea mays
  Clone ID: 700169890_FLI
gttggactaccatttcaagtatgagcaagaggccggctcctccgtgtattcattctttggcttcaatgggacagctggtgtctggaggatctcagcgatcgatgatgctgggggctggaaggaccggacgacagtggaagatatggacctggctgtccgtgcgatgctgcagggatggaagttcctttacgtcggcgacattaaggtcaagagcgaactgcctagcacattcaaggcgtaccggtttcagcagcacaggtggtcatgtgggccggcgaacctgttcaagaaaatgatggtagagattttagaaaacaagagagtgtcgctgtggagtaaaatccacctatggtacgatttcttcttcgtcgggaaagtcgctgctcatacggtgacattcatctactactgcttcgcgatccctgtgtctgttctgttccctgagatccagatccctctctggggagttgtctatgtcccgacagtcataaccctgttgaaggctcttggcacaccgagcttctcgccgttacagttcctttcacctggtgatcctctgggtcctgtttgagaatgtcatgtcgttgcaccggattaaggctgcagtaagtggtcttctggatgctggtgggcgagtcaatgagtgggttgtcactgagaagttgggcgacaccagcaaggcaaagcctggcaccaatggatcagacactgctgtaaaggtgatagatgtgaagctaacagaaccgcttgttccgaagctagtgaagaggcgagcaagattttgggagaggtaccactgctcagaacttttcgttggaacctgcataatcctgtgtggtttctatgacctgctttttgcaaataagggatactacatttttctcttccttcaaggcacggcgttccttgttgttggttttgggtatgtcggcacactacctccttgcactgcataagctgtcatggacaactgatattacctgctcaccagaaactgagcaagcaaagctcctctctcctgcacatatcaaactcttgaattcaatgatagttgagcaatgttcccccatcagtcttggcctgacatgatccaccgccgagaaggttgttcagatatcgccgtcgttctcctgtcagtgttggtcagatttgagccaaaccattctttattgtcagaaggccattcaaatagtgtcaccattgcaaattttataataacggtgtttaccgaagcatcatgaaaaaaaaatgattgatgcagcagcatttcgttcgcattccatagagatgcagttcacatccagtattttttttttggaaatctagtgatattactcagagttcagattcataatggaagattgttggcttcctcagttcataacctgtgtaggcttaaaacttgtagatgtaaattgttattaacactaatattttttattgaatccgggtattattg

SEQ ID NO: 1883 - DNA, 555 bp, Zea mays
  Clone ID: 700169956_FLI
accggagcaggtagaacgctgcacaatccccttcgccgccgccaagatggtgaacgttcctaagaccaagaagacgtactgcaagaacaaagagtgcaagaagcacacactccacaaggtgactcagtataagaagggcaaggatagcctgtctgcccagggaaagcgccgttatgaccgcaagcagtcaggatatggtggtcagaccaagcctgtcttccacaagaaggccaagaccaccaagaagattgttctgaagctgcagtgccagagctgcaagcactactcacagcacgccatcaagagatgcaagcattttgagattggtggagacaagaagggcaagggcacatctcttttctaagcttctcgtccacctgtctggttgttgagttgaagctgtgggtctactactactgttataaaaacatgtcgccaaatttcaatgttaatgtagcaatgaaagcagaccatgctatgtatccaaattccaatgcctgacatttgttctggggtgttggtcgacttttggctaaatgaaagttttgtagcttg

SEQ ID NO: 1884 - DNA, 1220 bp, Zea mays
  Clone ID: 700169969_FLI
ctcgcattgcattgcattccttcagttcagtagtgtgctctgacagtgagatggcgagcgtgaaggttttcgggtcacccacctcggcggaggtcgcccgcgtgctcatgtgcctcttcgagaaggaggtggagttccagctgatccgcgtcgacgcctaccgcggcaccaagcgcatgccccagtacctcaagctgcagccgcaaggcgaggcgctcaccttcgaggacgagagcctcaccctctccgactccagggggatcctccgccacatctcccacaagtacgcgaagcagggcaacccgtacctgattggcacgggcgcgctggagcgggcgtccatcgagcagtggctgcagacggaggcgcagagcttcgacgcgcccagcgccgagatggtctacagcctcgccttcctgccgcccaccctgcccaagcagaacgacaacggcaacggcggcgcgttcaacgccagggacgccaccgtaggcagcaacgccgacgcgtccagcggcaagcgcggtgtggccgggtcacagccggcggcgagccagaccaaggtgagcgcgcagaaggaggaggagatgctgaagctgttcgagcagaggaagaaggacctggagaagctgctggacatctacgagcagcgcctggaggaggccacgttcctggccggcgacaacttcaccatcgccgacctgtcgcacctgccctacgcggaccacctcgtctccgacccgcgctcccgccgcatgttcgagtcccgcaagaacgtcagcaggtggtggcacgacgtctccggccgcgacacctggaagtacgtcaagaccctgcagcgcccgccgtccacgtccaccgacgccagcgccaagaacggccagctgggccagcagcagcacctgccgtcgtccaccgacggccacggcgtgaagacccaacggctggtccagaacgagcggcacttctagctgttgccgtcccttcccgccgacgaataaactacctgcgccgccgccaccgccgccatccatcaacatggttccttgtgctgttcgtgtcgttttcatacgtcatacgtgtcttgctgcttttgaagctccgttcccgggtgcagggacctacgagtccattccgtcgtttgctgattctgttcgtcgtgtaataaaatgaaaaccccaccccgttttgaatgaaattcaattctcagtgtcgtgtgaaat

SEQ ID NO: 1885 - DNA, 1634 bp, Zea mays
  Clone ID: 700170013_FLI
agcaccacaagaagaaacataggtccctagaatctcgtggcgcagactttgatgccgagcggcgcctgtactctcatgcgttcaagaagtcctcatcacttctgagccgcttaatgaagcacaagtttgggtgggtgttcaacaagcctgttgatccagtcacacttggtttgcatgattattttactattatcaagcacccaatggatcttggcacaataagggggcggctgagccgtgggcagtacaggaaccctaaggagtttgctgaggatgtccgtcttactttccataatgcgatgacatataatcccaagggtcaggatgtgcatttcatggcggagcagttgttaggaatctttgaggcacagtggcctgagattgaggctgaggttaactacctcgcatcatgtcctccattgccgaagaagtttcccccgccaccaattgacctgcgcttcctagagaggtcagattcaatgagacaccatgtggcattggacaccaattcaagaccgatcagtcatactcccacttatacccgaactccgtcaatgaagaaaccaagagcaaaggatccaaataagagggacatgacaatagatgagaagcgtaagcttagtgagaacctccagaatttgccgccggtgaagcttgatgctgttgtgcaagtcattaagaacaagaacttatcagttaagcaacatgatgatgagatagaggttgaaattgatagcatggatgctgagacactttgggagcttgacaggtttgtgtcgaactacaagaagaacctgagcaagcaaaagagaaaggccgagcgagcgatgcttgcccgacaagatgcagagttgcgtgcacagcaccctatacaacaaccacaaccaaccccagtcccccaagaaccttttggtgaaaaatctccaaaacaagttgtgaaagattcgctggaaggcgagcaactgccagcatctgcaccagaacaaaatggtgagaatagacagaatgcgagtagttcaagcaattcaagcagctccagcagtggctcaggatcatcttctagtggctcagacagtgatagctcctcttcagatggatctgatgctggcaattcatcttgagatatagatgcatgcctttttcttttgagaccagtgccatggggccttgggcgcctccgttctggtcagccctgatgttaacgtttctgctagataccgttcttgtttggtagacgagaaacattgtgtggctggtgttaaatggttcagaagttctgtcgagtaggcaataactgcctatttgacgcgacaatagcaccataagattgtacatgcttaccttgtctggcttagggaacccctgtagtttaagtaggttttgtatgtcgattcacccgctgatgaaggcagtaacttgtaggtttcgtggtgtacccgcctaataagactaggcttgttgctgacaccgtcccttggtacaccgcacttttgctaggagccctctggctggcccagacagtactagcatgtacattagcggcagcttgaacgctgattttgtttagctgtgttgattgcagtatgtaggaaggcgactgctgtatgcatttttttcttacttttgtttaactt

SEQ ID NO: 1886 - DNA, 1530 bp, Zea mays
  Clone ID: 700170064_FLI
tcaagcagcagcagtttgttccaaaggattggtgggtcgaagatctgacagatctcgacattgacgcctacaagcaagtcataacagcagtcaaaaccaagggtacggtgcccaaggatgtgatcggtgaggcgattaaagcctacacttacaagaagctcccgtcactaagcaaggtctcgatgatccatggtgacgcaaaagttcgggctatgctagttaccatcacatgcctgttgccatccgagaaaggttcggtttcgtgcagcttcctcttgaagttactgaaggcaacaaacttgctcaagtgtggagagatgtgcaggaaagagcttatgaagcgcatcgcacggcaactggaagaagcgtcagtgttagatcttctgatccctacggtggatggggataccaccgtttacgacatcgacctgattcttagcattgttgaagaatttgtcagacaagatagcaagaatgcccagagacataacggtggtgaggtgaatgaccacgtatctgctcctagtgcgtcaatggttgcagtggccaaaactgtcgatggatatctcacagaggttgcaagggacccaaatataccggtctacaagtttttcagcctagctgagacggtttcgaccggttcaaggccggttcatgatggactgtatcgtgccattgatatgtatctgaaggagcacccaagcttgggcaagagcgacaagaagagattatgtgccctgatggactgcaagaagttgtcgcccgatgcgtgcgctcatgccgtgcagaacgagcgcctgcctctgaggatcgtggtgcaggtgctataccacgagcagacaagggcctgtgccgcagccaccgccatccgagccgacagcatcggcatcggctcctacgagagctcaaggtcaggcgccacaacgaacacagaggacgagtgggacggagtcatggccgtggaggacctcagcctgtccaagacgacgaagctggtggacaaatgcgacacggcggccagtacggtcgtcgtggggaaggacaaggaccacggtggcaacaagggcgccaccggcagggtggcgaaaggtggcgctggcgcggcgacaccaaagaaggcgctcgggaaaacggtgtccggcaaagggcagaccggggagcgcagcagctcggactcatccgacagcgccgtcgccgtcgcagtcttgaccagccaggagcatcccaagaggacgacccgcgcaaggaacgccgccaagtcggctgctgcgtagcccttccgctgagagaaatgctcaaggagcactagctaggttttagcagtcgtctgttctttgttattacgagtgttgcatagaagccaggaccatgttttttacacgtctgtagctgcctgtagggatggtgtaataccaggtacgtgcgttgttaggtgatgctgttagcacgtaggttccaaacctatgagaccttgggctctgctgggtttatgtcgaactcgcagttgtgttataagaatcctactttgat

SEQ ID NO: 1887 - DNA, 1243 bp, Zea mays
  Clone ID: 700170122_FLI
cgtcaggacccggaccagacaccaatcaagggcgtctcggctcatcacaggcgctgcggcaaccagggcacgcggcacggaggtcgattggccgaaggttgggggaccggcggtcgacaccccagccgtggatcgagtgcggagggggagaagcgtctatcccatgtcccgcgacggcggggaatagggcgacagctgcggcggggatcggctgcggcggctcgacgaggcggcggcggcggcgcgggtgggcggcggcaccatgtctgcggtagtctgtggcaagaggtcctcctccatcttcgccgacgagctcctcccgccatcccctacctcccctcactcctcccaccagccggcgcccaagaggtcccgccggtccccctcgcaccgcggcagctccgacggacaccgacgggaggcgctcgtccaccatctgcttttactcttccccgacatggatccacagttgcttgaaaaagctctggaagcatctggagatgacttggattctgcaataaagagtttgaatttgctacgcttagagtcagcagaggctatcttgtcatctactggtttcaatgaaaatggtcagcatactgcaattcagcctcctgttgaaggaattcctaatggtggtgtggatacgactacagaacatcatcctactgtagataattaccagacaagtaaaaatggctctgaatgggttgagctatttgtcagggagatgacaaatgcttctgacatagatgatgcacgggctcgtgcgtccagagctttggaggctttggagaaatcaattgtagagcgtgcaggagctgaagctacacagaaccttcataaggaaaacatgatgctcaaagagcaactgactgttgttctgcgagagaatgctgtgctgaagcgggcggttgccattcaacatgagcgccaaaaggagtttgacgagaggtctcacgaggtccagagcttgaagcaacttgttttgcagtaccaggagcaagttaggacactagagataaacaactatgccctcacaatgcacctcaagcaggctcagcagagcagctccattcctgggcgtttcaaccctgatgttttctgagcagagactaataacctacgaagataccttgttttacaactgcccctgaaatggggatacctgatgggtggattcaccgcccatgggtccaaaattttcaagttacggtttgatttaaacgcgttgctttcaccc

SEQ ID NO: 1888 - DNA, 819 bp, Zea mays
  Clone ID: 700170162_FLI
tcagctggtatctgtggctttttgtaatcttattcctgctgctgaatataaatggatggcacacatacttctggttggctttcttgcctctatttctgttacttattgttggtgccaaactagaacacattatcactcggttggctcaagaggcagcgatatcattatcaaataatacagaggaagttccgaaaataaagccatgcaaggaccatttctggtttcacaagcctgagctagtccttcatttgatccatttcatcctgttccagaattcgttcgagattagttttttcttctggattctggtatcagaaggtttcggttcgtgtatgatggaacggaagccttatgtcatttccagacttgttatcggggtgatcatcgaagtcatctgcagctatatcacgctgccactatacgccatcgtgacccatatgaccggacagatcaagctgcatggttttggctcccgcgtgcacgagagtgtccatggctggatcggcttgaggaagaaacccttctcgttctggaagattcccggcggtgaccctaacgctgattccggcagggaggccgacgtaacccgcagggtggccaaggagcggtcggggagctcgcgcagcatgccgatggcgccggctgacgagatcgtcaccgtcgacgacgtcgcggtggctgcagctgccgttggccaaggaccataaaattcctagctagcaaacaccagcagggaaggcaggcaggctgccgaggtaccgtgcgcagcgggttgatgggtcggacgctgcggaaaattcctcgtgtcgggagcaggct

SEQ ID NO: 1889 - DNA, 1460 bp, Zea mays
  Clone ID: 700170277_FLI
ctcgcgacctccgtccaggatgcctgggctcgctaggagcccagctcaccggttccaggtgcagagatgccgcaaagagcctcgtgaggatgctcggtgccaacctcgaggaccagtggatgcagacgatgaacctcgcagtaaccaactggatagtcgagctgagatcctcgagccgctcgtccggcccgccgtcgccgctcttctcatacgccgtctcagcaagcgggctctggaaggtgcagctgtactgcccggtcatagccatgggtatggaggaagctgcagagacaccacaggatgagcgtctcctcttctcactcatttatcaacaagtcgagtgtgtcattcagctggcctatagaacgacaagaagggataactggatcgatgtcgaggtgaaggtggacaacgtaaggtcagttgttttaacatgtaagaatcagttgtttctataacatgaactggattcaggtttatattctctttcctagaaattcatactatgattaactatataaatcaactttattgaaaaaaacatttgtccatatacatggactatctaataataaaacaacataaaaggggggaaaaaaaaccactcacttttggcagctatcacaggtgtgatgtggactctttggtctccgagacccttatggcggagcgtggatatggctccgaagagaagcacttcccatctcgtgtgatgctgcaaatcacacctacgcaacaatctgatgtgctctctgtttctgtcggcaagtccaacgacaaccccacacacgaattcggcatcgagaagggctttgagggttcatttgaacccccaaacgcatttggcctgaaggcgtcagtaactgaaagccttacactagccatgaagccctggaaattcgagcagtctgtgcatgggaacactgcaaccttgaactggtttcttcatgacggcgtcaacgggagggaggtttattcctcgaaaccttcaaagatttctctgctccaaccgaaggcctggttccgtgacaggtactcaaatgcgtaccgccccttcacaaagcagggcggtgtcattttcgcacgtgacgagtatggagacagtgtctggtggaaggtgtgtggtgcaacgttaggacagactatgaactggcaaatccgaggctggatttggctaacctactggcctaacaaacaacggaccttccacaacgaaacgagatggcttgaatttagagagtgcctgcagctcccccttaccaagtttccataaaccacttgtactctgaaatgaatgggttgtatagcagtgtagaaccatagacattgaaaaatccatgcatatttggggggcacaaaaaagagtatgatactctattgtaactgaatgtactgttacatcgaaatgacctcctcatatgcctgccttgcaattttaatgcaatcctaaaaatttattc

SEQ ID NO: 1890 - DNA, 1208 bp, Zea mays
  Clone ID: 700170284_FLI
tgtgagcctgctgccgtcttcttccgccgccgccgccgtcgtcttcgtccgtaggtagcctcctctctcctgtcctcgcttgatcttatctactagtagtactcctgatgagacgctaagaaatctcgcttatattatgttaaccctgaaaccgaaagtgagtcttgtgcaactgtaaaaactgggacgtcactgaacgaacgatagcctgggttcgttcggtcgtagtggaggatacagcaacatcctcttaagttgaatttacgaacgcagttaatttgtttccctgtgccgttcgctgcgttacgcacaaggatctttactcctggatttcaatttatttattttccccccgcatttaagtattgcggcttgccttgccttgccttctggatgtcgcgttgcgccgctggctgatgatggcctatgtcctggcatgtgcagcagatcagagagcggggaggaagaaaaagcgatcgatggcgtccaactacgtggacacgacgggcgaggagggacggttccacggccctcacagccacagcaccagcacgaccccgacgggcggcgcggcggcggcggcggcatcgccgcgcaacttccggcgcagcttctcctccgcgtcctccgcgggccacagccacggcggcggcggcggcggggccaagtgcgtgtgcgcgcccgcgacccacgccgggtcgttcaagtgccggctccaccgcaccaactcccagggccacggccacggccacccgcacccgtccccgccggcctcccccgccgcgccggcgcagggcgtctcgtcttccgcttcctcccgcaccgtcgaggccctgtgagtgtccgaggccaaagacgggcgaggcgtggggaaagtgagaagatgatgggatatacttgtcgtgtcagtctgtcagaaggaaaggagtgaagctattattccctcttgttgtgatccgcgctgttttgcctcttcccccctacccgtttcctcccttcgtgctggttgtggttctaaattcctgattgccggccgtcccgccttcttccttgccaagacgagactctcctcctcctgccactgctaccgctgctcctctcaactggtgaactggatcctgatttggggagaaggttaaactggatgcctttccatgtaattaattgcctctctttaccattctacgtgctactagtattgaagtatc

SEQ ID NO: 1891 - DNA, 853 bp, Zea mays
  Clone ID: 700170303_FLI
atgaagcccggccccgcctccgagaggaactacggactctaccagccggacatgagcatggtctacaacgtcggactctcccagctcgccaccacgtcggccgcctccctctccctcgccacgtcgccagcagccaggaccacggatgttgggaaggactatgccggcctatgcctcgtcgcggtatctgtggccatcctgcttatcacccaacaaggatcgctcctcctgtgaccgcaaaaagcgcgcgcccgcccactgccaggcctgcagaatggcctggcttttgtggaccaaaagcctccaagaccaaaggggagacgcaccgttcaaatccaagggagaaaaaagctaggacgagggggcgatgtggaagccactatcttgaggacagaaacagcgtgtataagctatttgcgaggccattttctagcacacaccagactttattccttggttacttgcagaggagatcaggagaaggaaccaggaaaactagttcgttctgagaagatttatgccaggaggaaaaagggtggcctgcgctgcttgggagaactggcgtctccttctcagtgagaagagagctggctttattccccttgcgttgacaagcccgtggtctaggcctcttctgatgcgaattttagctgtacataccaattggttcattcgtttatttttagctccatttagcttgaccattctgccctcatcccccggggtggttggtcgaaatgagaggccagtggcccagtcatgtaaataactcgagtaaacaaatgaggcagctattgcatcttattgtaatctgtttaaaaactatgacattatgaagtcctcattgttaaag

SEQ ID NO: 1892 - DNA, 760 bp, Zea mays
  Clone ID: 700170315_FLI
aaaacctcttgtcggaattcagtgccagttacttactctagtttatggtaatcccaagtaagccttctgagccgacaccgccgtttacttccatggacagcccttttacagcggctaggtaccacagcttggtcattgagaaagaaaccttcccacatgatgctttggaggctaccgcatggactgaagatggactcatcatggctgctcgccacaagaagtacaaacacatccagggtgtccagttccacccggagagcatcatcacccctgatggcaagaaaatcatcctcaacttcgtcagattcattgaggagctggagaagcagcgttcctaatctacgggaggtagatgcgacgggtggtttcatagatcaggcggaagcagagacataagccactgtgaagttccggcactggcagtggaagtttagctaggaatcaacgtttccctctcataattcgttgttctcgtggtaacataatctgtgtggaccgaatgtcgaataaagtccaggcgtccagctgatgaaataagcaccggtgttggtgcgctctaggtggatatatatccggtaattttcggcaaggggaggccttggcacatttttgtctgagttccggcggtagcaagaccggccgtaatagcattaggcgtttctatgttggtgccgcaggaatgcatatttgctgttgctggtcaaagtactgggcttcataaaattttgggctgttcggttgcgtctacagcagtttaact

SEQ ID NO: 1893 - DNA, 514 bp, Zea mays
  Clone ID: 700170347_FLI
cttcagtccacccagccagccagcaaggcagcacccaagacacgcagcgcaggcgcagcccagccagattcgacccgagttcgcgacgagagcacgagatggcgatgcggaccgcgctgacttccctccccgcgcgcctgcgcgcccctgcgccccccgcggcgacgggcggccggcgcctcctcagcgacgggaaggggcgcgtgctcagcgaggaggagcgcgccaaggagagcgtctacatccagaagatggagagggagcggcaggagaagctcaagaagaggctcgagcaggagaaggccgactctgacaaggccaagcccgccgacaccgacaagaaggccgagggatctacctagctaggattggcatggcgctgtcggaaggcaatcacgtttcgcatgtatccgaatccgatggtcagctttgtgaatgaataaattctgtaaaacgtcaacagcactggatatgctgttgcttcggttgcttgcatgttgaagttgaagacgac

SEQ ID NO: 1894 - DNA, 610 bp, Zea mays
  Clone ID: 700170367_FLI
atctgtttgttgggtcacagatggtccctgatcgctggaaggctgccgggcaggaccgacaacgagatcaagaactactggaacacgcacatccggcggaagctgctgagcagggggatcgacccggtgacacaccgccccatcaacgagcacacgtccaacataaccatatcgttcgaggactggggccaggggaaggcgctcaagtgccccgacctgaacctggacctctgcatcagcccgccgtgccaggaggaggaggaggccatgctgctgaggccggtgaagcgggaggaggccgggctctgcttcagctgcagcctggggctccccaagagcgcggactgcaagtgcagcaacttcctcgggctcaggaccgccatgctcgacttcagaagactcgagatgaaatgagagcttccatccatctctgtctgtctctctctgtaacttcacccctgataacacgcaggagtagtagtcaccaactgatttgtcgctccattaattctgtctctctctctctctctcgctatgtaaattagcatcaccaactgattgattgatcatgggcaattaataatacttgttgctgctgcaaattgacatt

SEQ ID NO: 1895 - DNA, 1493 bp, Zea mays
  Clone ID: 700170547_FLI
gctcgcacacaacatcctatcccgcctgtccccaagagacgttgcgtccatcggatcggtgtgcaccagaatgcatgagctgaccaagaacgatcacctgaggaagatggtctgccagaacgcgtggggaagggacgtcaccgtgaggctggagatgagcaccaagatggtaggatggggccgtcttgcgagagagctaacaactctcgaggccgcctcatggcggaagttcacggtcggagggcgtgtcgagccttcccggtgcaacttcagtgcctgcgctgttggcaaccggcttgtcctgttcggaggggaaggcgtgaacatgcagcctatggacgacacgttcgtgctcaacctggaggccgcaacgccggagtggcggcgcgtcaaggtttctgcctccccgcccggccggtgggggcacactctgtcgtggctgaacgggtcgtggctggtagtgttcggaggctgcgggcagcaaggtctgctcaacgacgtcttcgtcctcgacctcgacgcccagcagccgacgtggagggaggtcgcgagcgagggccctccgctgccgcggtcctggcacagctcatgtaccctggacggctcgaagctcgtggtctcaggtggctgcgccgagtctggtgtcctcctcagcgacaccttcctcctcgacctcaccaaggagaagcctgcgtggagggagatccctacgtcctggtcgcccccgtcccgcctcggccacaccacgtccgtctacggcgcgaccaagctgttcatgttcggtgggctggcgaagagcggctcgctccggctgcgctccagcgacgcctacacggtggacgtcagcgaggacagcccgcagtggaggcagttggccacgacgaccgggttcccaaacgtcagtccgccgccgaggctcgaccacgtcgcggtgagcctgccctgtggacggatcatcatattcgggggctccatcgcggggctccactcccccgcgcagctgttcctgatcgatcccgcggaggagaagccgatctggaggatcctgaacgtgcctgggcagccccccaagttcgcatgggggcacagcacctgcgtggtcggcggtaccagggtcctggttctcggaggccacactggcgaggaatggatactgaacgagctgcatgagctctgcctggcaagcaggcccgacgaggacggctgatgacttcttttcgttgcacttgcacacatatggttcgttcgtctctctctgttttacgtcctatatatgcgcgctatgtcttgtttgtgtatcatctactttcagtctgttgctgcgtcgtgtcggtccgtcggtatgagaaaaaaaaaagcggaaattgattttttaaaaattagtctggatgagtttagtctattttattgtcattggagaagttctctttcatcggtctaggataagattctatggtctatatgtatgtatattttcatgtctcagaaaacac

SEQ ID NO: 1896 - DNA, 1071 bp, Zea mays
  Clone ID: 700170623_FLI
gaaatgatgaaggaagtagaagccccaaaagtaatcatctaacactgttaccagaaagggtagcactttatggtgataaagtttggagatcagcgttgataagtgtaatcaggaattatacgagcgaaagatcctctccgacctgcattgtggctgatgacagcgtgttcctagctctcattgtttcttttctgttaccatcttcaaaagtcctcgctatgtttccatgtcttagagacattggcctcaactatcttcaagctgttgcagatgcaaataatttatccatggaccggattaaagtgattggtaaaaaggcatcgtcccttactacaaatgacttaaatcatgaaaaggttaatatgttagtgggggaacccttttatcatggaagtgaagggatgctgccatggcaaaatctgcgtttctggaatgaaaggactctgcttgatccgttgctctctgaggatgcattcatcatgccttgtaagggaatattaaggttctgtgccatgtcacttccggacttgtggagaagccgtcgtagccttaaagatgttgagggttttgaccactcagttgttaatgatactttaggggcctgtggtgacctgcctggagagcaacaaggcccttgcctaccttattatgtgtggcaatgcggttataccaagaaattaagtgaagtttactctctcatggatttgaacttttctgagcctatccactcttgttttggtgaaacaaaggttgagtttgcccacgatggaacatgccatgggttcgctgtttggatcgactgggtacttgacaaggaaaattccatagtgataagcaccgggccagagagcagatactggaagcaaggggtgcagctgcttagcacgcctgtacaagtgaacccagcgaattcggtgatgcacgtggaggcgaatttcgatgctgtcattggggagctcacgtttaaatccaccacgctctcatgatgccaactgtaatatgtggacaaccaagcctcatgcgtgtgttgttcttaaaagttagcatttgtcgctgcgttttgttcgtctg

SEQ ID NO: 1897 - DNA, 1173 bp, Zea mays
  Clone ID: 700170628_FLI
gtcagtcagagaggtccagcatgaggtctgatagacagactactgatgagagccagtctgatagacaaaggcgaacttatagaactgactcgtaccggcatgaggcaagttctcagtatcttgtgcagggccaaccttttggatccacaagttctatgcgcaaacaaggaaacacatcacatggggtttatacaccaccatctacgtcttcaaatggtcccagtgctttatctggccctccaggaccaccattttttatggtgtactcttatgaacaaggctcaaatcatggtgctactgctacctcatctgaaccaattgaatttggatctcttgggccacttcctgcagcagatggtgatgacataccaaggtcgacacgccaaataatgcctaatgggttttatgggcaaagacgtggtccatataggggcggttcctctcattcgtctcctgatcaaccatcctcacctcagcctcgtcggtagttgagtcttcatatgatggcttgatcacttggtttctgtcattgaaaccttgcgatagcaatattttggttcacccctcgtgatcatattctgcatgggtgaagatggttgggccatcagcagccaccaaaaaaaaaacacacacacaagtatatgccctagttggttcttggtgctttgtgatctctcagaagcactgaattgtgaataccgtcaaaagcaattatcggcaggttattttaccagtcacaatggtgcttcttggattcaaaacaattatcttcagaagaaatcatggaaccatcaaacccagaatatcttcacacagaaatcagaattgaatagaagattatgagcaagggcgaactctgctctggccgtctcattatatgaattgtgtcaagggtaataacaatattagtatggatggagcaggaacaagcattgtggcgctgcatcagaaacaatctggaatgctttgggttttaatgtgtctgggcgtgcgtaagtgaaagctaataatgaattctcgtaccatttttaggtaggattaagctcatgtaacacacagcacactattcactaagatgtactatgagctaagtgaaacgtaggaacaaaggtgccgtttggtcacatatttgtaacgtaatgagtaactaataatcttaaattatgtttgttt

SEQ ID NO: 1898 - DNA, 1249 bp, Zea mays
  Clone ID: 700170732_FLI
cacatgctagcgtgcgtgtgcaacggctaccacctgcgcgaaccaccgcgagcgcccgcagctaagctagctctcgctcgcgcgctctgggagaggagagatcaatggcgtcccgtggcagcatgacctgtagtcttcagctcgccgtcctcgtttccgccgccatcgcgctcgggttcggcgtccgggccggcgaggcgcagctgtccagcgagtactatggccagacgtgccccgtcgtgcaccgggtcgcgcggcgggtgctgaagaaggcgcatgaggccgacgtccgcatctacgccagcctcacccgcctccacttccacgactgcttcgtgcaaggctgcgacggctccatcctgctggacaacagctcgagcatcgtgtcggagaagttcgccacgcccaacaacaactcggcgcgcgggtaccccgtggtcgacgccgtcaaggcggcgctggaggaggcctgcccaggcgttgtctcctgcgctgacatactggccatcgccgccaagatctcggtcgaactgtccggcgggccaaggtggcgcgtgcctctcggccggcgcgacggcaccacggccaacatcaccgccgccaacaacctcccgagccccttcgacaacctcactacgctccagcagaagttcggcgccgtcggcctcgacgacaccgacctcgtcgcgctctcaggggcgcacacgttcgggcgcgtgcagtgccagttcgtgacggcgcggctgtacaacttcagcgggacgaaccggccggacccgacgctggacagggggtaccgggcgttcctctccctgcggtgcccgagggccggcaacgcgtcggcgctcaacgacctcgacccgaccacgccggacaccttcgacaacaattactacaccaacatcgaggcgcgccgtgggacgctgcagtccgaccaggagctgctgtcgacgcccggcgcgcccacggcgccgatcgtcggacggttcgccgccagccagaaggagttcttcaggagcttcgccaggtccatggtcaacatggggaacatccaggtgctgacggggagtcagggtgagatcaggaagaactgtaggatggtcaacggaagctagacccgtcgacggcacaagttactggtgaactgaaagcagttctgctgtatgtacgatgcctcaaacatgttgatgggataatggtgcgccgatcgatttatttgtcaaggagatccaataaattggttttttgc

SEQ ID NO: 1899 - DNA, 1600 bp, Zea mays
  Clone ID: 700170783_FLI
gcagcgcaagaggttggtagagcgagcgagaagaaggcaatggcggcggagagcttcctgttcacctcggagtccgtgaacgaggggcacccagacaagctgtgcgaccaggtgtcggacgcggtgctggacgcctgcctggcgcaggaccccgacagcaaggtggcctgcgagacctgcaccaagacgaacatggtgatggtgttcggcgagatcaccaccaaggcgagcgtggactacgagaagatcgtgcgcgacacctgccgcgagatcgggttcacctccgacgacgtggggctcgacgccgaccgctgcaaggtgctggtgaacatcgagcagcagtcccccgacatcgcgcagggcgtgcacgggcacttcacgaagcggcccgaggagatcggcgccggcgaccagggccacatgttcgggtacgccaccgacgagacccccgagctgatgccgctgagccacgtgctggccaccaagctcggcgcgcgcctgacggaggtccgcaaggacggcacctgcgcctggctcaggcccgacggcaagacccaggtgacggtggagtacgtgaacgagggcggcgccatggtgcccgtccgcgtgcacaccgtgctcatctccacccagcacgacgagaccgtcaccaacgacgagatcgccgccgacctcaaggagcacgtcatcaagcccgtcatcccggagaggtacctggacgagaagaccatcttccacctcaacccgtcggggcgcttcgtcatcggcgggccccacggggacgccggcctcaccggccgcaagatcatcatcgacacctacggcggctggggagcccacggcgggggcgccttctccggcaaggaccccaccaaggtggaccgcagcggggcctacgtcgccaggcaggccgccaagagcatcgtggccagcggcctcgcccgccgctgcctcgtgcaggtgtcctacgccatcggcgtgccggagcccctgtccgtgttcgtcgactcctacggcaccgggaccatccccgacaaggagatcctaaagatcgtcaaggagaacttcgacttcaggccagggatggtcaccatcaacctcgacctcaagaagggcggcaacaggttcatcaagaccgccgcatacggccactttggccgtgacgacgccgacttcacctgggaggtggtcaagcccctaaagaaggcatccgcttaagaatgtattgggaagttcactggacatgaggttcatcttcgtctggctctgctgatacctgcaaggattgctgctgctgctgccgcccctggatgtgtgtttgatcagtgactggctgctctgctccatagaagatgaatgaagagagagatggtgaagaaggctttggcaaatggcaattgccgcagcaagccatgtcggcgccactgaccggcttagtgattggtataatttggtgtggcagcagccaggattaatgcgctggtcttttatctttactactagtttggtctcgtccggtatcttatttttctttccccttttcgagtctgtactgaaactgctgagagatttgcagttttgatctatcatatcctttggt

SEQ ID NO: 1900 - DNA, 1008 bp, Zea mays
  Clone ID: 700170801_FLI
gcgccgcgtgtggggacatcgaagctgcccgccgggtgttcgacggaatgcccaccaccaacggcatggcttgggcgaccatggtgtccgcctactcggatggctgcctccaccatgaagcgatgcgtctgttcgcccacatgtgccatagaacgccggtcctggacggcgattgctactcccatgccatcgtggccgtgctgcggtcatgtacccgtgcaggcgagctacgtctcggtgagcaggtacacgctctcgtcgtcaagaaaggcaggatccacggtgacattggcagctcgctagtgcagctgtactgcgatggaggcggttttcacagaagcgcgcggcgagttctcgcgacgacgatgcagcaccactgtcaggaaccagtccctgaggcggcctggacgagcctgatcacatcctgccaccgtgaaagcctactgagcgaggctgtggatgtcttcagggacatggcgtcctcgggcgttccaaggagcagcttctccatgtcgagcatcctcgcggtgttcgcagagtcacaggacccagggtgttgctgcgggcagcaggtgcacgccgacgccatcaagcgcggcatggacacgaaccagttcgttggctccgggctcatacacatgtacgcgaagcaagggcggctggcggatgccgccagggcgttcgagacgatcggtggcaagcctgacgccgcgtgctggagtgccctggccatggcctatgctcgcggcggacggtacagagaggtcaccagaatcatgtatcagatgaaagctgccgggatgaatccttctaaggagatgaccgatgcggttaggttggcttgtttcagatgataatcctgaactactagtagtctggtaggagtgccaaagagtgagttactttgattgtacaattgtgttaagcagacgccagtgcactggtgtctgattccaaatgataacactgtgtagccgagtttgagttaaccaaggtcatgtttgtttt

SEQ ID NO: 1901 - DNA, 575 bp, Zea mays
  Clone ID: 700170810_FLI
ccgctcctgagtcctgtccaccctgccaccgccgacgccgcgccgccgcagcaattgtcaccgtcgctatggcccgtatcaaggtgcacgagctccgggggaagagcaagacggacctgcaggcgcagctcaaggagctgaagtctgagctctccctcctccgcgtagccaaggtcaccggcggcgcacccaacaagctctccaagatcaaggtggtgcgcacctcgatcgcgcgcgtgctcacagtgatctcgcagaagcagaagtcggcgttgcgggaggcgtacaagaagaagaacctgctccccctcgacctccgccctaagaagacccgtgccatccgccgccgtctgaccaagcaccagctctctctgaagaccgagagggaaaagaagcgtgagaagtacttccccatgaggaagtatgctatcaaggcctaggtcagaactgtgagatgctgcgcttagcatatcatcggctgtgttttaatttttggtttgtatggacatttgctgtgggtcggaagtacgatgtattcctccatttccataaatggctaaattggtttgactggc

SEQ ID NO: 1902 - DNA, 1159 bp, Zea mays
  Clone ID: 700170869_FLI
gagtgtgtacactggaggagctccaagaagcaaccgacaatttcagttcctccaacctaatcaagactagtcctcttgcacaggattataatggtcagcttcaagatggttcacgagtactggttagatgtttgaggctgaagccgaagtactcctcccagagccttgtccaatacatggagattatttctaaacttcggcaccgtcatttggtcagcatcattggtcattgcattgtcagtgatgaggagaatcctaataatgcgagctcagtctaccttgtttctgaatgcgtgacaaatggatctttaagaagtcaccttactgagtggaggaagcgtgaaatgctcaagtggccccaacgggtttgcgctgccattggcattgcgagaggggttcagtttctgcataatctgactgctcctgggttcgtacagaacaatctcaacatagaacatattctgctggacaagaccctcacgtctaagatcagcaacttcagtcttccaatgatatcaactagcaagaacggcaagattctctcagagaccccatttgctgtccatgaagacaatgatatcggcagtgctcagaacgcggcacaaggtgacaaggaagacatctaccagattggcctaattctcctggaggtgatcacaggcaaaccaacagagtcccaaagccaactggagtccctgaaagctcagctaagtgaggcgctgactgaagacccagacaggctgaaagacatggcagacccggcgatacacggtacttttgcagtggactcactgagcacagtcgccgagatagccctcaagtgcacggctggcgacccaagcgaccgaccttccatcgacgacgtgctctggaacctgcagtactccatgcaggtgcaggatgggtgggcgagcagcgagagcttaggcttgagcgtcaaatctcaggtttagataaaggcgcagtgattcggttcctatgcaaatgatgattatgaagctctatgcgccatcactctgcctctagttttctggggtttttttttgggaggagaggtcgttggtatagtctctactgtatatacgtggaccttacctttttcagaactgttgtttatggtacctgtaaaactcaggttctattaagcgtttgtccactc

SEQ ID NO: 1903 - DNA, 1841 bp, Zea mays
  Clone ID: 700170905_FLI
ggtcaaggacctcatgcccgccggcggcgactacgtcctcaagctccccatgcccaaaatcatcaaaggttaataaattgaatctcacgctagctggtcaatcattaatttctggcgtcattaaaatgtctcttactcctctgttgggctcccgcaccgcaagcagaggacaagaaagcttggatgagtgacgaggagttcgcaagggagaccctcgccggcgtgaaccccttgatcatcaggcgtctcacggagttccctccgaaaagcacccttgatccgagcaagtacggcgaccagacgagcaccatcacggaggcgcacatcgcggggagcctggagggcctcaccgtgcagcaggcgctggacagcaaccggctctacatcctggaccaccacgaccactacatgccgttcctgatcgaggtcaacagcctgaacgacaacttcatctacgccaccaggacgctcctgttcctgcgcggcgacggcacgctcgcgccggtggccatcgagatgagcctccccgagctccgggacggcatcacggccgcgaagagcacggtgtacacgccggtgccgccgacggccggcgcggaggcgtgggtgtggcgcctggccaaggcctacgtgaacgtgaacgactactgctggcaccagggcatcagccactggctcaacacgcatgcggtgatggagccgttcgtgatcgccaccaaccggcagctcagcgtgacgcaccccgtgcacaggctgctgctgccgcactaccgcgacaccatgaacatcaacgccctcgcgcgccagaagctcatcaacgccggcggcatcttcgagatgaccgtattcccgcgcaagtacgccatcgagatctcctccaaagtctacggcagctggaacttcaccgagcaggccctccccgacgacctcatcaagcgaggcatggccgttccagatccgtcgagcccctacaaggtgcggctgctgatcgaggactacccgtacgcctcggacgggctggccgtgtggcacgccatcgagcagtgggtgacggagtacctggccatctactaccccaacgacggcgtgctgcaggccgacgtggagctgcaggcgtggtggaaggaggcgcgcgaggtcgggcatgccgacctcaaggacgagcactggtggcccaagatgcagacggtgccggagctcgtgaaggcctgcaccaccatcatctggatcgcgtcggcgctacacgccgccgtcaacttcgggcagtacccgtactgcgggtaccacccgaaccggccgtccgtgagccggcggcccatgccggtgccgggctccgacgcgtacaaggagctggagaagaacccggagaagttcttcgtgcgctccatcaccgcccagttccaggccgtcgtcggcatctcgctgctggagatcctgtccagccactcctccgacgaggtgtacctcggccagcgcgacaccaaggagtggacgtcggacgccaaggcgcaggaggcgttcaagcggttcggcgcgcggctgaccgagatcgagaaacgcgtggaggccatgaacaaggacccgcgcttcaagaaccgctacagcgcggcccagttcccctacaccctgctcttccccaacacctccgacaagggcgataacaccggcgtcaccgccaagggcatccccaacagcatttccatctgattcgatcgagtcctggccagcgtttcacccaaaaaagcagagctagcggtgattcccgtatgtcatccgtttcattttttacatgaatgagaagcgtggtaataaaaaggtttgtagttgcgtgcgcgccgtgt

SEQ ID NO: 1904 - DNA, 1629 bp, Zea mays
  Clone ID: 700170928_FLI
ctgaggtttttatgcccggtgtatctggtatttctctgctgagtagaatcatgagccacaatatttgcaagaacattccagtgattatgatgtcttcgagtgatgctatgagtacagtctttaaatgtttgtcaaaaggtgctgttgactttttagtcaagcctatacgtaagaatgaacttaagaacctttggcagcatgtgtggagacaacggtgtcacagtgtaagttgttcatggtctggtttgaatatttggtagtggaagtgaaagtggcattcagacgcagaagtgtaccaagtcaaaaggtgccatcacttgagctgagtttgaagaggtcgagatcatgtggagatggtgccaacgatacagtcaatgacgatgaacagcggaatagtgcattaaggcgatcgaatctctcggcttttacaaggtaccatacatctgcggcttccaatcaaggtgggacaggattggtaggtagctgttcgccgcatgataacagctcggaggctgtgaaaacggattctacttacaacatgaagtcaaattcagatgctgccgcaataaaacaaggctccaacggcagtagcataacaatgacatgggttccactacaaaggatgttgtgacaaaacccagcacaaataacgagagggtgatgttgccctctgctattaaggctaatggatacacgtcaacattccatcctgtgcagcagtggatggttccagataatgcgacagcagggaaagcgaaggctgatgaagtggccaacaatgcaggcagaaatagtcatcctggtgacgtgcagagcaacctgacgcaacaacatcgtccaacccttcattacgtccattttgagaatagtggatcaggtgccctgcaatgtggttcctccaatgtatttgatcccccacttgaaggccaggctaccaataactatggtgtgaaagccgggagcaactcaggcagcaacaaggggcagaataatgggagtacagctggtgcgagcacggctgctgcaaatgctggacggacagatacagagatacgggctatcgataaaagtggacctggaggtggcagtgggagtggcaatgacacatatgtcagacggcttgctgcgagcatgacaccacgacaagaacagctaaagaaatatagagagaaaaagaaagatcggaactttgggaaaaaggtgcggtaccagagcagaaagaggctagccgaccagcggccaagggttcgtggacagttcgtgaagcaagctgtgcaaaatcaagagggagatggagagagatgacccccccccccctctggcttcagctcatggttgttagacgtggcggttgatgattcttccttctctggtgtgatctgatatgatcgacaacacaccatccttccttttcttcattggtttcttcacatctagaatttactgcctgaccgggaaaaaataagctaggaacttctatacatgtgtatgcatttctaatcatgtagaagaataagtgtgtcttgactctagataattttaggtagagtcatgctcgctctcctacattatgtgatgtaactgaagtgttgttgtgttgtcatgtatggtcttggatcactttctgtc

SEQ ID NO: 1905 - DNA, 1308 bp, Zea mays
  Clone ID: 700170954_FLI
ctgacagactgtagcaataattggtcgctccccgatccatctgggtttcgcctgccagcggcgagatgtccttcttcttccgggccgcatcgcggcagcgcctgttgccgcaggagatcgcgcgctccctcaaggactccctcgttgccctcgacaccaagaccggcgccaaggctctcgaggatgctgagaaaaacatacttacattgaggcatacgctcgctggtgatggagaagtggaaccaaatcaagagcaggttttgcagatagcccttgagatttgcaaggagggtgttctttccctctttgttcagaatcttccttcattgggttgggaggctagaaaggatcttgtccactgctggtgtattttgttgagacagaaggttgatgaaagctattgttgcgtccagtatattgaaaatcattttgatcttttggatttccttgttgtttgctataagaacttggaagtcgcgttgaattgtgggaacatgttgcgagaatgcataaaatatcctacacttgcaaaatatatattggagtcaagcagcttcgagttgtttttccagtatgttgaattgtcaaacttcgatattgcatctgatgctctgaacactttcaaggatttgctaaccaaacatgaagatgccgtctctgaatttctgagctcacattatgaacagttttttggactctacacaaaacttttatcttcaactaattatgtgacacgaagacaatcagtgaagtttctttcagagtttctgttggaggccccaaatgctcaaataatgaagcgttacattttggaagttcattacttaaacattatgatgggcctgctaaaggattcaagcaaaaatatcaggatatgtgccttccacatttttaaggtatttgttgccaatccaaacaagcctcgtgagattattcagtttttggttgagaatcacagagaagtgttgaagctactccacaatctccccacaagcaaaggtgaagatgaacagcttgatgaggagagagatttaattatcaaagaaatcgagaagcttgtgcggttgtcagtataaacctggaaattcgaacgtatccttgaagacatactgtgcaatatgctgccttgtatagagcttgttttttatgtatggaaaaaaaaattggccacaaattgcattcttcgccagaacacttagcatttctgtcagaaaattattgtcgtgtagcagaatttgcaacaggaacaatctgcattatggtgtggtgttgataccattaaggattggtgaaagtgcctgccatttg

SEQ ID NO: 1906 - DNA, 1428 bp, Zea mays
  Clone ID: 700171064_FLI
cttttttctcccgaaggaacagggttagttagtaacttttggattctttatgtgccatgcttagtttccctaccaaaaatgcgaaggtgaggggggtatttccaatggtttcacttctccattcgatacctgatgagacgagttgttagcaacataaacacaaacattgaaggaatgttataattgtactgaggaacagctaacatgtaggattcgtcttttccatgcttgcaattggtgttagtgctgttgcataactagaataagttgttcatgaaactatataaaaaactgttcataaaatgatactttgggccatattcattggaacaaatcaagttacatgaatgaactatagtctagttcgacacatcattcaacaatgtgaggtagaatgatgacagaacagtcataactgagaaaatgattaacatgttttatttattggcaaaactatctttttttatgaaagggcatctagttgagttggtttgagtagcactactcaggtcctgcgttttactcctcgtgccaaagcacaagtctaaggtctcagccttggtccaatggttccagtcgtcctcacatgagctcggcctatgtgagaaggttttctcttatagagtgcaagggtgttgtcttaccccaatcatgtagaatcctcgaacactagatctatcctgtctagttagttatgtttcctactgaacatatgcccgtcagataaggtggcatcagtccagtttgtgaccttgattttccctgactcagaaattcagttgcgtcccttgttggtgacaacataatcttatttggcaggtcctgttggtgaagatatattccactggcaggcaacaataatgggtccatctgatagcccatattctggtggagttttcctagttacaatccattttcctcccgattatcctttcaaaccaccaaaggtggcattccgcaccaaggtgttccatccaaacatcaacagcaacgggagcatctgccttgacatcctgaaggaccagtggagcccggcgctaaccatctccaaggtgctgctgtccatctgctccctgctgaccgatccgaaccccgacgatcctctggtccccgagatagcgcacatgtacaagacggaccggaacaagtacgagaacaccgcgaggacctggacccagaggtacgccatgtagggagggggtaccctacctggccctttgggggtccgccggaattgccgctgctgcgttgtgttcctggacctggacctggactggagactggacgtgtctccgtgtattcgatcctgtgctgtataatgatgcatcagattgggtttgcagtgcagtgcgccgtgtggtgctgaatgctgtattgtgccgcttggaggctgtaattctgaatgccaaaaaactggtgattggaacc

SEQ ID NO: 1907 - DNA, 634 bp, Zea mays
  Clone ID: 700171065_FLI
caaccatgaccgtgctgagccgccctaccccgggcacggcccagtgcttcgggcggaagaagaccgccgtcgcgtcgcgtacacgaagccggggcgcggcctgatcaaggtgaacggcgtcccgattgagctgatccgaccggagatgctccgcctcaaggccttcgagcccatcctgctggcggggcggtcccggttcaaggacatcgacatgcggatccgcgtccgcggcggcgggaagacgtcgcagatctacgccatccgccaggccgtcgccaaggggctcgtcgcctactaccagaagtacgtcgacgaggccgccaagaaggagatcaaggacatctttacccgctacgatcgcaccctcctcgtcgctgacccccggcgctgcgagccgaagaagttcggcggacgtggtgcccgcgccaggttccagaagtcgtaccgttgagcggctgcctgctccatctcgatttttcagatcgttgtgggtgttcttcgctttatttcctatcaatggatctgcttatctggttctatatctagctgctgctttaccataatgtttagactttaatgcctagcctgaaaccttgtttgcaatgtgaaattaatgtgagagattatgaagact

SEQ ID NO: 1908 - DNA, 889 bp, Zea mays
  Clone ID: 700171107_FLI
tcaatgcttgtgcaaatccttggggcgcgccgttgcattgaagttggtgtgtttactgggtattcatcattagctgttgcactggcccttcctgaatctggtcacttggttgcttgtgagagggatgacagatgcctagaagttgccaagaagtactaccaacgtgctggtgttgcacataagattgatgtgaaacatgctttggctgcggattctctaagatctcttcttgattgcggcgaagcttccagctatgacttcgcatttgttgatgctgacaagagaatgtatgaggaatattatgaacttctactgaagctagtaagagttggtggtttaattgtaatggacaatgtcctttggtatggaagggttgccgatctactggttgatgaccaaaagacgatcagtataaggaacttcaacaagaaagttttagaggacaagcgtgtcgatatcagcatggtgccaattggagatgggatgacaatttgccggaagctagtagatacttgagttcacaacgtttttgtgtagatgcggaaaacttcttaccaaggtcaagccctgaaaaatcaaactggtatgcattaatcaagtaaaaatgattataggtgatgaacctcttggcattgacaatatctgtactgcaaatgttgctagtggcctgggctctactaaccacagtggtggggaagcagttggtggcagtaattttgattcgctgcttagaacgctgagatgagtgtggcgtgtcttgcacacagtataacttgaattcaagtacaaaaccagtgttatggtgttttgttgatagaccacagtttcatctcaggtgtatatggaactatggaagtgtggtgcacgtattaaattgtgagtcgtgatc

SEQ ID NO: 1909 - DNA, 519 bp, Zea mays
  Clone ID: 700171118_FLI
gctggctcacttctccaggtaaggaaagtgttcgtcctcatggcgccgccgcagccgaagtcgggcctcttcgtgggcatcaacaagggccatgtcgtcaccaagcgcgagctgcctctgcgcccgtcccaccgcaaggggaaagcaacgaagagggtgtccatggtcaggggcctgatcagagaggttgctggctttgctccttatgagaagcgtatcaccgagcttctgaaggttggcaaggacaagcgcgctctgaagcttgccaagagaaagcttggaactcacaagagggcaaagaagaagagagaggagatgatgggcgtcctcaggaagatgagatcggctggtacgcacactgacaagaagaaataaagcatttcaagttcatgaatgtggcagccagagattatcaactgtgttttttccctacctctagaaactagacatggcaaagtatttttgaccgaaacattgtttgttagtaatgtattgaaccacctcgtggtattttgcccc

SEQ ID NO: 1910 - DNA, 832 bp, Zea mays
  Clone ID: 700171119_FLI
gcaggtctcaagtctcaactcttgagcaggggaaacgagagatccttggagtcagcaatggagtctaccgcgctaatgaccgcgagactaccactgctgacctctggctcccgttccaaacccctcccctttgcttccttcaccacggcggcttgccgtctcgcctccgccccctgctccggcagcggcagcgtcgtcctgctgtcgcgccggagccgcgattatgctggcgttggttccttggtctccgccgcggcggctcctggggatacggcggacgccggatccgagtccatcctgctcagcgtccaggggatgatgtgcgacgggtgcgccgcgagcgtgaagcggatcctggagagccaacccgaggttacttctgctaccgttgattttaaggaagcaagcgcagtcgtgtggacaacagatgaggccaaggggacacaaggttggcagaagcagtatggagagaagcttgctaaacaccttggcacttgcggatttgagtctcgcctacaagagtaaggtgaagccgaaccgatattgaagttcagatgttcaccttaatgatcaatttgtaccagcatatatgttaaatattttgtctctgtggattgcagttaggagtagtctcggtgctagtctggtggcataatactacatacctacctttcacatgatctttagctaggttgtttcgaataggatgatgtttgtcctaaaattgtaggagtaggccactgttgcgagtgaggagtttgcggctgggctattgttaaatccggtcttcccgttgcttcgaagatataaagtgatactacctctataactc

SEQ ID NO: 1911 - DNA, 1474 bp, Zea mays
  Clone ID: 700171140_FLI
acctcctctgcttccgagatctctccccacctcccggtccgctagcagatagcgggggccagagagatcgagatccggaggcgctagcgccacccatcagcgtctgcggcaatggcgggcacggtgacggtcccggggtcgtcgaaaccctccacgccgctgctcaaggacgagctcgacatcgtgatcccgacgatccgcaacctcgacttcctcgagatgtggaggcccttcttccagccctaccacctcatcatcgtgcaggacggcgacccgaccaagaccatcaaggtgcccgagggcttcgactacgagctctacaaccgcaacgacatcaaccgcatcctcgggcccaaggcctcctgcatatccttcaaggactccgcctgccgctgcttcggctacatggtctccaagaagaagtacatctacaccatcgacgacgactgcttcgttgccaaggacccatcaggcaaggatatcaatgctcttgagcagcacatcaagaacctcctcagcccgtccacaccgttcttcttcaacaccctgtacgacccctaccgtgagggtgctgactttgtgcgtggataccccttcagcctcagggagggtgcccacactgctgtctcccacggcctgtggctgaacatccctgactatgatgcacccacccagctggtcaagcctaaggagaggaacgaaaggtacgttgatgctgtcatgacaatccccaagggaaccttgttccccatgtgcggcatgaaccttgccttcgacagggatctcattggccctgccatgtacttcggtctcatgggtgatggccagcccattggtcgctacgacgacatgtgggccggatggtgtgtgaaggtcatctgcgaccacttgagcctgggagtcaagactggcttgccatacatctggcacagcaaggctagcaaccccttcgttaacttgaagaaggaatacaagggcatcttctggcaggaggacatcatccccttcttccagaacgtgaccattcccaaggattgcgacaccgtccagaagtgctacatctacctctctggacaggtgaaggagaagcttggcaagatcgacccctactttgctaagctcggtgacgccatggtcacctggatcgaggcctgggatgagctgaacccggctggccccgctgccgggaaagacaaggccaagtagatgggagtccctgggggtgcattcacttccctgctgaagtgaaaagaaagtatgattgggtccagcctaggctcccccatagatatagctctttttgagagggaagagggattaattcagcagcaggttctttttataaattctttgttgttatgaagcaggcggtacttttgtagttgatgaaggggatttgtcgccactgtcatttacataattcggacaataatttatattgtgtaatcttgagaatcaaagcactgtttgtgtt

SEQ ID NO: 1912 - DNA, 467 bp, Zea mays
  Clone ID: 700171162_FLI
ggtgcgccggtgctgttcagtctagggtttcggccctcgcccgccgatccgtccccccgccggccatgtcgaagcaaggagggaaggccaagccgctgaaggcgcccaaggtcgacaagaaggagtacgacgagagtgatcttgcttatttgcagaagaagaaagatgaggaaaaggcactgaaggagctgaaggccaaggcacagaagggcgcaattggaggctcgggtctcaagaaaagtggaaagaaatgagcctggcccacccacccacccatctctaaaacaccttggagaacgataaggcagctgcttagtatctgtgttgcgcttcactatatgtggctgtgagacaatgctgcctcttgtattccgtgttacgcggtgttccagttggtttgcttgatccgaagatgtttcagcctctcatctgctagctttgatacatgagctatttgctattatgat

SEQ ID NO: 1913 - DNA, 1591 bp, Zea mays
  Clone ID: 700171203_FLI
ctaaactacagctcacactgcagccccaagatcgatcgagcgtccacagccccaaggaacatagtataacatggccccagccatttccaagcctctccttaccgatctcgttgcacagatcgggaaggtcccatcgagccacatcaggcctgtcggagaccgcccggacctcgccaatgtcgacaacgagtccggcgccgggatcccgctcatcgacctcaagaagctcaacggcccggagcgccgtaaggtggtggaggccatcggcaaggcctgcgaatccgacggcttcttcatggtgacgaaccacggcatcccggcggcggtcgtggagggcatgctgcgcgtggcgcgggagttcttccacctgccggagtcggagcggctcaagtgctactccgacgaccccaacaaggcgatccggctgtccaccagcttcaacgtgcgcacggagaaggtcagcaactggcgcgacttcctgcgcctgcattgctaccccctccagagcttcgtcgaccagtggccgtcaaacccgccgtccttcaggcaagtggtgggcacctacgcgacggaggccagggcgctggcgctgaggctgctggaggccatatcggagagcctgggcctggagcggagccacatggtggcggccatggggaggcacgcgcagcacatggcggtgaactactacccgccgtgcccgcagccggagctcacctacgggctgccgggccacaaggaccccaatgccatcacgctgctgctgcaggacggcgtctccggcctccaggtgcagcgcggcagccgctgggtggccgtcaaccccgtgcccaacgcgctggtcatcaacatcggagaccagatgcaggtaacgcgcatgcacttccagtcgcaactgagattcttgctgtcgtcgtaatctgggctcgctgaacaaagtcgtcgcctattgtatccgatgcatgcatggatgcaggcactgagcaacgaccggtacaagagcgtgctccaccgcgtgatcgtcaacagcgagagcgagcggatctcggtgccgacgttctactgcccgtccccggacgcggtgatcgcgccggccgacgcgctggtggacgacggccaccctctggcctaccgccccttcacttaccaggagtactacgacgcgttctggaacatgggcctccagtcggccagctgcctcgaccggtttaggcccggaggatcgttggagtgagtgaactacgccggccacgacagggaaaaaaaatgaagacctttttgtattcttgagcatctgccaataactggatctttgaaatcctcctctggactggagtcttggattcccttcgggtcccacctaacattacgttgggtccaccctgaagatgcagacaaggtttaggttgacaaattccgatgtaaggatgattttgtccaacttattactatttccttgtgctaattacaaagtacagatgtaagcttccacaaaacattgcttttgatagatgttgatccatccattacaaattctaagttaattagacttttctgagaataaaaagtatataacttttgttatgtacct

SEQ ID NO: 1914 - DNA, 898 bp, Zea mays
  Clone ID: 700171206_FLI
gcgagacgccagcgccatccatcgcggcaaaagccgagacgacccaggaatctcggcaccgtcgcccccctttctctctcgctcaaaagttgctgctggagccctctcccctctctccgaccaccaaccatggatgaggcgcaagttgtggagtcaaaggatggaaccatctcggttgcttctgcatttgctggttatcaggaagctgtgcaagacagggatcacaaattcttgacaaaagcagtggaagaagcatatcgaggagtcgattgcggtgacggaggtccattcggagcagttgtcgtctgtaatgacgaagtagtagtcagctgccataacatggttctgaagcacactgaccctactgcgcatgctgaagtaactgcaattagagaggcttgcaaaaagcttgggaaaattgagctctcagactgcgaaatttacgcgtcctgcgagccatgcccaatgtgctttggtgcagttcatctctcccgaatcaagaggctggtttatggggccaaggcagaggctgccatcgccattggatttgatgacttcattgcagatgctctgagaggcactgggttctaccagaaggccaacttggagatcaagaaagctgacggcaatggtgcattgatcgctgagcaagtctttgaaaagactaaagagaagttccagatgtactgatgctgagcagaagagagatctcagatttgtacaatgcttactcataaggacaagaaataatacagtgcccaaatgtccattgtttcgggaaaaaaatctcaattccactgttcaacattttgatgatgcctgaatttcttgttaacagacacaagattgttatttgctgtaaaatgtgcagttgatggaatatactttctccctgtct

SEQ ID NO: 1915 - DNA, 693 bp, Zea mays
  Clone ID: 700171246_FLI
gttcggagctcagagccttgcgatctctcggctgcgcgcgcgcaagatggctgacccagaattggaagctatcaggaagagaaggatggaagaactaatggcaaaacacggtggcggtggggcaaatcaacaaaatgcaagccaacaaaaagctcaggaagacgcgaaacaggaagctgaggaacgccgacagatgatgcttgctcagatattatcttctgaagccagagaaaggatctcccgcatagctttggtcaaacctgacaaagcaagaggggtggaggatgttctgctgagagctgctcaaactggtggaatatctgaaaaggtgtccgaagaaagacttatctcccttctagagcaaattaacacccacacaagcaagcaaaccaaagttacgattcagaggcgtcgaagtgtccttgacgacgacgattagacgcgacctgcaagctttgcctctgagtgcatgatgatgggctggtgattgattgattataagctgtaccgaacttgtttgcttaaagacaatgatctgatgcgactgcaaacagccatcaaaacttggttgtatatgatccgatgtcttgttggtgtacccccgttgaggacagtcgatgtattggctgtgattatccctgaaacactgttcttccttgagttatagtatttattaatgggtgttctatctcc

SEQ ID NO: 1916 - DNA, 558 bp, Zea mays
  Clone ID: 700171264_FLI
gacaaagttgttgtcgcatagaatagtgctcaaggttcattacacacagccacacagaagggtgctccatgcggctggcaccttttcttgccccaatgttccaaaaaagttcaaggtccattacacacagcacacagaaacaggcacatccgcacatggacacagcaacatatttatctaaagttccaaacatgttgccaagcacataactgagcactgagcaaacgagcagtgaacaactaactccacataactgagcactgagcaaaaaaaaacaatttatgtgtactaggacagaatcacagaacaatttaagaatgaaaatgcaattacctattgagcattccatgtaactgtctaactgagcactgagcagtgtactaaactaataactacacctagcttggggcgacgacggcatggcgctaaacgcctgaacccgtgaatcgctggccacttgctggttgttgccgctaccgcaacctggtgctggctgggggctccgtagtgccgctgccgccggccgccgcagacccgcagccgcagtgccgaactgct

SEQ ID NO: 1917 - DNA, 581 bp, Zea mays
  Clone ID: 700171321_FLI
cagtcactcccgggccgccgccgccgccgcctccgcgaaaaaccctagcaggcttcgccgctatcactccaaggggcgcgaccatggtggccacaaagaagacgaagaaatccacggacaacatcaataacaagctgcagcttgttatgaagagtggcaagtacactctcggctacaagaccgtcctcaggactctcaggaactctaagtcgaagctagtgatcatcgctaacaactgcccgccccttcgtaagtctgaaattgagtactatgctatgctggccaaggtcactgtccaccacttccatggaaacaatgtcgaccttggaactgcctgtggtaaatactttcgggtctgctgcctcagcattattgatcctggtgattctgatatcatcaagactacaccgggtgagcagtaaagaagcccctgcagtagggggatcttactgcatttgttcttctgtcttgttaaacagcatttacctgctagtaaactgagttattcggaacattgtcttgaattgaatttttgctccggtgttgacacttaaatcgagctttagcttataccgttgctc

SEQ ID NO: 1918 - DNA, 601 bp, Zea mays
  Clone ID: 700171345_FLI
cgccgccgccacctgctgcagcttctcaaccggataggtagcaccggagcaggtagaacgctgcacaatccccttcgccgccgccaagatggtgaacgttcctaagaccaagaagacgtactgcaagaacaaagagtgcaagaagcacacactccacaaggtgactcagtataagaagggcaaggatagcctgtctgcccagggaaagcgccgttatgaccgcaagcagtcaggatatggtggtcagaccaagcctgtcttccacaagaaggccaagaccaccaagaagattgttctgaagctgcagtgccagagctgcaagcactactcacagcacgccatcaagagatgcaagcattttgagattggtggagacaagaagggcaagggcacatctcttttctaagcttctcgtccacctgtctggttgttgagttgaagctgtgggtctactactactgttataaaaacatgtcgccaaatttcaatgttaatgtagcaatgaaagcagaccatgctatgtatccaaattccaatgcctgacatttgttctggggtgttggtcgacttttggctaaatgaaagttttgtagcttgaatc

SEQ ID NO: 1919 - DNA, 1457 bp, Zea mays
  Clone ID: 700171384_FLI
gggccgcatctagctctaaaagaaccaagttgtgtcctcagggaaatttggacgttccaacaatgtatgttacagggaatgggaatggttgtactgactccgtggaaactggaaagtttcccagggtcttgcaaggtcaagatttgatgagttttaggactcgtcatgttccgtctgctcctcaaactgttgaggctgcaaaacttcaatcttctggtgctagtaggttcctcagtaatgcatgtggctgcgcgttgggtggtccaacaagcagactcgcagtgcataactctgattttacctaccaatctgtaggcttcaatgaatctattggattctcagaggtcttgcaaggtcaagaaatttctcgggcagttcctatgttccaaggaatgatgtctgaggcttgttcactaaaaggaggatatgggctgcatagttatatgcgtaccccagttgctgttactggattgtcagccacaactcaagagtgttctctcacactatctactccgccaggagcacaagttccttctgtctaccctgataatatttttaaccgaactgtggttcgacagcttggactggcaagcaagtttgatggtggagctacaaatgcccagcagtctggcccatttgataggccgagggaaatttggagcaagccacagcatgaaatatctgatcaaacgaaaatggatcactttgagactagaagagcttcagcacctggagatgatgctgctaagcatgggtctggtggagaggtggttcgcaaaactagctgcagactttttggtttctcgttgactgagaagatcttgccagcagatgatgatggcatcaaggaagtgacctatgagcctgagtgccagaatccacggatgctggacctgttcgggtacaactgctcagccccaagtgctgctcttccagctctgtgtgctgccccctttggaatgtgatgctacttcaataacgctgctgagtatttccatgtactcttagaagttttactttcctaatacccaagtgtatgtcataagctgccttttgacatcattccccctgttggtctgcctcaagcgaagcagtcatttgcacaagtaaacaaaggatcgttgatgatccacttctcgccatgcctcaccctatcgctaagatattgtaattagtcttaggatacgaagaggcagtacattgtaactgactaacttctgtggctgatccttcagaaaagttgtgcgatgaagcaaacaattttctttagaagttcttcgctggcagattttagattcatgtggggaggtttgtcagctcagctttaatgtactggttatgtatcttcaaatcagctgctgtacgacttttttttagctccaagccctggttgcagtcgcctaggccgtgtgattgtatcagtatgtaagacatgctatattttaatattcttatcg

SEQ ID NO: 1920 - DNA, 623 bp, Zea mays
  Clone ID: 700171386_FLI
gagaacatatggtggatgtcaacaacaacaacaacaacgaaagatccaagtacacttcagatctgcctcatttctatgtagctacaagtcaaaatggtcgacacagacatatgcaaagcctcttttcatttacccctgctactatctaaagtcgatatagggtacattcatgctagcgtactgtatttaatacacacacacacacaaaaatatgaaacagtgagcaagataaattaaacatcattcttgggatacatgaaccaaaagagtcgagcttacagcagcaaaaaggaaaccaaggttacttacttgctcattctccccgaactgtgattacatccatcttgcggattgcatccatatcgacattttgtgcattgcatgcatatcatgttgtgggagcgcagttgctacggcccttgccatgacatgttccaactctgctcaagctccacatttggtaccaagttttgccacccccctaacatctccggctgctcacctattaacacttctatttcacaggaagtaaaggaattgtccagcaaaaatattacattattccactcagccatacggatgggcgagtttcgaggaagcatgaaacaatctccatacccttc

SEQ ID NO: 1921 - DNA, 571 bp, Zea mays
  Clone ID: 700171388_FLI
cagggtctgaagagcctgacaaacatagaacccactcggagaagcgaaggcacaagaaaactcataagcataagaaacagtatgatgatagttccgagtctgattctgagccagatggcaaagacgcaaagaggaggaggaggaaggaagagaagaggctaagaaaagaggaaagacgtcgaagacgtgaagaacgacaccgcagaagggcagaacgccatgccagcaaacgaaaattaaagaacaccgatactgttactatgccttcagactctgagaaggatcgggattctgattcagatggtgatgttaggaaaagagtttcaaactctggaagagaagagtctgatcagaagaaactagaaattgaactccgtgagaaggcccttgaatctcttagagcaaagaaagccatcaacaactagactgagaaattttttgtgacacatttgagtttctattttcaagtggaagtgtccttatatgatactatttaatgttctgtgtgtttatgtggcagttgatctgatgattcctgagctgtttacttgatgcagctgaattcaggctt

SEQ ID NO: 1922 - DNA, 951 bp, Zea mays
  Clone ID: 700171392_FLI
gttcttgacttccaatttgaagctaaggttgctgattttggacttgcaaagttcactactgataacaacacccatgtttcgacaagagtaatgggcacctttgggtatttggcacctgagtatgcatcttctggcaagctaacagaaaaatccgatgtattttccttcggagtcatgcttcttgagcttattactgggcggcgaccagttgacacaacccaaacatatatggatgacagcttggttgactgggcaaggccattactgatgcgagcacttgaggatggtgaatatgattctttagtggatcctcggctgggaaaggacttcaatcctaatgagatggcaagaatgatagcctgtgcagctgcatgtgtacgccattctgcacgtcgtcggccacgtatgagtcaggtcgttcgggctttggagggcaatgtgtctttggaggaccttaatgaaggtgttcggcctggccatagccgcttctttgggtcatacagcagctccgattacgattctggccagtacaacgaggacatgaagaagttcaagaagatggcattcaacaacaactataccagcagccaatacagcgcgccaaccagtgaatatggacagataccgtctgcatcaagcagcgagggccaccagacgcaagagatggagtcgggtgcaatgaagaaaggtggctacagtggtggctacagctcaggatacagcggagcctcgtaagggaattccctctttttttttgtttttcttttgatgttttcattgctgcatttgtaaagtctggccgaattatatgaccaaagctgctgacttgcgcgtgatgtatctgagtttgaccgagtatagttctatgtagctgcaattgtttattctttcatgaaagttgttcttgaccaatgtttgctgtgcagttcgaagagagctaattgaatgttg

SEQ ID NO: 1923 - DNA, 716 bp, Zea mays
  Clone ID: 700171481_FLI
caagtcgcctgcagagtgcagactgcagatacagtccgtgctctgacggagcaacaggagaagcagagcgagccgaggcggagtcgacagcttggtgccttatcatggaggaagcggggaggggctgcggcttgctcaaggtggttgtgacgcacggccggaacctagccgtccgggatttcacgtccagcgacccctacgtcatcgtccacgttgccgacaagaccacaaaaacaaaagttatcaacagttgcctcaatccagtttggaatgaagagatgacattctccatgaaagaaccagtaggaataatcaaatttgaggtgttcgactgggaccggttcaagtacgacgacaagatgggccaggctttcctggacctgcagcctgtggcggcggcaaccaagctgcggagggcgctgcggctcacagctggcgagaccaacctgcggaaagtgaacccggacgccgacaactgtctgctctcagatagcttcgtgacgtacgccaacggggaggtcgcgatagatgctaggctgcggctgcgtgaggtcgagtccggcgagctgttcgtcactataaagtggattgaacctgacagcgccaacactggaaagcaagcggatcactagctagcgatgcattttgcttgcagcactgcaaatatgtaatatgacctgatgtgggctgatttatgaggattttttttaaatcgt

SEQ ID NO: 1924 - DNA, 1423 bp, Zea mays
  Clone ID: 700171513_FLI
gttttcttttcttacaagtgaacagccgttgcccgtcggccgccgcccgccgccccctccctccgcgccctcccgaccaccgctccttccccgccttccacctgcgctgttcgccagtcctcctccacctcgctccggcacgcagggcccacaagaagcgccccttccagaagttaatccgccccggtttgactagggtttgtcccgtctcctaatcgatcagattggcaggtcactgccgttgccgccgcgatgaagaggtacggactgcagctccgcacgaaaccgccatcgtcctcgtcgtcacgcgcgccgccacctcccgcccggcccctggcggccttcgccgacgacgatgacgatgatgtggaggcagaaatcctccgccaggcggccaagaagcgctccctccagaaggttgaggagcagcaaaagaaggccatggaggaggatccctcggtgtacgcctacgacgagctgtacgacgaaatgaaagagaaggaagcccgccctaagatgcaggataaggtcgtccgcgagtcaaagtatattgcacaacttaaggaaaaagcagagctacgcaaacgagaacaagatataatatacgagaggaagcttcagaaagagagaagcaaggaggaccacctttttggggacaaggataaatttgtaacatcagcctacaggaagaaacttgaggagcagcaaaagtggcttgaagaagaaagagtgaggcagcttcgagaagaaaaggaagatgtaactaaaaagaaagacctgagtgatttttactttgggcttgtgaagaatgttgctttcggtgcacagacacatgataacacaaaatctggtcaccctctaaaggcggacaataaacctgaggatacaaatactagtagccttgatgctgaagcctctgaaccttctccaaagcgtagaagagaatccagtatagaatcagagaggactaagagtatggatatggaagagccgtcggcaagtcgaatgagggattcaacagctgctgcatctactgagaaaaatgctgctgatgtttcatcaaatgctaaagagatcccacaaaacattcagccagcaaaggttactgatgatcactacaagagaagtgatggcgcacttgctgctgctagagcgcgagcactggcccgaaagaaagcaaaggaccagcaattgtgaagtacaaggcagaaaagtttaccgatccttgaggcacaatttcatgttttatttaataggatcgtgtaaagatgtcatctgaaatgatctgatagctcccttgcactttaagaagcattttttattgtggttgatgcgtatctatgttgtaaaatgacctcttcacatgccatcttctgctaactttggtgttttgacacgtcaactggtttgaactcatatggcc

SEQ ID NO: 1925 - DNA, 820 bp, Zea mays
  Clone ID: 700171527_FLI
agcagatgcagatcgatcccgagttccgctgactgcagaggagagagatctagagcgagggagggagggaaatgggccacgaggctgcggcgccggggtcgtcggtgctcggccgcgcggtggaggaggtgcgctcggccctcaacgagcacgccgacgtggttgccgacctcttcggtcgcgtctcctccgaagtgcgcaccggcttcgcgcccgccgtcgactccttcgttggcttcttccacgccgtcgactggaaggagccttggctgatcagcatactatctttccatgccattctgctactggttaccatcatctcgaggaggaatatcaatttccagctcatcttgtcagctctaacattttctggtgtattccttgctgagagattaaatacgttcctggcgcaaaactggaagagcttctctacccaaaactattttgatccccagggccttttcatttcggtcatctggtctggccctctcctcctgataacgatccttattctggtgaacactctcgtgacgctctgcacgctaatggtaaggtggaaaagggcaaagctcaggcatcgcgctcggcaagctcgtgacaagcaggactgatctgaaacctgcgtctatgtatcattcggtggcaagtagaaagtcgtgttcttgctacggttggtctaaccaagaatcacatccctggaaacggtgcccatttcattaggtagcagaatataacgttaagatggtcagattttgctcttgtggacccttttggtgcccggatagccatttactacgctgcaatattatcacgtcacacg

SEQ ID NO: 1926 - DNA, 775 bp, Zea mays
  Clone ID: 700171537_FLI
aaaaaacaaatacaaatatattacaaaacatctgaagaacctttgaaagagtttagacactttgaagtttcgaaaatattacaacaagcaacactattttccatactatctattcatgggttgctttgcattgcttcgtcataaatttgctcgcaaatcttcaggacaacatcatcttcagcttttttcgtagccctggcagagattgcttcagcttcgtcagcaacatcttttgctttgactttagtatgttttacttcacttattaccttcagatttcctgctttgaagcttcttcctgatgtccacatgcttttcagatgcttatcgtgccttctccctattctttatacattcttcaatacttaattctttcccacccctcttccaaatttcagataagaatttttggaccactccgaagcttcgattgttgatcttcggacatggtcagcagaaactcagaaatcaggttctatgcaagctctcacgtgattgcacctgactttcaatagaaccgaagcagtgcttcgggcacgtttccaagcacagtagtcctctcgtgctgagagaacacctttgaaagcaagggtctcataggcactcatctcattaggccctccaagtcaccatctaaaaaacttttctctttagatagagccccgacagtggagaaggttttcagcaagtcattatgacatctgttgccaagggtgtgacagttggctagaaagattcggtagttttcattaagtcctctcaaatgatttatttc

SEQ ID NO: 1927 - DNA, 755 bp, Zea mays
  Clone ID: 700171549_FLI
aaaaatgatggcacttctccagaaccttcgccattaaaagataaaacagcaacagaagattcataccgaggatcgctgggtagtgcaaaaggtttgcatggtccagtaactactccggtgtggttctcattaatttctttgcctaaccagaaagaagatccacaactgcctcagttaccaaagacttacatgagaatcaaagacggcagtttgcagatttcctcgatacagaggtacatcatgaagaaactggatctagctaatgaaaatgaggtggagatcatctgccatggcgaaccgatctgcccctcgagcacgctgcgtgggctgatggagctgtggcatcgtagacagccgacggagcccgtggaggcgtcggtgggtgcgccagccgaggagttcgtcatggtgctgggctaccgctgccaccgccggcacccttatttggcgcccggcaccaccgtcgccgtgcctccagagctgccctcctgatcaggtcggcaaggttgactgcaccgccgtggagcctcaactgcactgcactgctccgctcgctgtcgtccaatccccagtcagtctagccgtttaggatggaacagaggaaagaaattactcctacagttttttttacacatttcttagactttcttttggatcgtactcgtttcttaaacttttgtaaagatagatagagagggaggagagaagttagtgtaccagaagtctgtggcaaatgattaagcaccttaaaccat

SEQ ID NO: 1928 - DNA, 1248 bp, Zea mays
  Clone ID: 700171701_FLI
ctccggataaaagataaggagtgtctctcctctctttcagctaagtccctgccccctctctttttcttacattcaggtcctcgcagctcctctcttttttcttgtttctttctttcgatctgcgagccgtccaggtccagtactctcctttccgtgaaggaactcttgcagccggcccctctggtttcctcgaattcttgttccccggtccctcctcctgtccccgcgtagatccgtccgtccgaggagcacaccgtccccacccccatgtttacccaccagttcctctgacggccgccgtgctccgatgaagctgagcgtgctccgtatccgccgctcccactccttctccgtcgccttcctctactggttctacgtcttctcatgaacgcatcgcccctctccacctgctgatccttcgccgtctctctctctctctctctctctctctctctcttagatagtcttttgaatccatctctagggctcttgtttctccccatcctccccccaccccaccccccaccaaacagattcaatccgacaagacaagcatccatgtcgtcgtcacgccggagctcgagccccgacagcaacgacacgacggacgagcgcaagcggaagcggatgctgtccaacagggagtcggcgcggcggtcgcgcgcgcggaagcagcagcggctggaggagctggtggcggaggtggcccgcctgcaggcggagaacgcggcgacgcaggcccgcaccgcggcgctggagcgcgacctgggcagggtggacggcgacaacgcggtgctgcgcgcccgccacgccgagctggccggccgcctgcagtcgctgggcggcgtcctcgaggtgctccagatggccggcgccgccgtcgacatcccggagatggtcaccgacgaccccatgctccgcccctggcagccgtccttccccccgatgcagcccatcgggttctgagaatctgagcctcagccggcgggagagagccaatttctgtcgtcgtgccgctgtctatctcgtattggtatctattcataaatcatcgttgtcatggtttgctcttcttgtcagtgttataaatttgcttcttgttagtgttataaacttggccatcggaaagtagtaataatgatcagttcgtcgtggttctcaactttgtgtggtgaatgtgaatgtcaaaaaagatgtgtttgtagttgtaatatcttgtttggagttgtaatatcttatcttgcttgt

SEQ ID NO: 1929 - DNA, 2146 bp, Zea mays
  Clone ID: 700171733_FLI
ctcatcagcaatataatacccaagatacaatctaggcagcctacaatctaacgtactccaggctccagctgatttgtccacgcggcatggcgacggccagcgccgcttcaagcttcctcgtcccggcgactgctatcgccccgacaccctctgcatgcccatccacggttcccaagaacaagaagaatgctgccggccggcggcggcgcacattgcagtgcagggccagcggccggcggggcgacgacgaagacagccgcctcctctggctgccccggcgggaagtgctgaccggtctgggcggcgtggccgccagcttcgtcgggtacccggatctggcttccatcgccctggaagcgaaccccgtggagagctgccggcggggcgagaaggtgacggagaagctggtggagtgctcggacccgaacagagacttcccgtgcccgccggcgtcacgggtccccatcgtggacttcacgccggaggcgagggtgacgcgcgtccgcaggccggcgcacctcctggacccggagtaccaggagaagtacagggaggcggtggggaagatgcgggcgctggacgggtcgaacccgctgagcttcgcggcgcaggcggccgtccaccagtcctactgcgacgggcactaccggctggacccgacggagaagaaccggcccttcgacgtgcacttctcgtggatcttcgcgccgtggcaccgcatgtacatctacttctacgagcgcgccctcggccagctcatcggcgacgacaccttcgcgctgccctattggaactgggacgcgcccgccggcatggggatcccggccatcttcaagcagggcgtctccacggccgacaacccgctgtacgacccctaccgcaacatggagaacatggacgccctgctcgatctggactacctcaagaaacccagacgcgacaccatccctttcgagccgccgacggacccagccgcgcgcgccaagtacgacgacgccgttcaaaccaacctgtgcaccatatacctgcagcaagtccgtgacggcaagggcccccgtgctttcctcggcgagaagctgtgcagcgagtcgagcttccgggtgaaggagatcaacgagcggtccaagcggaggcaggcggacgggcagagcagcaaggtgagcccaagcaagtcgcagagccagggcacgctggagcggatggcgcacacgacggtgcacgtgtggacggggcgggcgaacccggcgacgtgcagcgcggagcagggcggcgtggtggggcacgacggcaagccgcactgccaggtggacatggggttcctgggcacggcggggcgtgacccgctcttctactcgcaccacgcgaacgtggaccggatgtggcacatctggtccactaggctgggcggtaagggcttcgacgacccggagtggctggacaccagcttcgtgttctacgacgactaccggagcccgcggctggtgcggatgaagttccgcgacgtcctggacgcgaccaggctcgggtacacgtacgacaaggagtcggaggcggcgctgccgtggctgaacagcaagccgacccggttctccggcggcggcaaggcgaaggcgaaggcggcgcccaaggtggcgtcggagttcccgctgaccctgacggacgaggccgtggacgtgccggcggtggcggtcccggcgcggcaggccgggaaggacctggtgctgctgatcgagggcatcgagtacgacccccagatcaacaacaagttcgacgtggtcatcaacgtggcccgggaggacgccgcgagggtggggcctaaggacagcgagtacgccggcagcttcagcgccgtgcccagctccaacgccgccggtggcacgctggtgggcaagttcacgctcgccctcgacggcgtgctcgccgacctcgggctcgccggcgcgagcgccgtcgacatcgtgctcgtccctcacacggagggcgagatcaagctgtacttgcccccgaccatcgagaacgcgtgagaactgagatgagatgagacccgccacgcactgctggctggctgtttcgtctgttcaccgtccccatgagccagcagtggcgatttttaagttctaattgaagtagtatatgccgtcctgat

SEQ ID NO: 1930 - DNA, 1175 bp, Zea mays
  Clone ID: 700171744_FLI
taaaattaaaatccaagtcttacgcgagtccccttcccgatccgccggcccatccacccaccgccgccatgccggcgttcaaggccccggcgccgggcttcgccgtgcgcttcagccccttccacgagaaccgcctcctcgccgccacgtcccagcacttcggcctcgtgggcaacggtcacctcatcgtgctcgacctcgccggcggcgggcccggggccgccccgacgccggtcttctccttcccgacctccgatgcgctcttcgactgcgcgtggtccgagtcccacgactccctctgcgccgccgcctccggggacggctccgtgcgccttttcgacgccgctctcccgccggcgcagaaccccgtgcggctcctccgggagcacgcacgggaggtgcacggcctcgactggaaccccgtccgccgggacgccttcatctccgcctcctgggacgacacgctcaagctctggtcccccgaccgcccagcctccgtccgcaccttccggggccacgagtactgcgtctacgccgccgcctggtccgcgcgccacccggacgtcttcgcgtcggcctccggggaccgaaccgcgcgcgtctgggacgtccgggaccccgcgcccacgctcatcctgcccgcgcacgaccacgaggtgctctcgctcgactgggacaagtacgacccctccatcctcgccaccgcctccgtcgacaagtccatccgcgtctgggacgtgcgcgcgccgcgggcgcccatcgcgcagctcgccggacacggctacgccgttaagcgggtccgtttctcgccgcaccgccagggcatgctcatgtcatgctcctacgacatgactgtctgcatgtgggactaccgcgccgaggatgctctgctcgccaggtacaaccaccacacggagttcgttgccggcatcgacatgagcgtcctcgtcgatggcttgctcgctagcaccggatgggacgagatggtctacatctggccatttgggacggatccaagagccatgtagcacgcagatgcaatagaccaggtgatttgtactattggttctcagctatgcattgggcggtggtaatactaatacatgctcctacatgttcagttactatctcttcaaatgagttgaagaagttggaataatgtcaaaaatttgttc

SEQ ID NO: 1931 - DNA, 508 bp, Zea mays
  Clone ID: 700171752_FLI
ggtgccagaaaacacacggccgccaccccgcgccaccacccagttcgatcccattccaagcgcgcgcagcagcagcgccagcatgggtcgggcgccgtgctgcgacaagacgagtgtgaagcgggggccgtggtcgcccgaggaggacgaggtgctgcggagctacgtccagaaccacggcacgggcggcaactggatcgcgctcccgcacaaagcagggctcaaccggtgcggcaagagctgccggctgcggtggctcaactacctgcgccccgacatcaagcacggcggctacacggagcaggaggaccgggtcatctgctccctctacagctccatcgggagcaggtggtccatcatcgcgtccaagctgccggggcggacggacaacgacgtcaagaactactggaacaccaagctcaagaagaaggcgatcgccatgcagcagcagcagcaagagtactaccaccaccagcagcagcagcacagctcaggaggccgcggccgc

SEQ ID NO: 1932 - DNA, 630 bp, Zea mays
  Clone ID: 700171759_FLI
gttgagagctcgggcaccagatctgaagccctcttgttctgtggttgtgtgcctttcggctggtgtagcattgagaggaggcgctgttccagttccagttccaggatgagcaaggaggatgtgctcaaggtgcagactttgatgctgagagtgaacatacactgtgacgggtgcgagaagaaggtcaagaagaccctccacaagatcgacggtgtctaccagagcagcatcgacgcggaacaggggaaggtgacggtgtccggcctgctggatccggacaccatcatcaggaagctcaacaaggccggcaagccggcccagctgtggggctccaagcccggcgtccctcagaacggccatggcggcggcaagggccagcctaaggacgccggcggtggcaagggccattccaaggatgccggcggtggcaaggcccagaagggcggtgcgggtggcggcggtcacaagggtgccggtggtgccggtggcgggggtggtggggccaaggatcctaagatggtgatgccgcagccgacgccgcagcagctccagcagctgcagcagcagttgcagatgaaggggctgaagctcccgccgcacctcctgggcggcaacatgccggcgttcccc

SEQ ID NO: 1933 - DNA, 1057 bp, Zea mays
  Clone ID: 700171786_FLI
cctggacagcctactcggcaggaacaagcacgacgaccaggagaagaagaaccagcaggcggaggaggagctggcgaccggcatggagaaggtcacggtggccgagcccgaccacaaggaggagggacacgaggccgccgagaagaaggacagccttctcgccaagctgcaccgcaccagctccagttccagctcgtcgagcgacgacgaggaagaggaggtgatcgatgagaacggcgagattgtcaagaggaagaagaagaagggccttaaggagaaggtcaaggagaagctggcggcccacaaggcccacgatgagggcgaccaccaccagacgcccgcgccgcccgtggtggtggacacgcatgctcaccaccaggagggagagcacttcccggcgccggcgcctcccccgcacgtggagacgcaccaccccgtcgtcgtccacaagatcgaggacgacgacacgaagattcagaccccaccacaggcaccggaggaggagaagaaaggcctgctggacaagatcaaggagaagcttcccggtggccacaagaagccggaagacgctgctgccgccgccgccgcgccggccgtccacgcgccaccgccggcgccgcacgccgaggtcgacgtcagcagcccggatggcaagaagggcttgctgggcaagatcatggacaagatacccggctaccacaagagctcgggtgaagaagaccgcaaggacgccgccggcgagcacaagaccagctcctaaggtcgcagcgtgtgcgtgtccgtcgtacgttctggccggccgggccttgggcgcgcgatcagaagcgttgcgttggcgtgtgtgtgcttctggtttgctttaattttaccaagtttgtttcaaggtggatcgcgtggtcaaggcccgtgtgctttaaagacccaccggcactggcagtgagtgttgctgcttgtgtaggctttggtacgtatgggctttatttgcttctggatgttgtgtactacttgggtttgttgaattattatgagcagttgcgtattgtaattcagctgggct

SEQ ID NO: 1934 - DNA, 849 bp, Zea mays
  Clone ID: 700171826_FLI
gatccatggagctcgatgccgacaacctgagcgccaccgagctccgcctcggcctgcctgggaccagcagcagcagcagagacgactggcagaagaagccgtcgccctccgtcggggccaagcgcgttctggacgacggcaccaagagcgaggcctcggggaccagcacggccgccggagacctcgacttcgaccacgacaccgccgcgcctcccaaggcgcaagtggtcgggtggccgccggtgagggcgtacaggaagaacaccttccaggcggcggcggccaaaaaggtcgagcagaagcagcagcagggaggcctgtacgtgaaggtgagcatggacggcgcgccgtacctcaggaaggtggacctccggatgtacaaggggtacagggagctcagggaggctctggacgcgctcttcaccaactccttctccgcggcggcggcagagggcggcggcgaccaccagcacgccatcgcctacgaggacaaggacggcgacctcatgctcgccggagacgtgccctgggatatgttcatctcttcgtgcaagaagctgaggataatgaagggctctgcctctgaggccaggtgatcgctgatccatacataaacagaggctacagacacgccacctgggaacgcggatccaagagcacacacggatcgtacgtgacgaggaaggagggaggagctgtgtggcttgagctctccagtgttgtacaaaggcatgtttctttctgaacccaaaagggagaaagatgtatgaagcgtgtatataaaatcttagctagcagtttgttttcaaactgtgttttgtatgagcgatcgaaggctgcaaaaatatg

SEQ ID NO: 1935 - DNA, 632 bp, Zea mays
  Clone ID: 700171888_FLI
gttctggtctccatccagggcctcgtgctgaatgacaggccatacttcaatgagccaggatccaagaactcggctgaaacgacaggtggtgagaggtgttccctggcttacaatcagacggccttcgtcagatcatgcaagacgatgctgtattcactccggaagcctccaatgcattttgagacccttgtgttgtggcacttccacgagcatgagcgtgccatcctcgacgcttgcagggcttacatgtctgggacagtcgttgggtcgtctgctgggactgggagcaaccgcagatacgtccatgacaagtgctttgcagaattccacaagtcgctgacgctctacactgaacatctcagggctgagtttgctgcaaacacaagacgagtgatggagctggaaacagaagacgagatcgtgcctagcatagcagctagcgtgaaatcgtgttgaaggcaaatgccccacggtgttgtatgttgctctcatcatcagatatttgctggcttagctatttctagcctcattctacttcattcatgtcacttgaataatctaattcatggcaattgtacctgtccctatacctagatggcttaaaatctgaaggtttattacagtttctttct

SEQ ID NO: 1936 - DNA, 345 bp, Zea mays
  Clone ID: 700171946_FLI
gtaaattccttcacaatgttggccttcagcctgcctccaagacaagctctatttcagcaaaggtgcacgagcttcaatctcaattggagaccaagagacaagaaaaagatggacttaggcaagaaatggaatccttaaaggctacatcacaagaatttatgaccactattgctaatcaaacaattgagatcgagaatttaaagaagtcgctagcagaaaataatagccttcttcgtcagatactaagcaccaatcgaggcatgtctcctccttaagattgttgctatagtcgaccatgccaatgttacatccaacaacactggactacttttttattagttgtct

SEQ ID NO: 1937 - DNA, 1276 bp, Zea mays
  Clone ID: 700171972_FLI
cccacggtccgcccacggtccgggctgggaccagaggcagggccctccaccccatccttcgtaccagggtggtgcttctgattactacaagcagggatctcagccatatgatagccagccaccgagctaccctcctgggccagggaattacaacagttatggtcaatcacagggtcctaactatggccaacctcaatacccgcaacatgcgcctcagcagaactacagccatgggtatggtgatcctagatacaatgctccccctccgaaccagcagtactatggtcagccgccaatgggcccgcagcaaggctatcctcaacagccagatccctatgctaggcctccatacagtggacctggtcaatggcctcccaggggtgctccggctgcagatggctcttaccaggcgccagctgcatcttatgggccgccttctcagcacccttctgcttatgggcaaacgtacagtgcagcaactggatctgatggatatgctcaacagggttacccacagcagggtgggcaggcaccagctccatatggtcagagtgcaccagcagctccaggctatcctcagcagcaaggtggctatgcacagtacccacagacccaaccagcatatggtgagcaagcagctcaaaccaatgcgagctatgggtaccagggagctcaagcagatcctaactatggaagtgcctacccacagccaggatatggtcctcctggtcaggctactggtcaggctggttatgcctcctcagcagccagccagcctgcgtatggccaggcaggatacacccagccgcctacaaatcctccaggttatgagcagtctgcggcaccagcaacaacccagagcggctatgctgcgcccccagcaaatccacagcagcctgctgcagcaaaaggggtctcgccacagcctggtggtggtgctgctgcatatggtgctggtgggcagtggacagcatgaccctcctcgaacctcaaacatggctcgctggtagcaatatcgtgctcaatatttgcaccttccggatgcatccttggttatcggaagagattgtgtaactccttgattagtgatacttggcatctctgtagtagcacctactagtagttcgttggttaactgtgacaataaacatcctaattcctattcacttcgaatcaaacttcgcagcttgccaagtaatttttttggatttgtgtttattcatgtaaaatagttactggtttggctcacagaatgatgattctgtttctgcagttc

SEQ ID NO: 1938 - DNA, 891 bp, Zea mays
  Clone ID: 700172012_FLI
ctgaggtttcacccagatcacgtttgctagtatgtgtagacctatattttgagaatgtcactacacagcagctaacagatataaccattgaatctgaagaggcttctagcagtgtggattttatagaccaaacatcagaaggatattcgggtgtccctactatcgttcctgtggaagggatacattcgttggccccacaacaaatggcaaagttggttcttcaggtccattttcatcaccatatcttgcctctaaagctgtctgtgttttgcaatgggaaaagacatccagcaaaacttcatcctgacattgcttatttcgttcgtccactacccatggacctaaatactttcctatgcaaggaaaaccaattgaggggaatgtttgagtatgcgaggaggtgcgctttcaaagatcatcttcagaagctaggtcacgaggacagtgcagagcacatcgataagaaccttcaggtggcccagagtgttgcttcaaaaatactgagcaatgctaatattcaccttgtctcaatggatatgccagtaaccttcagtgtcgatgacgcctctggcttgtgttggagattcagcggtgaaatcctgagcacttcaaaaccttgcctgattaccatcctggcggaagggcgtgcctctggtccgctggaccttgctgtgaaggtgaattctgaagatacggtgttcgccctgaatctcctgaacagagttgtggcgatcatagattgaggtgagcatgaaattgtacattatcaacaaatagaagaggtatttggcaagcgcgtgactatttgtaagaaagtcttgttgaataatagcatctccaatagctctaaaaaaagaattgtgaaatgattgagttttacagcttgatgtg

SEQ ID NO: 1939 - DNA, 719 bp, Zea mays
  Clone ID: 700172022_FLI
cctgcagtacgtcgacgagacctgggcaggcaccgggacccctctcctccccgccgacgcctacgaccgcgccatggctcgcttctgggcagcctacgtcgacgacaaggtaataacggtgactgcagaggccggccggccggccaaaatgctaatccttgcctttttcttcttcttgcgccgagaatctgtctgctgggcctctgggactgggggtcgtcagtactagttcagttgaccgaacgattccgcgctatatatgcagttctacaaggagtggaaccggctgttctggtcgacgacggcggagaaggcggcggaggcgctcggcgtcgtcgtccccgtggtggagacgctggagcaggcgctcaaggagtgctccaaagggaaacccttcttcggcggcgacgccgtcgggctcgtggacatcgcgctcgggagcttcgtggtgtggatcagggtggtcgacgaggcggccggcgtaaagcttctggacgaggccaagttcccggccttgacggcgtgggcggagcgcttcttggcagtggacgccgtgaaggaggtgatgccggacgccggaaggctgttggagcactacaagggatttctggctaaacggtctccacctgctggttactgatcgctgtaactgtaagcctgtaacagcaagctcagtgttcgtgtacttttccgtgcgttaacgtgtactggagttcaag

SEQ ID NO: 1940 - DNA, 758 bp, Zea mays
  Clone ID: 700172062_FLI
cgaagatcttcggcatgatcttgcgtgcatgttcggtattcaagggcagcttgaagatccctacaggacggactggaagctggtctatgttgaccacgaaaatgacatcctccttgttggcgacgacccatgggaggagtttgtaagctgtgtcaagagcattaaaatattgtcatctgttgaagtacagcaaatgagcttggatggtgacctcggctgcatccctcctcaaactcaagcctgcagtgcttctgatgacgcaaatgcatggagggcatgacgtaaatactaatatgttccttaccatttttaaacaatactgagagtcaggggtcaaagaagtgaaacacacgtctaacataatcacgaggtactgttacttagagccgactcactgacagagacgatgagaagctcgtggcggaagttgttcagcaagctgccatattttggaggccttgacggctgacgctttgttccactgaaatcgggtaattactcaacacactcatattagtttccttcttgtgtgtgtaagttgggtgggggtggggggtataatgaatttgagaagctactctgcttattagaacctacattcactgtaatcctacaaagttgttcgattatctcagtgtatatatgtgcgctgtagaaccgtgattgtcagttttgcaactcgcaatccccaatgtaattgttcctgtatgctgctttaacagctgaagtactattataaattgtattatctgtaacag

SEQ ID NO: 1941 - DNA, 877 bp, Zea mays
  Clone ID: 700172074_FLI
cacagcgctagcggcatagccggcgacagaaacaaccgatgccactcctcgccgtctgtccccgccgcgttccgccgctttcgctcgcgcgccgccaccgccgcagcttgtatcgggcccggtccctcgcgctcaaatgcgaggtctcctctcctccgctacttctgacccggaggatgtccgccgctggctcgctgcttgtcgctgtcgtccccgtccccgcgccgtcgccgcaactccccgtcgcctccgcgtcggagttggagacggagacggcggaaggagagagcggagcttctgaggggttagcattggagcgttacaccgaccaggagcagggcttcaccctcctcaagccggcctcctggcccaaggtggagaaggcgggcgcgacggcgctgtttcagcaggagggaaaagggagcaacaatattggggttgtcgtcaaccctgtccggctcaattcgctggcggagttcgggacgccgcagttcgttgcggacagacttctgcaagcagagaagaaaaaggaaagtaccaagtctgccgaggtgatttcagtgggagagaggtcaggtcatggtggcttgacagtgtatgagatcgagtacatgctggacagcacaaggggagggatgaagcggatcttctcgtgtgcgtttgtcgcttcaaggaagctctatctgctcaacatagcatattcagacacccaggagaagcccttggacagggagacaagaaccgttctggaaaaagttctccattcttttgattctgtataggtgatattattttttatagccgaggtgtggcaccttttcttattttcggaatttctttcacttgaaaatacagtcgcaagtaattgtttgtctgt

SEQ ID NO: 1942 - DNA, 697 bp, Zea mays
  Clone ID: 700172093_FLI
cgatccccacagagccagggcgtgcaggcgggcgggcgggcgagcgagcgagaggaaaagccaaggcggcagcagtaggcagccaccatcaataaagaaggtccaagcatgtcgggggtgtgggtgttccggaacggcgtggtgaggctggtggagaacccgacgtcggggaacgcggcggcggcgccgggcaagcgcaaggcgctgctgcacacgccgtccggggaggtggtcacgtcctacgcctcgctggagcgcaagctggcggcgctcggctgggagcgctactacgccggcggcggagacggcggcggcgccggcctgctgcagtaccacaagcgcacctccgtcgacctcatctcgctgcccaaggacttcgcccacttcggctccgtccacatgtacgacatcgtcatcaagaaccgcgacgccttccgcgtcatcgacgcctaattataagctagcggatgcagcagatgacagatactcacctctcctcgctcgctcctcgctccggccagtgcatcatctacctcgctgtagctacctacctaccctaatataatagcagctatagccttcgtcacccattgctcgatcgatttagttgccgtgtcgatctcagtgccgcgttggtctaaattaatatatatagatcatgtactgatgatttggtttgttcatgcatgttttctct

SEQ ID NO: 1943 - DNA, 1188 bp, Zea mays
  Clone ID: 700172116_FLI
actccggcaagccgtcgacggcccccgtcccggacctgtggcgcctgagcaccgtgcaccgcgtggaggagctcaagtcggtgatccgcatgggtcctatctgggcggcgggcatcctggtgatcacggggtcgtcgacgcagaacaccttctctctgcagcaggcgagcaccatggaccgccgcctcgcgccgggcctctccacgttcgagatccccgcggggtccatgaccgtcttcgggctgctggccatgctcttcaccctcttcgtctacgaccgcgcgctcatccgcgtggcgcgccgcttcacggggctggaccgcggcatctccttcctgcaccgcatgggcgtcggcttcgccatcagcgtgctcgccaccctggtcgctggattcgtggaagcggcaccgcagggacgcggcggcggcggccggcgccacggacgccggcacgtccccgctgtcggcctactggctggtgccgcagtacgcactgcacggcgtggccgaggcgttcacctccgtggggcacctcgagttcatgtacgaccaggcgcccgagagcatgcgcagcacggcgacggcgctcttctggctgtccatctcgctgggaagctacgcgagcacgctgctggtggacgctgtgcaccgctggagcgcggggcccggcggcgccaactggctgccggacaacatcaatcacggcaagctggattacttttactgggtcgtcacggtactgcaggtcatgaaccttgtgtactacgccatttgcgccaagcggttcacgttcaagccagtgcagctccacaagaaagaggaggaagaaggcggcaaggcacttgtggagttgcaagagaaggtttaatttgagcagcatgcactttcatcagtgctaggaagatcctcagaaaaactcccaaggtattactatataaatctatgtgagcatctgtattagtcaagtagatcaagaatgcaggaaggttgttcaggcaagcaacctcagaagctatctggtctggtcctgagacttggcacaggtcaaaaacacaactcgactatatttgtaactagaaagcaggcacgaggcacatgtctgaactctgaaacttgacgttaatgcatagtactgtataagactctgtttgtacattagagtctagggataaacacacagatattgttc

SEQ ID NO: 1944 - DNA, 1190 bp, Zea mays
  Clone ID: 700172159_FLI
ggcgccgtgtggccgttcccggtgatctacaccggcggcatcaacccgctcatctggcgccccatcaccagcatcggctccttcaacatgcccacctacgacatcgagctcacgcccttcctcggcagcctcctggacggcgaggagcacgagctcgggttcgcggtgaccaacgcgcagcggtcgtggtacgtggacgccaacctccacctgtggctggaccccaagagctccaggaccagcggcgggctcgtcgcgtaccacgcgccgaagctggcgggcagcatcgtgtcgcgctccgcggacggcgtcgacggggagtacgcggcgacggcgagccgcaacatcacggccacggggtgggtgagctcgtcgcgcggcaacgttaccaccacgttcgcgcagcggctcagcttctccaacaccaacgtggtgagcgggcagggcagcgcgcaggcgatcaaccagacgaccgacgcgctcacggccgtcagcggcgggcccgcgcccgcgcaggtgcaccagagcttcccgctctacatcttcctgggcggcgacggcagcggcacgtcgtcgcagcggctgatgcggcgcgtggagatcgggttcgacgagacgcggtcccgcggagcaggaggagcaggaggagagggcgccgcgtccacgaccacgagcacgctgcggaactcgcaggtggcggcggcggaggtgacgctccgggacgacgccgtggtgggcgcgtcgtggcggatgcaccagacttacgagtacggcgccagcgacggcggctgctacctgaggaacgttagcagcgtcggttacgacgtgcttttcgaccatcgcgacgcgtcctgcgccggtacgcggggccgctgacgcttgtcgccgacagcggacagcgagcgccttgtcggcgcctccgccgcgcgggccgctggataacggccggggaagcgacagggtgtaaatggaacgctgcaccggtggacaaaactgtactggcttgtctcggcctggcccacgtccggtcttcaattattaaatataccactgtgacgggccattttcgtgggccaattagcttttcattaagaaaagatgtgacgtgacgtgatgcagctagtgcacaggcagcactaaaatgtaaagaaaaccgctggctatgtttatttaacagtacctgttttatg

SEQ ID NO: 1945 - DNA, 1082 bp, Zea mays
  Clone ID: 700172178_FLI
ggtccacaacccacaaaatgcacgggaggacccagggcgccgccgtcggcgacatgacccagcgccttctcctcgccctctcgctcatcgcatcagcgaccgccgtgcccgctgtcatccgcacggtcccggacgaccccaccgcgggctcctctggcgcggcagacgccgcggacgcgctcttctgtgacagctggaggctgtcggtggagacggccaacgcgggcccctggagcgccgtgccctcgcgctgtggggctttcgtgcgggactacatggagggacctcgctacgcgtctgactccgccgtcgccgacgccgacgccctagccttcgcctccgaagccctggccgccgccgagtggggcggctcggcgagcgcgaggcctgcgtgggtgttcgacgtcgacgagacgctgctctctaacgcgccgtactacgcggtcaacggatggggatcacaggaattcaatgagacctcatttgatgaatgggtagatgctgcaaaggcaccaacattaccatcgagcttgaatttgtacaatcaacttcagggacttggtttccatgttatcctattgactggccggagtgaattccaacgtaatgccacagaattgaatcttttgtttgctggctacaactcatgggaaaaactcatactgaggcaaccttatgatattggcaagaacgctgtgcagtacaaatcagagagacgagcagcaatggaagcggaaggtttcaagatacttgggaactcaggggatcagtggagtgatttgataggatcgcccatggcaacgagatccttcaagctaccaaacccaatgtacttcatcagctgattttattgttagagcagtggacgaaggagcaggttttcatagggtgttcatatggtcccggtgtgaaactgcttttgttagacatccctcgggacataaatttagatttttatcttcaagcatgttgaaattcaactgaggcttgggtccgtcgaatctgccctatgatgatctgtaattacacacttcttttcccacactactggaagcatttgtggtaaggcaaattgtgaggtc

SEQ ID NO: 1946 - DNA, 1391 bp, Zea mays
  Clone ID: 700172224_FLI
gggccaacctccatggtcggcgacatctttggccggagctggtcctccgccgcgccctcctctgggttcggcatccctcaggccaacaaccccggcctcttcagcgatctcctcggctccgcgctcggctcctcccgctcccagtccaacgcgccgctcagatccgccgccgcgccacaggcatccaggccagccggtgagaagcccaatgtcaacgctagcagctctcccttctcgatgggcggcatggcgggcgcgctcccgaaaactacgggagcaccgatgggctccggtggatacggcgttggtggccggccgatgaaacccgtgggcatggccgcgacggctgctgcgcagccgatggggcagcagagggatccatttggctcaatagacccctttgccgcaaagcctgggtccatgaacgcggtgaagcaggccaattcggtcaagccggatcagggatttggagctttccagggtgtgaattccagtgtcgctgctggatttgggagcttccagagtactgatgctggatctggtggtttccaaagcgctggcacgaccacaccttctaactttacaccaccgccagcaccagcttcaatgcctactcctgtgtctgcagcagttaactcaagcatggatcctctggataatctttttgcttcaaccacaagtgcaccgactgcagctgccgctagtaatggtgacagtggcggtgacatgtttggtgagatggatggttgggtcgatgtggaggcagagtttgctggtggtgatagtggtggcacaaccacagagctggatggcctgccaccgccaccatccggattgacaatatcagctgccaaggccaaagggatggatagctacaagggagggcagtatgctgatgctatcaagtggttgtcatgggctgttgttctaattgagaaatcagggaaagatgctgacattgttgaggtgttgtcttcaagagcttcttcatataaggaggttggtgagtacaagaaggccatcactgactgctcgaaggtgctggatcaagataaggataatgtctcagtgctagtgcagcgtgctctcctttatgaaagcacagagaaatataggcttggtgccgaggacctgcgtttggttctgaagattgatcctacaaataggcttgccaggagtacaattcaccgcctgaacaagttggctgactagtgatgtctttctagcgccctgatgtaatattgtactaccactgtactgcatccttctcacatgagatattgagatctgtgagttatttgaactctttagtctttattactatacttgtggctttgggggaatagtttgcaattgtgttgttataaagtatgaaatacgaatttacatac

SEQ ID NO: 1947 - DNA, 412 bp, Zea mays
  Clone ID: 700172323_FLI
caattttagcctcctgcgcccatcctgaaacttctgcaaggagcgtgatttcgctatcttgtctgattgagggtatggagtacttgaaactgaaattgagcaagtggattttcgttctttccgctgctttacatgtaaattaaattttggttcgatgtgtgacagctgttgtacttggtatcagttgtggacttgcagctaaccagagtcaaagtgctttgaaggacttactgagcacgtttctgttcctgtaggctgtagctcagagcctagtgcttcgttatattgcttattactcattattactatttattgttcctatgaactcgtattgtttggggttaaagggccagacatttgttagtgcccctttggtataagaaaaaatggcatgcaggctacgtgccgactc

SEQ ID NO: 1948 - DNA, 1844 bp, Zea mays
  Clone ID: 700172325_FLI
cccgatttgatctcgtcccttccgggctccggctaggctgctccgtctctcctcctccgccatgttctcgcacggcgctgattccgcccacgacgccgggaccgttggcgtcagcagcggcgtcggggccaccgtccccgcccgcttcgtctggccctacggtgggaagagggtcttcgtctcaggctccttcaccaggtggtcggaacatttgccgatgtctcctgtcgaaggctgccccactgtatttcaggctatttgcagcctgtctccagggattcatgagtacaagttctatgtggacggggagtggcgtcatgatgagcgccaacctactatatctggggagttcggtatagttaacacactatacttgacaagggaatttaatcaaataaatgccttattaaatccaagcacacctggaagcaggatgaacatggatgtggataatgaaaattttcaacatacggttacattgtcggatggtaccattccagaaggtactgtgagagtttcagaggctgcaatacaaatctcaaggtgccgcgtttctgagtatctcaatttgcatacatgctatgatttactcccggattcgggcaaggttattgctctggacattaatttacctgtgaagcaatcttttcatattctgcatgaacaggggattcctgtagctcctctctgggactcattcagaggtcaatttgtcggccttctgagcccattggatttcatacttatattgcgggagctagaaactcatggctcgaacttgacagaagatcagcttgaaacacacactatatctgcatggaaagaggctaagcggcaaacttgtggaagaaatgatggtcagtggcgagcacatcagcatctagtgcatgccaccccttatgagtccttgagggacattgcagtaaagcttttgctaaatgacatttctacagtgccagttatttattcatcatcatcagatggatcattccctcagttattgcaccttgcatccctttctggaattttgaaatgtatttttaggtattttaaaaactcaactggtaatttgcctattctgaaccaaccggtgtgctccattccgctgggttcctgggttccgaaaatcggtgatccaaacagtcgtccattggctatgttgcgacctaatgcatcacttagctctgcccttaacatgttggttcaagctggagtgagctcaataccaattgtggatgaaaacgactccctgcttgacacttactctagaagtgacatcacagccctagctaaagacaaggtctacacacatgttcgcctggatgagatgaccattcatcaggctttacagcttggacaagatgccaatacgccttttggattttttaacggtcagagatgccagatgtgcctccggtctgatcctttgctgaaggtgatggagcgactggctaatccgggggtgcggcgggtgttcatagtagaagctgggagcaaacgtgtggagggtattatatcactgagtgatattttcaagttcttgctgagcttgtgataagagaagaggagcatgacggacatttgtttgtgatcaatagtaagaaaacagcagggtatgtgaagcaagctgccatggatctcgcatttcccctccccctccggcctttggtcaagtaaggcaggattgaaggtggcgggctttgtctttgctgataatggctgttggaattcatggtctgtaaagttctttttttcccctttgtttttcgttttaaccattttgtgcctcccgttgttaccaaaaatatctggtgattattattattatttttggattgtttctc

SEQ ID NO: 1949 - DNA, 1245 bp, Zea mays
  Clone ID: 700172327_FLI
cttgtacttttcttttttgttcacaccctgtcatgctacgaacgtctagaacttctttcttctctttaataactttcttgttccactaccaagtgtctttatcttcacctccttttgttgctccacgcaccaccttctggatgcagtttgatatcatctccagtaacgactgctgtccaagcaagccttaggtgcaagcgagccttctgggcctttagatctcctttactagggcttaggacctacctgatgtggtgaggcaacataggcggatttaatcaccattttttacttactattatttcaggttaatggtaaacttgcctgatgcatcaaatagagagaaaattctgaaagtaattttggcaaaagaagagctgggatcggatgttgatctcgactcacttgccaatatgactgatggttattcaggaagcgacctgaagaatctgtgtgtgaccgcagcgcattaccccattcgagaaatcctagagaaggaaaagaaggagaagagtttggctaaaacagaaggtaggccagagcccgcattgtatggaagcgagcacatccgtcctcttagcatagacgacttcaaatccgcccatgagcaggtttgcgcgagcgtttcatccgactcggcaaacatgaacgagcttctccaatggaacgacctgtacggtgaaggcgggtcgaggaagaggaaagcgctgagctacttcatgtgacggcgagagacataaaaccagaaggatcacaaccgcgccataaagccagaaggtatcgcagttgcgccatattgtacagccgccatagtacttcccccctccctggccctaaatccagccagggttttcctcctccctcctgggtagccgtggccgcctgtagtccctccctcgtgtaattagaaccgtgtaccgagtcgagttcatttacccactgtttgaggttccagagagttgagatttaaattttaagtggcgccattgcccttcctttcttcctcccctcctaagtattaactttgttgcggccattgttgtcgtgactctggccatagatccttttatgtacatgcgaaatgtaaccaagggatatggaataagaacatgttcatcctgttgtagacagcatggtggtacaggaattctttttatttttcatagttgattggtgatgaactggatcggtgccagcataagaattatgataaggtaccttttctgccgctgaattttttggtgt

SEQ ID NO: 1950 - DNA, 300 bp, Zea mays
  Clone ID: 700172328_FLI
ctcgtagctgtctgtctgtatagtgtacagtagtgtactgggataggggtactgctacagctcagtggagagttgagtcgtgcagtggatcagtggaaatcatgtatgttagtgtcaacgacgaggatgaggccacagatcatacatgcactagttgcatcatcttgggtacgtggcatcctgtgctgtacgggaaggggagaacgttgcaatctggccgtgcagtttcgcggcacgtaacaacaacagtatgtgtgtataatttgtggagaagtgagttgcacttcccttttcctctcc

SEQ ID NO: 1951 - DNA, 1665 bp, Zea mays
  Clone ID: 700172331_FLI
aggctggcgtacacgacggcgctgaccacgctcttcagctacgggctgctcttcgccttcggccagctcagggatctcttccgccacctgctcggctgcttcagacccaacaaggacgacgacgtcaagcaggggtacgcgccgatctgcgtcggcctggaggatttcttcgtgcgacgactctacctgcgggttcaggattgcttcggcaggccaatcgctagcgcaccggactcatggttcgatgtggtggagcgtacctcagacgacaacaacaagacattgcagcgcacctcaaagaccactagatgcctgaacctgacgtcctacaactacctcgggttcgccgcggccgatgagtactgcgtcccacgcgttgtcgactccctcaagaaatactcggcgagcacctgcagtgctcgtgttgatggcggcacgaccaagcttcacaccgagctggaggagctggttgcgcgttttgtcgggaagcctgctgctgtcgtcttcggcatgggttacgttacaaactctgccaccattccctgcctaatcggaaagggtgggctgattatcagtgactcactgaaccacaactcgatcgtcaatggcgcaagaggatccgatgcgactgtcagggttttccggcacaactgccctgcccatctggagaaggtcctgagagagcaggtagctggtggccagccgcggacgcacagagcgtggaagaagatcgtcgtcgtcgtcgaggggatctacagcatggaaggggagctgtgcaaactccccgagatcatagccgtctgcaagaagtacaaggcctacacgtacctggacgaggctcacagcatcggcgccgtcggacggtcgggccgcggcgtctgcgagctcctcggcgtcgacccggccgacgtcgacgtaatgatgggcactttcaccaagtctttcggatcatgcggtggatatatcgctgcatccgaggagatagtccagcacttgaagcacacctgtccgggccatctgtacgctacctccatgtcgccgcctgcagtgcagcaggtcatctcggctattagagttgtccttggggaggatggctccagcagaggtgcccagaaactggcgcgcatccgtgagaacagcaacttcttcaggtcagagctcaagaagatgggctttgaggttcttggtgacaacgactctcctgtcatgcccataatgctctacaatccggccaagattcctgcgttttctcgggagtgctttagacaaaaggttgccgttatcactgtggcgtttcctgtgactcctctccttctcgcaagagcacgtttctgcatttcagcttcgcacactagggaggacctgacgaaagccctcgatgttatcagcagagttggtgacctcgtgggcatcaagtacttccctgcacaacgaccaaagattgctgaagctggtcacggcaattgaggcggtagagaggaatgagccctgaaattaccccatgagtggctgaagttgttaagagtccttttaaaagttatcaaataaatagattatcatggaaacaagcacgcgcgcattgatcagtttcgtcgggattctgtcgtattagctgaatattttgttcctgatcttacaattacctctccaactccgaatttgtat

SEQ ID NO: 1952 - DNA, 927 bp, Zea mays
  Clone ID: 700172340_FLI
gctccatagcacttgttccagctagctaggagagagagctttgtttaggcggcggcaagatgaacaggaagccaggagactgggactgcagggcgtgccagcacctcaacttcagccgtcgggatgcatgccagcgctgcagtgaaccacgtggagttggtgatcgtagcggcggtggtggcgacttgggtgggcgtggtggttcctccttcggcggtggctttggtgctggctctgatgtccgccctggtgactggtactgctcctgcggcgcacacaacttcgccagccgctccaactgcttcaggtgctctgcctacaaggaggaggctgccggcgcctttgatagtgacatgtcacgctcacgcggctacgccggcttcggcagcggcgctgccgcccgtaccaaccgccccggttggaagtctggagactggatctgcaccaggtccggttgcaacgagcacaacttcgctagcaggatggaatgtttcaggtgcaacacgccacgggactccggtagcgctgccacgacgacctacgaaaactacttgcactgaggtgtaggtagagcaaagtttacagctatagcgcgcgtcgacgaagcaggagcagcagcagcagcatgaattgaagaggagtcctcatcatcacatcataagggagcagcagtagatttaattgcaaaattaaagacacccgcgatgcatgccctatcactagttttgttccaccggtacccctaccgcgcgtttcttttaagatttggttccccatttatctggggacagtagaccccagatgagacctatgtttgctgtttcattttcagttacgttcgtctccgcatgcatgtttgcgcttggatctgatgtaaccccaaaacgcttgcttcacaagtactattaactagttctgttgccttcc

SEQ ID NO: 1953 - DNA, 1449 bp, Zea mays
  Clone ID: 700172364_FLI
cccgactggagcatgctccttgctgccatcacgaccatcttcttggccgccgagaagcagtggacgatgcttgattggaagcccaggcggcctgacatgctcactgacacttttgggtttggccggatcatacatgatggcctcatgttcaagcagaacttctccattaggtcctatgagattggggctgataggacggcatctatagagacaatgatgaaccatttgcaggaaacggcacttaatcatgtgaagaccgctgggctgctaggtgatggattcggctccacaccagagatgagtaaacggaacttattctgggtggttagccagatgcaggctatcgtcgagcgttatccatgctggggtgatactgttgaagtaaatacatgggttagtgctaatggtaaaaatggaatgcgtagggattggcatatacgtgattctatgacaggccacacaatactgaaggcgacaagtaaatgggttatgatgaacaaactcactaggaagcttgcaagaattccagatgaagtgcggactgaaatagagccatactttgttgggcgttctgctattgttgatgaagacaaccgcaagcttccaaaactgccagagggtcaaagcacttctgcagctaaatatgtgaggacaggcctgactcctcgttgggctgatcttgatataaaccagcatgtcaataatgttaaatacattgcgtggattcttgagagtgcaccgattactatttttgagaatcatgagctggccagcattgtgctggattacaaaagggagtgtgtccgcgatagtgtgctgcagtcacacacctctgtccatgaggattgcaacattgagtctggagaaacaaccttgcactgtgagcatgtgctgagccttgaatcaggtccgaccatagtgaaggcccggaccatgtggaggcctaagggaaccaaggcccaagaaacagcggttccatcttcattctgattttgtcagatgttcgagatggtgactttggcagcaaactatctggcagaagatcagaatggttactagcatcctctattggaagcaaatcacacggaccgtgacctaaactaatttaactatgaagtgtgaccaatagaggagatataagtggggtcacaatggaggagaccaaagcggggagatcgaagacaaaggaggcctcctgtgcatggtttgtttctgtttccgcctttcgagttctttcttacgacaatcttgggtcgcacaaatgggtgttgtaagtattgatctgtagctacaaatgtatgatgggggagtgattgcttctcatacatgttccttctggggctatgtccatatgttgtaagccccatgaaaacagatttgtcgcagccatatccattcagaatctcatactatattgtatttgctgatattaaaattgatactactact

SEQ ID NO: 1954 - DNA, 1642 bp, Zea mays
  Clone ID: 700172385_FLI
cgcctcttctcctccctcctgccgggtccttaataaagagcagcagcgcaagaggttggtagagcgagcgagaagaaggcaatggcggcggagagcttcctgttcacctcggagtccgtgaacgaggggcacccagacaagctgtgcgaccaggtgtcggacgcggtgctggacgcctgcctggcgcaggaccccgacagcaaggtggcctgcgagacctgcaccaagacgaacatggtgatggtgttcggcgagatcaccaccaaggcgagcgtggactacgagaagatcgtgcgcgacacctgccgcgagatcgggttcacctccgacgacgtggggctcgacgccgaccgctgcaaggtgctggtgaacatcgagcagcagtcccccgacatcgcgcagggcgtgcacgggcacttcacgaagcggcccgaggagatcggcgccggcgaccagggccacatgttcgggtacgccaccgacgagacccccgagctgatgccgctgagccacgtgctggccaccaagctcggcgcgcgcctgacggaggtccgcaaggacggcacctgcgcctggctcaggcccgacggcaagacccaggtgacggtggagtacgtgaacgagggcggcgccatggtgcccgtccgcgtgcacaccgtgctcatctccacccagcacgacgagaccgtcaccaacgacgagatcgccgccgacctcaaggagcacgtcatcaagcccgtcatcccggagaggtacctggacgagaagaccatcttccacctcaacccgtcggggcgcttcgtcatcggcgggccccacggggacgccggcctcaccggccgcaagatcatcatcgacacctacggcggctggggagcccacggcgggggcgccttctccggcaaggaccccaccaaggtggaccgcagcggggcctacgtcgccaggcaggccgccaagagcatcgtggccagcggcctcgcccgccgctgcctcgtgcaggtgtcctacgccatcggcgtgccggagcccctgtccgtgttcgtcgactcctacggcaccgggaccatccccgacaaggagatcctaaagatcgtcaaggagaacttcgacttcaggccagggatgatcaccatcaacctcgacctcaagaagggcggcaacaggttcatcaagaccgccgcatacggccactttggccgtgacgacgccgacttcacctgggaggtggtcaagcccctaaagaaggcatccgcttaagaatgtattgggaagttcactggacatgaggttcatcttcgtctggctctgctgatacctgcaaggattgctgctgctgctgccgcccctggatgtgtgtttgatcagtgactggctgctctgctccatagaagatgaatgaagagagagatggtgaagaaggctttggcaaatggcaattgccgcagcaagccatgtcggcgccactgaccggcttagtgattggtataatttggtgtggcagcagccaggattaatgcgctggtcttttatctttactactagtttggtctcgtccggtatcttatttttctttccccttttcgagtctgtactgaaactgctgagagatttgcagttttgatctatcatatcctttggt

SEQ ID NO: 1955 - DNA, 565 bp, Zea mays
  Clone ID: 700172395_FLI
actagttctacaccgcgcgcgcaatacacgggacacacgcagatccgagctaaccaccgcagatccgtgattatccagccggagcgaccttttcttttttcttttacacagcgggacagagaaaggagtcaggcagccaaagccacccaccgcttttaccgatcggcgttgccgccaccgctagcattgtcggcttcagctccatccaaatccaccgccagcaagcaagccggcgccatgggtctgccgatgaggagggagagggacgcggaggcggagctgaacctgccgccggggttccggttccaccccaccgacgacgagctggtggagcactacctgtgccgcaaggcggcggggcagcgcctccccgtgcccatcatcgccgaggtggacctgtacaggttcgacccctgggacctgccggagcgcgcgctcttcggggcccgcgagtggtacttcttcacgcccagggaccgcaagtaccccaacggctcccgccccaaccgtgccgccggcaacgggtactggaaggccaccggcgccgacaagcccgtcgcgccgc

SEQ ID NO: 1956 - DNA, 1310 bp, Zea mays
  Clone ID: 700172434_FLI
ttgttctttggcttctgatttcaacaaaaaaaatggtgtttctctaaaacccacaaagccctcctctgctctccatccctgtctctcgctttccctaacccacaccagaataccagatcgagcaccgatctagggttgcacctcttctgctagccggctggcgaggagccgttcggcatctggacgcggccaagggagatgaagctcgcggggctcaagtctgtggacggcgcccacgaggagtccatctgggcggcggcgtgggcgcccgccgctgaccaccgccccacggcggtgctcctcactggcgcgctcgacgagaccgtccgcgcttggctccccgacgacctcgctgccttggggtcccccacacggggccacgcgctcggagtcgtctccctcgccgcccaccccgccggctcgctcgccgccgccgtgtcgctcgacagcttcatccgcgtctttgacgtcgacacgggggcatccgtcgccacgctggaggcgccgccgtccgagatttggggcgtccagttccatcccaagggtaatgctctggccgcagccggtggtggcagtggatcagtgaagctgtgggacacggagaagtggaaggcgatcaccagcctcgccgtcccacgcccggagggagctcgccccgacaagacaggcagcggcaagttcgtcctgtcagtcgcctggagccccgacggaaggctcctagcatgcgggtccatggacggcacgatcgccgtctacgacgcggtccgcatgaagttcctgcaccacctggagggccaccacatgccggtgcggtccatggtgttctccccggtggacccgcacgtgcttttcacggcctgcgacgactgccacgtccacatctacgacgccagggagaagggcctcgtcggggccatgtcgggccacgcgagctgggtgctgagcatcgacgcgagccccgacggcctggcggtggccacggggtcgagcgaccgcaccgtccggctctgggacctcaacatgaggacctcggtgcagaccatgagcaaccactccgatcaggtgtgggccgtggccttcaggccaccaggcggtgccggagtccgagcagggcgtctggctagcgcgtcggatgacaagagcgtctccctgtacgattactcgtaggtttttgtttccttataaaccgttgcaaatgcctctgttgtaccgaccagagatttgaattcgggcatggtggttggaagaattgttgtacgcagcacagtagtcgaggtgttaaattgcaaggaaagagtttatttcgtgtt

SEQ ID NO: 1957 - DNA, 1748 bp, Zea mays
  Clone ID: 700172436_FLI
cgtgctttacttccgcttccaatataccttttttctgcgacaaaaatcatttttgttaattgcgaaaaggaaagagcccgtgtgaacaggaggggtgaggagaagagggggaaaagagagagaaatcggagggcattagcaagaaaccatgagttctaggttcgcaatccctagtcgtcttgtcctgatcttacttgagtgctcgtgagctctttccagtggctaaagactgcagatttgagttctggcccaagaaccgcgtgctagcccgccatggaggtgaggtccgagcaagggctgatggcggggagggatctattcggcatgccgaagagcccgccggcgcccgcgccgccgtcgtccgccgccatgcagagcgtgcgcatggcgtacaccgcggacggcaccgccgtgttcgctccggtgagctcttcgcctgcgacgccgtcttaccagccgcagggcgcagcccacggcgctagcatgtccgcggcgacggtcgttggaggcaatggcgctccagctgcgccgagcatgggtgagccgctggccaagaagaagcgcggacgaccaaggaagtacgggcccgacgggtccatggcgctggcaatggtgcctgcttcggcggcttcagggtcgccggcgacagggcagggtttttctgggccgttctcaccgcctgcgttaaatccggcgagctctctggtggtggcgtcgccagacggattcaagaagcggggccggcctaagggttctaccaacaggccacgcgtggacgctgctgggtcatcaggagctggatttacacctcatgttatcacagttcaagctggggaggacgtggcatcaaagattatgtcattttcccagcatggaacacacggagtttgtgttctttcagcaaatggctccatatcaaatgtaacgcttcgtcagactgctacatcaggcagaactgtaacatacgagggtcaattcgagatactgtcgctgtcggggtcattcttcctggctgaggatggtgtccagcgcagccgaaacggagggcctcagcgtgtcgctggctggtcctgatggccgtctgttgggtggtggggtcgcaggacttctagtagcggcttcaccggttcagatagtactgggaagcttcaattctggaggcggaaaggagccacaaaagcaggctccttcagaacctacatcggctccaccgagggttgctccgacagctgggatgggaggacccagcagcccttcttcaagaggcacattgagcgagtcatccggtggcgctggaagcccaccgccactgcatcgagccatggctgctagtgctagcaatagtaaccagccaccgttcttgtccagcatgccttggagatgagtttgcagcttgcattctcttggccaattccaggcaggatgtagcaatctgcgctttcagtagcgcccgttgtgtgagtagctgtgtgcagtacaagccagaagcttgggtgggaatataattgcgtctggtaaatctgtagctctgttgtaggttccaccctgaattcctgtgctaggtgtgttgagctgtgtaagcaatgtaatcctttcagcgttatcaaatgctatttagttaaatgtttctaccaaggcatgtcgatttgaatcataagatatgaatttgctgtttgcgtctcgggcaacttctgttctagagaacgttctactcactgaaatttgagcctgttgccaagtttgaaaac

SEQ ID NO: 1958 - DNA, 546 bp, Zea mays
  Clone ID: 700172454_FLI
cttctgcatgcccattgagcactccaaatgggagaatggaaggtgactttgagatgaagcacatcgacaaggctggatcatcaacattcaatgttgcaattgcgccattctctctgtcaattcttggtgacgataatgatgttctgctatgaactacactgaggacttgcttgggagcaaatggattgaagggaattaagggggctacaatcccttactattcaattttgaatagtaagggattttagctcacaatccccttctgcaaacaagccctgagatttaaactagacacacaaacacaaatatttattgtaagtgatgtaattgagcgcaaggttcaggtggaactactatggttgacttatggctggagccaagtgccctggtgcaaggtcaggtagagttctctgggatgttgaatctggaccatgcgagtatcaattgtgaggcacaataggacatcctaccaattgtacttctaaatgtacagcatggaacttagagcttgctacatgtattatacagtacctttttatttttccc

SEQ ID NO: 1959 - DNA, 1259 bp, Zea mays
  Clone ID: 700172473_FLI
gcttcccgtcctgtccttccacccggcggcttaaaccctagttctcactcccatgcgccgcttcagctccgccgctgcagatggagttctggggtctcgaggtcaagcctggttccactgttaagtgtgagcctggatatggctttgtgctgcacctttcccaggctgctcttggggaatcgaagaagagtgataatgccttgatgtatgtcaaaattgatgatcagaaacttgccattggaaccctctctgttgacaagaacccacacattcaatttgatctgattttcgataaagagtttgagctgtcgcacacatcaaaaactaccagcgtcttcttcactggctacaaggttgaacagccattcgaggaagatgaaatggatcttgattctgaagatgaagacgaggagctgaatgttccagtagtcaaggaaaatggcaaagctgatgggaagaaacagaaaagtcaagaaaaggcagttgctgcaccttcaaaatcaagtccggattccaagaagagcaaggatgacgatgattctgatgaggacgagactgatgattctgatgaggatgagacggacgattctgatgagggtttatcttctgaagaaggcgatgatgattcaagtgatgaagatgataccagtgacgatgaggaggaagacactccaactcctaagaagcctgaggtaggcaagaagagagctgctgaaagttccgtgctgaaaactcctctatctgataagaaagcaaaggttgccacaccgtcatctcagaagacaggtggcaagaagggcgccgcggtccatgtggcaactccacacccagcaaaaggcaagaccattgtaaacaatgacaaatcggtcaagtctccaaaatctgcgccaaaatctggtggctcggtcccttgcaaatcgtgcagcaagtcattcatcagtgagacggcacttcaggctcactcgaaggcgaagcatgggggcaagtgagtcgcaggtccaatagagtccgcaacaaatgcgaaacatgggagaggagggtaagcgagagtctcgaaagagtgtcggtggaagtaggcctaaccttattttgtttagagacgggctatgcgttcgatgtagcaaaacaaggctgtggtttgtgtacttcaatatttgggttgtgtgtttcgattttttttttgaacgtgtctcggattgctgtgctgcgaattggttgtttctgtcgctatggtgagatagtgtcacgtttctttctct

SEQ ID NO: 1960 - DNA, 1418 bp, Zea mays
  Clone ID: 700172475_FLI
ctgctccgcctaccccacctccggcggcctctacttctggagcgccaggctctgcacccaccgccgctggggacccttcgccgcctggctcaccggctggttcaatgttgtcggacagtgggcggtgaccaccagcgtggactactccctggcgcagctgatccaggtgatcatcctgctcgccaccggcggcaagaacggcggcggctacctggcgtccaagtacatggtgatcggcttccacgccgccatcctgctcagccacgccgtcatcaacagcctccccatcaccttcctctcctttttcggccagttcgccgcggcctggaacatgctaggtgtgtttgtcctgatggttgccgtgccgaccgttgccaccgagagggccagcgccgagttcgtgttcacccacttcaacaccgacaacggcgccggcatccgcagcaacttgtacatctttgtcctgggcctgctcatgagccagtacacgctcacaggatacgacgcctcggcgcatatgaccgaagagacgaagaacgcggacaagaacggccccatcggcatcatcagcgccatcggcatctccatcctcgtgggctggggctacatcctcggcgtcaccttcgcggtgaaggacataccctacctgctgagccccgacaacgacgccggcggctacgccatcgccgaggtgttctacctcgccttcaagagccgctacggcagcggcgccggcgggatcgtctgcctgggggtcgtcgccgtcgccgtctacttctgcggcatgagctccgtcaccagcaactccaggatggcctacgccttctccagggacggcgccatgcccttctcctccgtctggcacaaggtcaacaagcaggaggtgcccatcaacgccgtctggctctcggctctcgtcgcgctctgcatggcgctgccgtctctgggcagcctggtggcgttccaggccatggtttccatcgcgacgatcgggctgtacatctcgtacgcgctgccgatcctgttccgggtgacgctggcgcgcaagtacttcgtgccggggccattcaacctgggccgctacggcgtcctggtcggctgggtcgccgtgctctgggtggccaccatcaccgtgctcttctcgctgccggtcacgtacccggtcaccaaggacacgctcaactacacccccgtcgccgtcggcggcctcctcttcctcgtcctcgcgtcctggctgctcagcgccaggcactggttcaagggccccgtcaccaatctggacggatgaatatgtataattggacatgtatagtagagaggctggcagagacggaagagttgttgccaacgacatgttgtaactactttgttccaaaaaattaactagcaaggaaaccgacaggatgaattttctcgat

SEQ ID NO: 1961 - DNA, 467 bp, Zea mays
  Clone ID: 700172479_FLI
gcgctgccgcctgccgtagtgctgctcccggccctccctctaattgctcttgccgctttatgtatttgccgcgcgcggcgacagagaatatacacgagtatatacagtagccgccgccggtggagtctctatctggcagccggccggtcggtcggtactctgctctagaagctagagagatactactctgcaggctagctagctagctagaggtagtagaagaggccggcccggcccgattgaagaataacatagagctgtcagctgctgagcgacgacggcgatggtgctctacttcaaggcgcgtccggacgccggcgactacaccatctacatgggcgccgacaagaacgagaacgaggagctcatcaaatacggcctccccgaggacgtctggtacgtacgtacgtcgtcgctagctgctgctacctcttacttcctcgcgacgacgacgacgacgacgacat

SEQ ID NO: 1962 - DNA, 379 bp, Zea mays
  Clone ID: 700172524_FLI
cccaacgcggcagtagtaactgttgcactcaggatccacgtacacaaaaatgagttgaggcataacgtcccaactcggctggtggtatatgttaacagccaatcatgtttaagctattactctgatcgttaaggtggatccgctaaggccttcggttatttctgatccatgtggattggaatgtattgggcggaatcgagacggatttgacttgctatagatttaaatcgactcaatcccactcaatccacatggaagaagtacctttgcatcgatttgtcattggaatatatacaaggtctaggggtgtaattaacgtaaccgtccaagcatttggctaaagtatacactctttaaatgcataattaactgtctattc

SEQ ID NO: 1963 - DNA, 492 bp, Zea mays
  Clone ID: 700172527_FLI
gagagcgagagcgagagcgaaagcgagagcgagagcgacgagagcgactgcgaggaggcgttcctgccgcacggcggccggacgccgcagggcggcgtgcagcacagctacggctacgggggcggggcgtacaagcacggggctggcaacctcggcggcttgcgccgctaccagtcgtacgagagccgcgaggatctcggcggcggacgccgctacgagacctaccagagcaccgtccagtacaccggctccccgaccaagaaccgccacgtcctacgctacggcgcgtaggcatatatacgctctgatccagttgcattgcagcacgtgcacctacgtatattcctatgccgcgtcgtgtgactcgtgtcgtataggcaggcggcaccgctacttggtgggccttgtgtttgctggtgcagatcgaaaaatctgacaataagatgtacttaatgccaccttgatataataatgtatgaagacgaaactttg

SEQ ID NO: 1964 - DNA, 1446 bp, Zea mays
  Clone ID: 700172529_FLI
tcttctttttccgtcccctcctgcagccgccgcccgccgagacgccaagcgcgagcgggaggagaccatgtcacggtggcgcgccgccgcctacagcatctccgcagctgccgcgtcccgcaactctgcggcggaggccggcgccctctccagggccttggcgaaggctccctcgccgccttcgcttcctctccaaaccctcacgagaaactttgccaagtccgctgccgccgccacggccacgtcgcccggccctggcgcttcctctccgcccgctgggccgaggcccgagattagactgaagtctatgttcttatccaagccctgttcattagcgttgccacctgactcccctcatagagcagtggatccacaatataagggcatcaagcgattcctactcacattgttgttgttctacagtaagcaaagcaagtccatcagaggagcaaatgttgtttatgatcgaatcacttctcaagttgatgcacctactatttatgatgtttttcagttggagaaaacatttaagacaacattttcattgcttgttctccatatgtggcttgttctacgccgcttgaaggaagaagggaaggatggtgttaagttcggacagtacatctacgaaatgtacaaccacgatgtagagctcagagtttctaaagctggggttaacttgcttctgacaaaatggatgaaggagctagagaaaatattctatggaaacattgtgaagtatgatgctgcgataagcccagaggctcgtcaagatgatcttgtaaatgtcatctggagaaatatttatgctgaggaaggttcagaggctatggatgtggctgctgcccctgctgtccaggcattggcaagatacacacgaagggaggcaacttgcctatcattgactggcaaagattctatgttctcggggaacttcaaattcacagctctgctgccggcaactcccagtcccagcccaaagaagcctgtgcgatgaactgccgtggtacgtccacatttcacgcgaagatttagaaaacagcaggatcggtggatacctgctgttctctcagcagtacaaataacaggcttcttccagcagttgtttactctggggtccccacgattcaaacccttttgatggatatacttcgttccagataggaagtttgttttgttaatctctagtctcgagtatttgctctaggagaccacccaccagaacggagccttcttgtcgccggaccaggcatcgattcgcacactgtatgaggcgatgctgaaagaaaaaaaaaggaaggcagcaccgatgttcggtcattaatatgcagtttctttcggctgcatgtgtctcttatgtagagtaaaactaatttattctcgcatatagaatgatactataccggacatcaattgatgatgtgaaccgtatgcaagatcatcgcc

SEQ ID NO: 1965 - DNA, 1467 bp, Zea mays
  Clone ID: 700172536_FLI
atcgatcgaacagctagctagctagctatatagcgagagggctccatccatatccatccatctgctactgctagcagctgttggctgttgctgcttgcattgagatgtggatgatcagcgcagggcgcatggagcagtgggcgccgacggcggcaatggtggccaccaacgtcgtgatcgccgtcatgacggcgctgatcaagcaggcactgagcctgggcatgaacaggctggtcctcatcactttccgccagatggtggccaccctgttccttggacccatcgcctacttcaaggaaaggaggatgagaccgaagttcacttccgagatcttcgtgtacatgtttctcagtggaattcttgggccggtgctgcttcagtacacactgtttgtcggattggattacacgacggcaacattcgctgcaacgttcggaaatatgcttccagtggttactttcctgatatcacttgctttcaggttcgaagcactggaggtgaagagcaagtcggggagcgccaagatctcagggacgctcatctccctcggcggcgcaatgatgctcaccttctacaagggttcagcactgacacaaaccaccaccgccgccacgtcgtctccagcatccagcggcggcggccacatcaggcaacaagccggagagcacggcacggtccggtgggtgctgggctccgtctccatgctggccaacgtcgtcggcttcgcgctgtggctgctcctgcagcggaagttcacccgcaagtacccggccgtgtactcggccacggcgttcatgtcgctattcagcttcgtccaggccggggcgctggccctgtcgatccagaggaccagccttgccgtgtgggccctcaggggcaccgtggagatcgccacggtggtgtactgtggcgtagtggcgtctggcattgggtacctcctgctcacctactgcgtggagaagagaggccccgtgttcactgctgccttcagcccgctcgcccagatcttcgtcgccggcatcgatctcttcatcctccacgagcctctctacctcggaagcgtgctggggtcagtgctggttattcttgggctctaccttgtactgtggggcaagagagaggaagctgctgctgctgctgcttcggcaaagccagtgcaggccgaggtagaacaacaagagaaagtgtgatttttttcctttattgttcatcaaagtacagtgtgccagagcagcgacgaacataattaactagaagcagaagcctgcgtgagtgtgtgacagagcgagtgcatatgatcttcgagctcttactgctgcttgtattctagtgctgctaggttatatatcccctaaatctatgcatactactgaccaatataacgcaagaaaatgtatgctgatcgatcgatcgatcgaaatgctgtgaaattctctctcaagtacgtgctgagaaagaggttgggcc

SEQ ID NO: 1966 - DNA, 1342 bp, Zea mays
  Clone ID: 700172593_FLI
gcaaaataaaagccaggcggcggcatatggcgctcagcaaggagcaaaaactcacaattcctgatcaacaacacacaacaagcagcgaacagcaggtggcgctggatgccgagctccagctgtggaaccacactttcggctacgtcaagtccatggcgctcaaggccgcgctcgacctcggcatacccgatgccatccaccagcacggcggctcggccaccatcccacagatagtcaccaggatcacgctccacccgtccaagacaccatgcctgcggcgcctcatgcgcgtgctcaccctcaccggcgtcttcggcacccaggagccgcacgatgacgggggcggctgtgacgacgagctcgtctacacgctcacgccggcgtcccgtctccttgtcggcccatcggggcagaacgtgagccctttactgaacgtgatgctctgccccatcttggtgtcgtccttcctcgacctccgcgggtggttccagcacgagatgccggacccgtcccccttcaaggtgacgcacgggcgggacatatgggagctggccgcccacgacgccggcttcagaaggctcttcgacgctggcatggtcgcggacagcggcttcatcatgaacgtcgtggtcagggagtgcggcgccgtcttccaggggatcagctccctcgtcgacgtcggcggcgggttcggtggcgccacacaggccatcgcgaaagcgttcccgcacctggagtgcagcgtgctagatctcccgaacgtcgtcgccggcgctcctgctgataccgccgtgaagtatgtcgccggtgacatgttcgagagcgtttcgtcggcagacgctgtcttcctcaagtggattatacatgactggggtgatgccgactgtgtcaagatactgaagaactgcaagaaggccataccagctcaaggaggcaaggtgataatactggatatcgtggttggagcaggatcgtcgtgcgaccggaagaacgtggagacgcaatgcttgtttgatctctacatcatgactatcaacggtgtccagcgagatgagcgagagtggaagaagatcatctttgaagccgggtttacatcttacaagatcatacctgttctgggcactcgatccataattgaagtctgcccatagaaaccaaaataattaaggatggcaaccgcctccgatcgcacttgaatacttgaatccgtgaggttttcaggtcacctaggtgtttttactcattgtacgtttttaaacaataactagtcagttgtgcgtgctttgatacggttgttatatatatatatcatataaataaatattaagatatttatttaaat

SEQ ID NO: 1967 - DNA, 970 bp, Zea mays
  Clone ID: 700172629_FLI
gtgttctgcttgccttttttttttgatctggccattcttgccggctttcttggtttatcggcgtcgcaggatgatgagcgactacaaggtggagatggtgaacgatgggatgcaggaattcttcgtcgaattcaaggggccggccgaaagtaatagccctcgcgctgaatcccggttgctcttctctctccccgcctcccgtgctgatggtgcacgctcctgattctgatctagatgttgtggggggaagtccagtttcaggaaaactgccagtctccactgttgatcgtgttcagatattcttgtccgtttagcttcatccttgattggttgctcagttgacccgaaccgtccttccttttcagtcatagtttatcacatgattttgccaaataaattcgcactcaatttggtaggtatctaccaaggcggtgtctggaaggttagggtagaactgcctgatgcatatccttacaaatccccgtccatcggcttcatcaacaagatttatcaccctaatgtcgatgagatgtctggctctgtctgtttagatgtcataaaccaaacatggagcccaatgtttgatctagtaaatgtttttgaagtattccttccacagctgttactatatccaaatccttctgatccattaaatggggaggctgcagcactgatgatgcgtgatcgtcctgtttatgaacagaaagtgaaagaatattgtgaaaagtatgccaaaccagaggacgctggcatcactccggaagacaagtccagtgatgaagaacttagcgaggaggaagacgactccggtgatgaagctatacttggcaatcctgatccctagtctgagttggaagaagccagtccagctcatcaatacaatgtttattgcagaaattgcaattaaacaaaaactgaaaaacaaaaaaaaactttggatggcatgtaaataagtgtaccttgtatgttc

SEQ ID NO: 1968 - DNA, 1466 bp, Zea mays
  Clone ID: 700172634_FLI
ggctcgttctggtgtgggtgggcaccatggcggccacagaggcctcggcagacaagaacgccgtcttccgcaagcttcgcaccaaatcagacaacaagatgtgcttcgattgtaacgccaagaacccgacgtgggcgtccgtcacctacggtgtcttcctctgcatcgactgctcggcggtgcaccgcagcctcggcgtccacgtctccttcgtcaggtcaacaaatttggattcatggactccagaacagctgaaaatgatggtctatggaggaaacaaccgtgcacaagctttctttaagcagcatggttggacagatggtggaaaaattgaagcaaagtatacttcaagagcagctgacttgtaccggcagttgcttgctaaagaggtcgctaaaagcgccactgaagatggcaacaatagttggccatcttcaccagttgcagcttcccaggcttcggatcaaactgctgcgtttccagatcttaagctgacagaggtatcaaaagaaaatgtaagtgaaaaggaagactctgagattgttcgttcgcctagagttccaacccgttctatcaagaagccgattggtgctaaaaagcctggaaataagaccggcggacttggtgcacggaagcttacatcaaagccaaatgaaagcctgtatgagcagaagcccgaagaaacagctcctgtcctgccatcatcggtgattgcaagtactacagctaggagcaaaccccatacttcccgatttgagtatgtagaaaatgcacctgctcctaagactgggagcagctcagaaggcaatctcatgagtggacatgttgcacccccaaagtcatcgaacttctttgttgaatttgggatggacagtggatatcacaaaaaatctacatccagttcatccaaagtgcagattgaggaaagcagtgaagcaagacagaaattctcgaatgcaaaatcaatttcatcctctcagttttttggtgatcaggccagtttcgaaaaggacactcaagtctctctccaaaagttttctggttcctctgccatatcaagtgctgatctatttggccatccagcaaacaattctagcgtggatctcagtgcttcagatttgatcaacagaatatcattccaggccactcaagatctgtcttctctcaagaacatggcaggggaaactgggaaaaggttgacatcgatggcatccaacatcatcactgatcttcaggaccgcatcctctaagcttaagttacagcaaagtaaacttttacgttgcttcagtggctggtcccgtcaaccgggtgacaaactggcctgccccgcagatctgtctaggagttcgagttcgtaggcgtctgaaaacttcctggcatatctgtctaggagttcggaagcatctgaaaaaagtgtaagctatttccttaatatgaaagcaggaaggattgccgctctcacgtt

SEQ ID NO: 1969 - DNA, 682 bp, Zea mays
  Clone ID: 700172649_FLI
aagcttaacagatgacaccggtggctctgatgcaccagctaaaaagtcattttcacaccttgatctggataatgatgggctcttatcagcagatgagctaaagcctgtaattggtaatctccatccatcagaatacttctatgccaagcaacaagccgactatgtaatatctcaggctgacacgaacaaagatggacaattgagcatgaatgagatgatcgagaacccctatgtcttttacaatgctttattcacagaagatgattatggctttcacgacgagctccgttagttcccaagtcaacacaaagctttatggaatcaccactgtaggaagtcggaatactttgttatgcactgctaagaccatttccattttctgtctgaaatcatcccatcatttgacggtgattccatgtaaaacaagcatgtttttagatgcacctattctagaagctgtgttcttttgtactacccttgagccttttttatagtttgttgtttttttaatcatatatgtacggtgaggatgtgagtgagttttgttctttcatcttcttgaatcttgatacgatacaaaactagcgtcttccagaatcacaatttgtaaaccatacaaacccaggaaagcattactgtaagccatgaattgacgttatctgtaatgattgtgcaaatcatg

SEQ ID NO: 1970 - DNA, 1268 bp, Zea mays
  Clone ID: 700172675_FLI
gagataatggaactctacagactacatcttggcaagatactaaaacaaagtcttgtgcaaggactggctattggctttggctttggtctctcgcagttccttctttttgcgtgcaatgctctgcttctttggtacactgctatttcagttgacaaacaacatctgacaatagccacaggactaaaagagtacattctgttttcatttgcatcattcgcattggtggagccatttggactggcaccatacattcttaaaaggaggaaatctcttacatcggtctttgaaattattgaccgggagccaaggattgatcctgatgataccactggcttgaaaccacccaatgtctacggaagcattgaattcaagagtgttgatttctcttatcctgctcgccctgacattcttgtgctgagtaattttaatcttaaagtgagtggtgggcaaacagttgcagtggttggggttttaggatcagggaaaagcacccttatttctttgatcgagagattctatgaccctgttgctggccaagttctactggatggtcgagacatgaaatcatttaaccttagatggttgcgcagccacatgggcctgattcagcaagatccagttattttctcaacgacaataagagagaacattatctatgcaaggcacaatgcaaccgaggctgagatgaaggaagctgcaaggatagcaaatgcccatcatttcatcagcagcttgccacatggatacgacacccatgtgggaatgagaggggttgatctgacacctggacagaagcaacggattgccatcgctagggtggttttgaagaacgcacctatattgctgttggacgaggccagctctgcgatcgagtctgaatcgagtagagtggtgcaagaagctctagacactctggtcatgggtaacaagacaacgattctcattgcgcacagggcggcaatgatgaagcatgttgataacatcgtcgtcttgaatggcggtaggatagttgagcagggcacacatgactctctgatggaccagaacggtctatatgttagattgatgcaaccccattttggcaagggccttcgccagcatcggctaatgtaattattcttttgagtttgtttaggtgtaaattatcctaggggatgatcaggtttccttgtgcggccactcagtcaggggcccttttcggcacatgaaaaatgctgggagttgccgccctgttgctgttccgagtaagccgacctggtcttcttgac

SEQ ID NO: 1971 - DNA, 909 bp, Zea mays
  Clone ID: 700172705_FLI
ctgctggtgacgggctaatggaactcgagggtttcacgtccgtttacaagaacacgtacaccaaatcgtctctcctgacccatgaagctttcgagaacatgcatggcaacacaaaggctgctctcgactactatgtttcggtcaacagcgacgcctatgtcgccacattctttggaaatatggacaagatggtaactgcgacgagaacaatgcaaggtctccagaggacactggtcttgagcaggagggccttcgcaaactacactgccgctgggctagcagggcagcaactggctaaggctatgtgggacgctcatcgagaggagtatgtcagaggcagggggtcggctctgcccgagtactgcttttgtgagttcaaattgtagcgctagtggctaagtgatatgaggtttacctagacggacacctgttggcttggcgcaactgttagatctcgctgtgattgtgtagacatgaatgagctgttactgcaaacgagatttcagtcagatgagcttgaactgggtacagctgagagacattgatgtgttatgacctggccttctgtgcgagtcagctgcgctgtagtatctagaccaagtggaaattctcttgtcatatcccataacagagatgcagttcaggtgctgccggacgtgaaacagtagtgtgtgtctgtgagctacaacacgcgggaaggttcgagtatgatgatccatcagccgagctaagaggaaaggggtacttaactggtttggaggacaagcgggcgacagttttggaaattctgttactcttctctaacaaactgtattcttctcccttccagtctcttcatctgttttcgttgtaattctgtatgctgttgaacttgtgaagaaagaagaggaacaattttcttctgagatt

SEQ ID NO: 1972 - DNA, 806 bp, Zea mays
  Clone ID: 700172735_FLI
cggcctagattcggttgcctcggaccgggatgaatcctggcgtttcaacagagtatatataaaactctattattgacagaatggtccggaaactggtaccatccgccgccgcagccatccgcttgttctcttcggttcagttctcgagtttccaggatgaaggtaatagctgcctatctgcttgctgttctgggtggaaacacttccccgactgctgatgatgttaagagcattctggaatcagttggtgctgaagctgatgaagaaaaactagagttcctgctcacagaactcaaagacaaggacataacagaagtgattgcagctggaagggaaaggttatcctctgtgccttcaggtggtggtgcaattgacatgggagctccagcagctgtagctggcggtggcgcagcacctgctgaagaggcaaagaaggaagaaaaggttgaagagaaggaagagtctgatgaagatatgggtttcagcttgttcgattaaaacagcactaccagtttacagtttcttcgcgaatggtctcataatattggccggtttccacaaaataagattgtcaatagctactacgtacttatgctattctgcatgtgatgtacgagtgtgcatcttcaagaatctttaagttgaatggtcggtggtcccataataatattggtaacaatgtaaattgtatgtcctgtacgtactttggtatcgcgacatctcagtgtgcatcttcaaggatcataagttgaatgttatcattaaggtcagtttggttcagataaatataattgctagttatagct

SEQ ID NO: 1973 - DNA, 377 bp, Zea mays
  Clone ID: 700172763_FLI
ggctgcagcttcagttgtttgttagcaaggttcttaccagatggttctgagtgatgacatgcagagcggttcttggcgttcctgacttaattatgatcttgttgatgtctggatgcagcgtgtactttagactttcatgtttcttcctttctggatggatgtaggtaggtacatgatgtaagagccaatggatggattgtaggtacatgatgtaagagccaatgaattgtgatttaattatagaaggtcagactagtgcagtggcgagagctgtgtcgttagatcaggcctagtgcagttgtgagagctgtcattgaccatgctatgtcgtcggtttgaagcagcattttcttatagattgcctcagtttattcttc

SEQ ID NO: 1974 - DNA, 633 bp, Zea mays
  Clone ID: 700172780_FLI
gttcgccgcaaaggcctctagaagcaatcaggcgagcggcggctgcggcgcgatgggagagcaggtcgtgacggagcgtatccagcggaagctggaggaggccaacactaccgtccaacagcacctcgccggcatccaggaccacgtcaacttcaccatgcagcaagcatacttcaagtgcgcatatgattgcttcgatcggcgccgtactcaggaagcgatcaacaattgtgtggagaattgtggtatgcctgtccttgctgtcaacaatgtttttgagagtgagatggccaagtttcaggaacggttgaaccggtcattgatggtctgtcaagataagtttgaagctgccaagctccagaagatgaaaacagatgcaactcaggaactggaatcctgtgtcaacagatctatcgatgacagcatcagggccctcccatatgtggtgcagcagatgaagtccaccctcaatatcaattagaggcattattacctttagcatacgaaccagatgtagtttgagaatgtttcatattcacattcaaggcataagtctacattttcagtggaaaaacccttagaactatgcagagctcttaccgatatcgattgtttcgtagttttttgaattct

SEQ ID NO: 1975 - DNA, 1346 bp, Zea mays
  Clone ID: 700172805_FLI
gcagctcccatatccgctcccctacctctccagcatcctcccgtctccgtcgtctcgtctccgctcctcacctcgccagccatgggcaagatcaagatcggaatcaacggtttcggaaggatcggcaggctcgtggccagggtcgccctgcagagcgaggatgtcgagctcgtcgccgtcaacgaccccttcatcaccacggattacatgacgtacatgttcaagtacgacaccgtgcacggccaatggaagcacagcgacatcgccctcaaggactccaagacgcttctcttcggcgagaagccggtcaccgtctttggcatcaggaaccccgaggagatcccgtggggtgaggctggtgctgagtatgtcgtggagtccaccggtgtcttcactgacaaggacaaggctgctgcacatctgaagggtggtgccaagaaggttgttatctctgccccaagcaaagatgcgcccatgtttgttgttggtgtcaatgaggacaagtacacctccgatgttaacattgtttccaatgctagctgcaccacaaactgccttgctccccttgctaaggtcattcatgacaactttggcattattgagggcttgatgacaactgttcatgccatcactgccacccagaagactgttgatggaccctcagccaaggactggagaggtggcagggctgccagctttaacatcattcccagcagcaccggtgctgccaaggctgtcggtaaggttcttcctgaattgaatggcaagctcactggcatgtccttccgggttcccaccgtggatgtgtcagttgttgacctcactgtcagaatcgagaagggggcctcttacgaggaaatcaagaaagctattaaggctgcttctgagggcccactcaagggtattatgggctacgtggaggaggatctggtttccaccgacttcaccggtgacagcaggtcgagcatcttcgacgccaaggccgggattgccctgaacgaccacttcatcaagctcgtctcttggtacgacaacgagtggggctacagcaaccgcgtcgtcgacctgatccgccacatgttcaagacccagtagagagagatatttctgcctccctatcgtgggtcgtccccaatggcctttggtcgcagaccatctttgctgcttgtctatgctgagaataaatgtgaacggtgcccctggacgctggatccatgctggttttggacacgttgtctttttgtgtttaacttatctgctaccgtcctgtaacgaattcactaagttctagttcttttgtgctttgttaagaatataaacaatgaggtttcaattttggtggcgcc

SEQ ID NO: 1976 - DNA, 1191 bp, Zea mays
  Clone ID: 700172885_FLI
tcaaccatatgtgtgtttgatgttttttctatgcttagacctaaacaaaacattcttggtagccacatctaaaacattcatttcaagttctacattaattcatttatattccatcaacttttaaaatacaacacttagtttgtttgaaaagaaatagtttttgtgaaatcttcaaacaaggcttgacaatgatttattcatcgacaatgcatctgagccctctttgcattgtaagctcctacaatgaagttatacaaaagtcttatctattcattttggtttaagctggttgagcactttttacaatatctggtcaacacatctaggatgactcttcacatctgtcaattcaaattctcttcaaaacagctaatattgctccatattgtcttttgaagcttcctggaaaaaatgtcttttgaagctaatcttgctccatacagctaatcttcacatctttcaaagcatttgctagggcccttcggtgagcaatagaatacgacttgcgctaccaaagcgtccataggttgaggacctccatgacacctatgttggtgtgggttgtgccgccccatcgtgaccgtcatcgattgggcctccgagtccaggagaagacctccgatgaagaaagagacatgctgcacatgcacgagggtacttgcagatagatgtcggctctatggacgaacactcgaccaagtcagatgaggagtatgagggcctagccatgcgagacatgatggctaccggtccaacaatgagcagcaagctgtgagttaaagatgaactcacctgtcctggagagcaacatccataggagtgaggcaaaatggcgggtaccaccacaacatggacccgttcttgaagatgtccaaggaggtggtagccgacaccataatgtcttgcgcgtcattgtgtcaccggccggcaacacgctgcgctggtaccggcgggtgttatgtttcttaggcgtatgtttctgtgctttgagctgtgctatagactggttgtgccaactactgattttaaaagaaaaaggtgagctgaaaatcattgttgaaaacaaacatgtaacggttcgttctcatcagttgtgccaactaccaatcatttcattgatcagaatctgtcgttgctcatgagaaccaaaagtaagacacttcttaataacattggatgcaaatttctgct

SEQ ID NO: 1977 - DNA, 480 bp, Zea mays
  Clone ID: 700172886_FLI
cgctctcgctgaaaccggtgcccatggaccagtcgacgcagaacataaccgcgatccgcgcggctgcttgggaggaggctgagaaggccaagtatttggcgagattcaagcgagaagagatcaagatccaggcttgggaggaccatcagaaagcccagatagaagctgagatgaggaaaatcgaggtggaggtggagcggatgcgtgcccgcgcgcaggacaagctgatgaccaagctcgcgtcggcgaggcacagcgcagacgagaagcgtgccgcggcggagctgaaacggaaccgtgcagcggcgaggaccgctgagcaggcagagcacatcaggaggaccggccgggtgccgccgtcgtttggctgctggaactggtgctcatgaagtgcccatggaagatgagtcgcccgttgagaatgagtcgcttgtaagctgttgtaactatatatatatatatacacacacacgcgtatgt

SEQ ID NO: 1978 - DNA, 648 bp, Zea mays
  Clone ID: 700184910_FLI
atcgaatcgtctcgctcgtggctgccctactcgtgctgcttgccctcgccgccgtttcctccacgcgcagcgcacaaaaggagtccgtggctgacaacgccgggatgttggcaggcggcatcaaggacgtgccggcgaacgagaacgacctccagctccaggagctcgcgcgcttcgccgtcaatgagcacaaccaaaaggccaatgctcttctggggttcgagaagcttgtgaaggccaagacacaagttgttgctggcacgatgtactatctcactattgaagtgaaggatggcgtagtcaagaagctttatgaagctaaggtctgggagaagccatgggagaacttcaagcagctgcaggaattcaagcctgttgaagagggtgctagcgcctaaggatctgtcgtctccctgtgcaatttgctgcctgaagcgcaaaactaagttacagaataaggagctgcttcgtaacatgccagagcatgcaccctcgcgtaatttcataaaatcacagggctcttaatgtaatatcttgaattgccgtgccatgtgtaataagtaatatcatgaataacagttgctattatgggttctaaaggtttattaacagccatccatgggccatggcagagttctcatattactt

SEQ ID NO: 1979 - DNA, 669 bp, Zea mays
  Clone ID: 700184945_FLI
gtcgtctacactgacgctaactgggccgggtgcccagacactcggcgctccacctccggctacgccgtcttcttagggggcaacctagtttcctggtcgtcgaagcgccagccggtcgtttcccgctcaagtgcagaggcggagtaccgtgccgtggccaacagcgtggcggaggctgcttggctcaggcagctcctcgccgagcttcacagtcccctctccaagagcacgttggtctactgcgacaacgtcagcgcagtttacctctccaccaacccattgcagcaccagcggaccaagcatgtagagatcgatctacacttcgtccgcgattatgtcactgccggtgctgttcgggtcctccatgtcctgaccacctcccagtttgccgacatcttcaccaagggtcttccgtcctcgaccttcgccgagtttcgctccagcctcaacatcagtagtggctagttgagtctgtggggggtgttagagtattcctattgtgtgatgtacttctttttgagtccagtctgtgtactccgctgcgtcggtagtccagactgcgggggggtgttagagtattaggcctgttaaggctaggcccatgtggcccatgtaaacactatatagctaccctgttgggttagccctaatacatagaatattcactcc

SEQ ID NO: 1980 - DNA, 786 bp, Zea mays
  Clone ID: 700184955_FLI
cccctctcctcgctacgcttcgcttcctcggcgccgattcctcctcctcctcctccaccctcgtccgtccccttccggcgcacgagctcgcccgagatggcgaacgcgagatcgggtgtcgctgtgaacgatgagtgcatgctgaagtttggcgagctgcagtcgaagaggctgcaccgcttcataactttcaagatggacgacaagttcaaggagatagttgtggaccaggtcggggatcgcgctaccagctacgatgacttcacaaacagcctccctgagaatgactgccgatacgcgatctatgatttcgactttgttactgcagaggatgtccagaagagcaggatcttctatatcctatggtccccatcctccgccaaggtgaagagcaagatgctttacgcaagctcaaaccagaaattcaagagtggcctcaatggcattcaggttgaactccaggccacagatgcgagtgaaatcagcctcgatgagatcaaggatcgggcacgctaggcgcaccgccatcgcgagtttcatgatcacgcatcatggactcgcctactactgtggatttgtatgccattatagacttggtgctgcgaaagactgctttggtgatttgtgggtttgttgctgtgtaaaaagatcctcatggcttccagaagaccatgaaggtttggatctatcatgtaattccttgttatctgccaattatgtatggactatggacatgtgttgcgctgttcaactcactacaaataagtaatcgatatattccccccc

SEQ ID NO: 1981 - DNA, 310 bp, Zea mays
  Clone ID: 700192923_FLI
gcttcatcgagcggttctaccaggagatgaggctgcagaggcagcgctctctggtccagcgcctgctctagagacattcgtccgttgctgctgcttcaattccttggtcgatcgggcagaaccagtcgtggttgtcgctgctatcttagctgcacttcggttaaatctctccgtatcttgcatttgcgtcgttccatgtttttttgcttctcatgtggcaattctcttgtctgtggaaggagacattcgtctcccctgctgttgtactgttacttctagtccttacctatataatccatccttgtgttgc

SEQ ID NO: 1982 - DNA, 1122 bp, Zea mays
  Clone ID: 700193015_FLI
agaaaatctcgtataacgcaagtcgtcaaaataccgaaggttaacaggcagattatggacagtataagggaagatgaaatagatcttgatatggagaatgttgataaatcaagtattaagaagaagaaaagaaaactagaactgaataaggccattttggatgatgatcggttcaaagaaatgtttgagaataaggattttgaaattgatgaagaatcaaaagaatacctcgcacttcatcctcaggcagccacaaaggagcctcgcctgattgaagaacattttgatagtgttagcgaggacgatcaacaatctgatggtaacatatctgacactctagcggaatctgacagtgatgatgtcatgcataattcaaagcgtataaggttatacgaggtcaaggatgaacaccatgcggaagcatttttgaacagcgtctctttatcaaacgaggatgctgttccccttgaggataggatagctgccctggaaaggaaacagaactccaaagcacttgatgcggtcaagtacgggcctggtggctcacgagagatttcgtttttctctaaaagccgtagaaggcacaaggaagagtcgtctagcgacgatgaacccaagggtgtcaaaaagagagctgtgcagccgctgggcttgaagcagggaaaagccgagttctatatgtttggcggaaatcgtggcagaggtagaggcggtggtggcagaggtggaggcggtcgaggaagaggtggaggtggtcgaggaagaggtggaggacgaggcaggggcaggggcagaggatgaatggggcccgtcacattgaccccgttcctgcctttgcaggggttttggtaagcttgaaatggattgatcctgcacatgcagtgggtagaaagtgtgttccttcacaacataggcaagagctagagtaactgaggattgctgcttcagaatttttgggaagagaactttgttagaagacaatattacatatcttatggtctaccttgtaacggatcgttgcattctggtgggtgtctatgggtacggtatagcattttttttgtaataggcaacataactgctggcattttcatttttgagtactgaaggctctccaaatcc

SEQ ID NO: 1983 - DNA, 979 bp, Zea mays
  Clone ID: 700193217_FLI
gccgcgagcctccaaaaccctaaccctaaatttgggggcgcttgggtcaaagagacggggggaggaatcgagccggcggcttgcggcggcatcagcgatggcggcgaagcgggagatctcgagcaccctcaggaacctcaagtttatgcagcgcggcgcggctgcgcagaaggccgaggagaaggccgaggtggaggtacaggaggaggcggtggtgatggcgccgagtggaggcttcgcctcgtccgcgcaggtcgttaggaagtgcatagttatcatggagggtaatcctcatccaggagctataaagggtcggatgtctttccaaaatttcaatccatctatcgatatgtgtagaaactaaatgaagaggcaagaggtgaccagcaaacagaatcagcttcccccagtaactgtgaccaagacaatgcaaactccagcagagggaatgaagttccagcatcaagatgtagagattttggcattcccagttcagaaagcatatctctaaatgaactgaagaggaaggagcccgaccttgatatggaaacaccggcatcttacaaggaaccaaaaaccaatgttggcggtaggtcatcttcacaaagcaatggtcgcggatcacacaagtccaacaagcgtgaaaagctcgacttcaatcatctaagaccgaagaaatgaaaaatggtgttcgagttagctcttgtactctgtttgtagctgtacccaattggccatctgctgtgttttgtcgattatatctagagagctggtaaccatgtccatgtgaccatgtggcatgcattcttagtgagattatgtggtgttaatcatttttctttctattgatgtgttctactcaactactctgctgtaagatgtgaggctctactgtacagcagtgatgaatgcagttctgcttatgttttatgtcgcctactaagcatgtggtcaaaattgagctacggcatgatcgttc

SEQ ID NO: 1984 - DNA, 931 bp, Zea mays
  Clone ID: 700193220_FLI
gtcactgccacatgcacctccgtggcaagtgtcctttggctttggcatcaatcaaatagacaagaggccacctctaccaccgccatccgcagtccatacagtgacccccacgaggtcaagaacctgtacgaggagaggaaagaacctggaagagaggagcttgaggagatggcgagcgccgagggcgagaggtgggtgggactggcgacggacttctcgcaggggagccgagaggcgctgcagtgggcggcgaccaacctgctccgcgccggcgaccacctgctgctgctgcacgtcatcaaggagcccgactacgagcagagcgaggccatcctctgggaatccaccggctccccgttgattcccctctcggagttctctgaccctattatcgcgaagaaatatggagcaaaacccgacatggaaaccttggacctcctgaacactacagctacccagaaggaaattatggtggttgtgaaagtcctgtggggagatccgcgtgagaagctctgtcaagttatccatgacaccccgttgagctgcttggttataggaagcaggggccttggcaaactcaagagggtgctcttaggaagtgtcagcgattacgtcgtgaacaacgcaacctgccctgtcaccgttgtcaagtcatcaagcaccgaaggttgatctcatcaccgaaatgcctgaatattgctgttgttataataaaagatggttggcctcatgaagaacatgcactagtttctagctacctgaaacatgttgaaccgggcaatcctattgtaataatagacaaagtgctttatgaagggcatggttatgtaataggtctgttctccaaaaacatgttgaaccgggcaatcctattgtaataatagacaaagtgccttatgaagggcatggttatgtaataggtctgttctcc

SEQ ID NO: 1985 - DNA, 555 bp, Zea mays
  Clone ID: 700193602_FLI
gatggatatgtgaaaaattcaactaactaaagattgggtaattgattgaatctgtacacagatggctattgacaccaatacagagcatgctgagcctaagcacaaataccttctgagagtccacgaagtgggagatggctccacaatggactgcctccactaaattggatctgatcttactcgtactcgagagctaccagagctacaacagaatgtgtccatgcagagcgggcaagaagatttcgcagtggataaggattcaagcaggactctaacaagtgtgcgtgaggtatatacacaatatgatctcccagtagtcaagaaatgttacagtctagggtcttgatggtctcaaatattgtgttaaatgtatttgtctgaagcttccttgcaacatgatactttagttatttagttaacgagggtgccatatgattttcctttatggcattttgtcagtgaattacttatgtcgtggcacaattgtttctgctttcaagcggtgttgaaatttggattagtttgactggcatatgcagattgggtgttctattc

SEQ ID NO: 1986 - DNA, 417 bp, Zea mays
  Clone ID: 700193609_FLI
gcgacgccctactgctcgcctcagtgccagtcgttgcggcagcagtgttgccagcagctcaggcaggtggagccgcagcaccggtaccaggcgatcttcggcttggtcctccagtccatcctgcagcagcagccgcaaagcggccaggtcgcggggctgttggcggcgcagatagcgcagcaactgacggcgatgtgcggcctgcagcagccgactccatgcccctacgctgctgccggcggtgtcccccactgaagaaactatgtgctgtagtatagccgctggctagctagctagttgagtcatttagcggcgatgattgagtaataatgtgtcacgcatcaccatgggtggcagtgtcagtgtgagcaatgacctgaatgaacaattgaaatgaaaagaaaaaagtattgttcc

SEQ ID NO: 1987 - DNA, 867 bp, Zea mays
  Clone ID: 700193656_FLI
catatgccaatttcctcaaaagaaaatgggctatactgtgatgtatgcatgcgaactgaaactctgttgaaccgaatatttgtctgctccagatgcaaggctgctgtgcacatagattgctacagaaatctggaaaattctattgggccctggaactgcgaactttgtgaagatgaagacatttcatcagaagctacaagtacaaccgttagtgataaatcacattgtaatggcaagttaccctttgcacagtgtggcatgtgccatggcacatcaggtgcttttagaaagactgtagatgggaagtgggttcatgctttctgtgctgagtggttgttggataccaagtatgtaaggggacaagatagccctgtagaaggaatggaaaaccttgtagagggaaaagacacttgttgtctctgcctctgcaatgttggcatgtgcttaaggtgtagtagtggggattgcaacattactttccatcctacttgcgctagaagttctggtttatacatgaacacgaaagggtttggtactacatcacagcacaaagcatactgtgacaaacacagcgtagaacagaaagaggctgatgcgcagcaatatggacctgaggagctcaggagcatgaaacgaatgaggtatcagatgcaagagctcattactcactgccacttatgaagagatcagtctgaaaccaacaaattatctttagctaccttgtgaaaactctgtggtttgcttgtatcattcgagttagctatttacagttttgggcatacattatgctgccacagcacttcatggggcagaactcatcagtcgttattcatagaggaaacaatatatttaggaattgtttttctt

SEQ ID NO: 1988 - DNA, 710 bp, Zea mays
  Clone ID: 700193721_FLI
ctcctggtgctcagagcaatggcatgggaaactatctaagcgatgaacaacggatagaagctgctcatcgtgcaaattttgtccgtgaactgataatagataaagccccatctccactagtgagtcttgttggtcgaaaggattatgaaagatgtgctcatgatatctatttctttcttcagtccccggtttgtttgaagcagttagcgttcgaactccttgagctgcttgttctttcttcatttccggagttggatggcactgtgaggaagtggcacgaagataaagagcaattctgcgcccagtaatgtttatcaaacgtttgaatttgtcacggggcggtgtttgtttccaacacatatcgtctttccagagtggtgtggcctgtgaattctgcgaaaataaggtggtggcttcagaggagtgcccgtggatatctcagtttgaagtgggtggtggctttgtgcagtgtgaatatggttagatagtgcgaggatatggtccctttttccaccgggccatggcagaacggtttttgtgctcgatagagttcatttttccccctccagatttggtatacgtaatgctgctgcctgaaaggaaagagatggtggcgcatttttttttgcacccgttttggtggtacactggtacccgtcttgtgtaaatctgcatagagataaatgaagtttcgaggtggtcaatgaatg

SEQ ID NO: 1989 - DNA, 981 bp, Zea mays
  Clone ID: 700193873_FLI
cccagacgacggaggtggcgacaacagctcaagccacgacaccgacttttctgctgaccaggagccggaaggatgggttgctcgacccatcactcgcgacgctgctcgcgggtgtcacttccacgatgcgctcgacaccctgctacgtcgggcacttgaccggcatacttggtctatcgagtatcgctgtgtggtcttccagcatagtcgcggggtctacccggaccgctgggaggcgacctgcttggtgcgtcgtccggagaacagtctctagggtgctgaggtctgctcagagcactattccatctctaagcgggactcagctgaggcagccatgcaagatgccgcacggcgtgcgctttcgcactactgtttagtgctcggtggggtagctgatggtctcaacatgaagtactacccccgccgtccatctggcagcacaggaggcgtgattgtctcacctgtcggtgaggacaatcctaggttgagcagcacagtcaacctagccgccatgctaaacacggagctggaccatgcattagacgagctgagtagggctcgtgctgagatcgcccagctgcgggctgagcgcgcggagcgtcgtcacctggatgatggttcccccgctcccataaggactcagcacccgtaccgctcacctcggcgtggacaccagtcttatggcaacaccgactgcaagaccaagataaatttagaaccatagatcgttagagccggatcttgtaattaatacaaaatatatacatagaagctacaatcttagcattagtctcgcttttagttagtcttagttagacagggtagtttgctatatcctgtgcatttatgtttgtcatgatgaattatgtttgatttggatcattgtaatgactgtcaccaggatgtgggtatcccctgcattttggtttacctgttatatgttaatggagttagctatttagttgggaagccttttattcc

SEQ ID NO: 1990 - DNA, 412 bp, Zea mays
  Clone ID: 700193946_FLI
cggaatggtccgccgccgtcgtcgtcgcaggtgaaactcatggtgacgcctgggttctatgtccaggacaggctgctcaaatgcagggtgctctgcaggtacagcggctagatctctatcgctgattggattggaggtgcttcgagtgttcttctttgactgattgttagttattagtgtgatgcagtagtatctgttctgctaggttgcaaagtgctatactgggacgccagaatatcattattttgacccttggcatgcccgtcagcatctctgtaacataagagagtcatgttgtgtaagaaagatgtgtgcaagattttagctcaacaggtttcctcttaacttttcgaagggaagaaaggggacctttttttttatgaacagatgcatcagccattgttcttgtttg

SEQ ID NO: 1991 - DNA, 1119 bp, Zea mays
  Clone ID: 700194133_FLI
aggaggacaagtatgacagagaggcctttggtagagaggaggctgctgaccgcgtgtacatgcacgatataatggatgacggtataaacatgagcatcaacagtatagtccctgacctccttgatgattccattgaaggggtgtaccgttttaagaaggatcctcgggcagatatgagggcagcatctgcaagactcagagaagacgatgggtctgctaaagatggtgactctcactatgccactgaagcgaaggacttcctgaatgtgggaattcagacaaagaaagctgtggaggaagtaaatgtaaaacctatactgaagaggaaggaggagcaagcggatttgaaaccaaggaaacgtgtccggtttgatgctaatgttaaggatcgcgagtcggatatgtttgaacgtgatgaagattctccaatggttcctcaatccatggaagtagtcacagggaaggagagcacgcctactttgtctgtgtctcctggtgtccctgactatgtaaggaacccttcaaagtacacccgttacaccctggatgtaccagagtctaatgatgactcgaacaggacggctcttgctgacctgcatgatctgttagggagatcagaccaaaacaggatacattctgagactgctgttgagattcctagctcagtcacattcatccctcgcaaaaagtcagtggatgccatggcagtggatgacggtcccagagctattgattccaactcatctgtaattggattggtagcaggtgcctctgatgaacctgatcaatgcgagatggatgaagatgacagtaatttatcgtcaacgccacagatgcatacaaactcgaaggcaaactctcggcgttacaggtcaagtagaactgatgatgatgagtaaaattgagggccccagggtacctagtctgatgtttgtttaagaagtttttaagtttcggaatacttatgtaaatcaggatatatgtgtgctcttgtgctttgatcttgtgatctgagctaaccaactatgtttaagtacgtttcccccatatgctttgttctataatttcttatattgggatttgagcgccacatagtatgtcaatattagaaattttcag

SEQ ID NO: 1992 - DNA, 495 bp, Zea mays
  Clone ID: 700194320_FLI
ccgtccttctggcgctgcagtaccgcggccgggagatcttcggcatcagcgagaaggccaacggcaccatgatcttcaacgccttcgtgctctgccaggtgttcaacgagttcaacgcgcgggagatcgagcgcaggaacgtcttcgccggcgtgctccggaacaagatgttcctgggcatcatcgccgtgacgatcgccatgcaggtgctgatggtggagctgctcacgaggtttgctggcacccagaggcttggcttggcccattggggtgtctgtgtcgccattgccgcggtgtcgtggcctattggatgggccgtcaagttcatccccgtgcctgaccggccgctacgtgagatcttagcaacgaggatgaaaacaatatctaggataattacacaataatgttattctttttttagaaaaaagtataattcatttattggtattttattgtaaatacagtttactaagataatggatttgttatatgctc

SEQ ID NO: 1993 - DNA, 992 bp, Zea mays
  Clone ID: 700194387_FLI
gaatgctcatcgaataggatatgttgcaccacgatttggcaggaatactgaggcaggagatggagaagactctcctgaaaacacagcaagtgcacaaccatcaccttatcattctggtaaagggtacacacatgcaaaagacttgagtaataatatcaaaaagggtggtaaggcaagcacatcatttggtattcagcaaagagctgagaagtccgcaaggactaaacgatctacgaagtcaatactgcacgggctgtctgatagtgataatagtgattctgagtttatgggcaccctgtcgaggtcaagatcgcacaccctgaagacaaaccgaaaattgtttcaaaatggcagtactggtttgataacacctcaatccagtggactgatagaaagagagagggtcagaactaaatcccagccattggacccaaaagcaacaagcaacggagatctacatactatggatgagtatcagtctgttatcatgcagttaagggatgaaaattcatcactaaaggaaagattatcaaagatggaagaatcgatgtcgcaagagctagtggttgagtgtgacaagaacaagtctttgacagagagggtggaggatctgcagagacaacttgagtctgcaaccaaggaacaggaggcgctgatcgacatcttctcagaagaaaggaaccgacgagaccaagaagaggagagcctgaggaagaagctgaaggacgcatcttccaccatacaggatttgctggagcaactgaatgctgccaggaaaggccgcaaagtttgaggaaataaactagtaacgttgctccttgcgggcatcatcttagattagagtttgagggttagctgcatctacattgtgctccaggtcgtttggagcatcccatgtacagccaagcagtagtgaccactgaagaacacgttatgctttatctgcagttagcagttaccctacaagaaataacttgcgtaattatcttttt

SEQ ID NO: 1994 - DNA, 465 bp, Zea mays
  Clone ID: 700194549_FLI
cgtcgagttcctgaggcatcagtgcagcccgacggcgacgccctactgctcgcctcagtgccagtcgttgcggcagcagtgttgccagcagctcaggcaggtggagccgcagcaccggtaccaggcgatcttcggcttggtcctccagtccatcctgcagcagcagccgcaaagcggccaggtcgcggggctgttggcggcgcagatagcgcagcaactgacggcgatgtgcggcctgcagcagccgactccatgcccctacgctgctgccggcggtgtcccccactgaagaaactatgtgctgtagtatagccgctggctagctagctagttgagtcatttagcggcgatgattgagtaataatgtgtcacgcatcaccatgggtggcagtgtcagtgtgagcaatgacctgaatgaacaattgaaatgaaaagaaaaaaagtactccatctgttccaaaaaat

SEQ ID NO: 1995 - DNA, 527 bp, Zea mays
  Clone ID: 700194567_FLI
atagaatgatgagatggatggagcgagcacagaaaggggtagaagtcgcgaagaagacaaagaactggctcttgggccggcaaggcttgatccttgctattgtcatgctgatcctagctttcatccttcatcagtttgggtttatcggcagatgatgggggtgacttgggtggctgcatcagcatggaaatagattattcgatggcgatgcagagttccctcttgctaacaactgcttaaaagcgctttgggggaaggccggattacgagaattctttgtatccgtatcttatgaaagtgtaactctgtccataaagctatttcatcctatttttaccagcaaaggtagtagaaaggaatcgagccgaaactgttgtgataacaagacgacatgtaatatgataatatccttgtggtgctttcagttttaagtagcagttttgtttaataaagcatatgcaaaggtgaagtggaacaaagtacatgcgcacacagaaactaactggaagatagcatcttcaattctt

SEQ ID NO: 1996 - DNA, 654 bp, Zea mays
  Clone ID: 700194632_FLI
gatacgacatggcctacatgtttgcatacagcatgagagagaagacccacgctcaccggaactacgaggacgatgtacccgaaggtgtgaaacagaggcggctcatggaactgatcaacactttccgcgagaccacgaagaagaactacgactctcaagtcggcacagtgcagctcgttctcgtggaggggcccaacaagcgtgctcccaaaacggaagtgatagggaagactgatcggggccacaaggtgtcgtttgcccgcgtccctgtcccgcacacgttcgaaggcgaagaagcacgtgagccggcagtcggtgacttcgtcgaggtgagaattctcaggtcgtcgacagcaacgttgttcggggagccgattgcacgcacaagcctgagcgcgttccacagaaatgtttcacccggagcgcaggctgctgctgcgtgagtagcggttgaatttttggttgtggattgaaatatgtagtgatattttaaatgactagagtttttgatatagaggagaaactgagaacgtgcatgtcagcctcatgagccttggtcatttacttttttgataaggttgtattgccatgtaaaggtcaaacaatgttgacaaagttttttgcttgttactatgaagtatgaacgtcagcttg

SEQ ID NO: 1997 - DNA, 477 bp, Zea mays
  Clone ID: 700194701_FLI
ggcagcaccccgatcctgggccagtgcgtcgagtttctgaggcatcagtgcagcccgacggcgacgccctactgctcgcctcagtgccagtcgttgcggcagcagtgttgccagcagctcaggcaggtggagccgcagcaccggtaccaggcgatcttcggcttggtcctccagtccatcctgcagcagcagccgcaaagcggccaggtcgcggggctgttggcggcgcagatagcgcagcaactgacggcgatgtgcggcctgcagcagccgactccatgcccctacgctgctgccggcggtgtcccccactgaagaaactatgtgctgtagtatagccgctggctagctagctagttgagtcatttagcggcgatgattgagtaataatgtgtcacgcatcaccatgggtggcagtgtcagtgtgagcaatgacctgaatgaacaattgaaatgaaaagaaaaaagtattgttcc

SEQ ID NO: 1998 - DNA, 1248 bp, Zea mays
  Clone ID: 700195039_FLI
attaatcttaatatcgaggagttcacacaaaacttgaaggactatatgcaagcaaacaatgttgagattgaatatgctgacatgtcaaaggcattggttgccatcacgcctgatgctgcttccattccaactccaaagctcaagaatgtcaatcgtctgaggacagaacaccaagtttatgaactgccagattcacaccctcttctggaaggagtgaaactgcacaatcgatcgatgcccccaagacattctgtgattcaggggagacgggtagactatgtggaagttcaacatgctttagttgcaacaatatacgagaaatgcaggctcagaaagtcagaggaacacttttggcaagtttgctttgagtcttattaatttttatgtgttgggtattatatacatctacactaaaagtgctcattgtttggacaaattttaagcagataccatgccgaacagcaatgagaggaagcttcccacttaatgggacgtattttcaagttaatgaggtatttgctgaccattgctcaagtcaaaatccaattgatgtcccacgaagttggatttgggacctcccaagacgaactgtttactttggaacctcagttcctacaatattcagaggtttaacgactgaagagatacaacgatgcttttggagaggatttgtttgcgtgaggggctttgataggacagtgcgggcaccaaggcccctttatgcaaggttgcattttcctgtcagcaaggttgttagaggcaaaaagcctggagcagcaagagcagaagaataatagaacattgaagaaatataggggtgctaaccagatgaggatggatagcccgaaatgagatgctgacccaataggtcgccaaatcacctccaaattctaacccaatgacttccatctgtaatgaatggcaataccttgaaaacctgtgatggagatgttttgtggcgacatgatctcttaaattagattccgtctttggtaacagcctagctgttcttgttgagtcgcatattctttattctgaagatcaatatagcaaatgggagaaaaaacatagtgcacagtcgagctgttctaattgtacctcttgtgagtggaatcagttgttgtacaacaggaagatggacctatctgtacaatggtcgtacatgttctttgatcatagtataaacaatgtaagcctcatcagccgttatttgattgtttcaaaacaaaggaaaagcattttcaattc

SEQ ID NO: 1999 - DNA, 1287 bp, Zea mays
  Clone ID: 700195076_FLI
ctctcgattatgttgtactttattcacttgatgtgatctgccacttccagtttagctcttcgatgttaatttattgctaagtagcctctacaaatagcaagttgccattgtataatactcttatcttcatctaaagaggtatgcctctcgaatctgggaatgagccatggttcagcttgaccatctcagattcagaaaggctgagacactggataagtttgttaatttgggagatggtggtacacattccagtctcacagacttcatcatttcaaccacctcattgagatgatagggatagctacttgggcttaaagaggtttacaattccaatcataaacgcatggttttgtgttcttttctggttagtttttgatacaaatacaagagattgattgatttttttacatctgtaagttattccatgctgcacatgtactgctgtataagctatagtctttgaccccatcggcactcaaatttactggattgctctagttgatagaaaattgttatgttggttcaatttactgataagagtctaaaatcataacccagtgtacagacacttaaccacatgcgtcctaacattgtaggcgtacataatggagctggaagctgaggtggcaaaactcaaggaccagaatgaggagttgcagaaaaagcaggttgaaatgctaaagaagcaaaaggatgagcggaagacagcagatctttctggctgctgattttgatgcgctgcatattcatcaactgggaaatgacggttcccttcagacaatgtgtttttttttcactcacaaaagcttttgtgtaaatggtttttgcaggtcctggagcgaatcaacagccaacatggaccaaaggcaaagaagctttgcctgcgccgcaccctgactggcccatggtagcctgctgaagcttgcacaaaattgaccgaagtcaagatcgtcgggccagatgtgcccgtgtgtatatatcagatgaagtcaagagtactgagtaccccgttacccctgtagaccgccgctacttcagagctgccgttcttgttctgtgacgtgggtagtctgcgcctgacagttcgctgtttaggttcggttgcgcgatcctcacatgaacaatgaggcgtgccatctaatttgtttattaactcactcctatctatggtgagataatgcaagtaacctggagtatgtttggttgatttgccgttttgaaaaatatgctgtgagctgtgtggaaaaacagcggtggcccgtgtggaaaatagaagccgtttgattt

SEQ ID NO: 2000 - DNA, 2302 bp, Zea mays
  Clone ID: 700195210_FLI
gaagggtgttcccttcgtctggtccggcgattgtgagatcagttatcagtcattgaagagcaagttggtggacgcccctatcctagctttgcctgagagcggtaagcgtttcacagtttatacggatgcttcgcgtattggtcttggctgtgtgctgatgcaggaaggcagggtgattgcttatggctcaaggcagttgaggaagcatgaggggaattatccaactcatgatctggaattggctgcggtggtttttgctctaaagtcgtggaggcattacctttatggcgaggcttgtgacattttcactgatcacaaaagcctcaagtatatttttactcagaaggagctgaatttgaggcagcgtcggtggctagaattgattaaagattatgaggtgtccattcattatcacccggggaaggctaatgtggtggcggatgcccttagcaggtccggggttccaaaggtggccgtgccgttgattgctgatctggaccgtttggggatcgctttgtgttatgtcggcaccgctagcgtggagactcagatgcttattcaatcccctcttatggagagagtgcgtgcggctcagcagcaggatcgtcttttgcaggaagcccgaaggagggttggtgatggtaaaccgcgagagttcaccattgatgagaatgatttggttcgtttcaggggccgtctttgtgtgcctcagaaatcagaggtgaagctggatatcctgcgagaagctcataaaacgccttacaccgtccatcctggcgaaaccaaaatgtaccgagatttgaagcaaaacttctggtggaagcggatgaaggttgacatttctaagtatgtggccgcctgtgaagtatgtcagcgcgtgaaggccgaacataagcggcctgcaggtttgctgaagccattggaaattccagagtggaaatgggagcatatcaccatggattttgtggtgggtctacctcgttcccctcgtggcagggatgctatttgggtggtagtggatcgcttgactaagtctgtgcattttattcccatgaagaccacgaattcagcttcagatttggttcccttgtatatgaaggaagtagtcaggcttcacggggtacctaagtctattgtttctgatcgagactccaaatttgtatccaaattctgggagagtctccacagtgcattgggcaccaagctttcgcttagtgtcgcttttcaccctcagacggatggtcagtcagagcgaacaatccaaaccttggaggatatgttgcgtgcttgtgttctgtcatggaagggtagctgggaggatcatcttgctctagcagagtttgcgtataacaacagctaccaagctagcatcaagatggcaccatttgaggctttgtatggcaggcggtgtatctctcctctgtgctgggagactttgggagagagatccctggttggtcctgattgggttcagcaaacttctgaaaaggttcgggaaattcgtcagaatattttggtagctcagagtcgtcagaagagttatgctgatgtgaggaggcgggatctggaatttgctgtgggtgaccaagtccttctcagggtatcacccactaagggagttgttcggttcggtgtctctgggaagctcagcccaagatacattggaccgttcactatcttggcccgagtgggcagcctggcttatcgcttgctgctgccggattctatggcaggggtacacccggtttttcatgtctctatgttgaggaagttcttgcgggatccggaccatcagattgagatggaaccaattgcggtgcagcaggatctgactctagagtgccgtccggtgcgtatattggaattctcggagcgtgtgttgaggaagagatcaattaagtatgtcaaggtcttatggtctaatcagtcagagcgcgaggctacgtgggaacttgaggagttgatgcggcagaagtacccggaacttttcgttgtgggtggtggacttccggatcgttcttagggattttgcccgaacttcggtaaaggcacctgatctttgctttgggaaggaagggatgtagcagcacggccaccacacttttaaataaaggaattactgattaataatgatgttaaacaggaagagtcaagtctagggaattattacattctaatctttcatggtagttgaactgtttagtttggtgggcggtgatgtctatcttttgtctggtcatgaatgttctttcctaccgttgtattttgattatactatgtcaattatctttcttttatattc

SEQ ID NO: 2001 - DNA, 573 bp, Zea mays
  Clone ID: 700195290_FLI
ggaagggtttatagtttggattatatgattggatgatcggatggttagtagtttggattggaagattggatcacatcgcgtagtccacctctcctctccagtttccacgagaaaaaaagtggatcctctttcccaccaagtcaaggtttgtgaattcgggagtgctagaatcttgatcttccacaagagaatgtctccagaagcaatggataggcttctagaaaaagataaagtgccaaacccatgctatagagtatagactgaggtgagaggtgtgtaaagcttgtttgcttcaaaccgatggtaacaactgagtggtgcaacaaattctgaattggttgaaggagttctctcctagcactatcctggagacggatgttggagaaatatgactgctggatctgcaataggataatgtcttttagtcgatcccttttgtgcttgtttggtgaacttgtgtccccaatctgttgaactctgtaaacatttgctttccataaaagcagagatattctccttaaaaactcagtccagaatggtgatatatgaatgatccctgagagtttataaggt

SEQ ID NO: 2002 - DNA, 579 bp, Zea mays
  Clone ID: 700195318_FLI
gtttgtgcctgacccaagatttgaggaggttaaggaatttgtccgcagtggtgtctttgggacttacagctatgatgaattgatgggttctttggaaggaaatgaaggttacggacgtgcagattatttccttgttggcaaggacttccccagctatattgaatgccaagaaaaagttgatgaggcgtaccgagatcagaagttatggacaaggatgtctatcctcaacacggctggctcatccaagttcagcagcgataggacgattcatgagtacgccaaggatatctgggatatcagccctgccatccttccctagaccaggtggatatcaggttctttcgcctatatttctgtgaaccctcaggatcaaggaacagttggtgacgacattaatttgcctcagccccttagcaggaagcgctggtcacctcagttttgtgtagacaaaatctaggcatcgataaatgatgggactatgcatggtattttggcagcactgttcagtaccttgccttttaaatctggtttttggtgtgtgtaagctaataaatgtcgaggcaggatcgtaggaacacc

SEQ ID NO: 2003 - DNA, 256 bp, Zea mays
  Clone ID: 700195369_FLI
gcaagcggacgtcgtctaaccaacactaacatagtgtttattccaggatgacgaagccgaagaacacagagtcgaagcttagcagacaattcgaagctcaacagatggtgatgaagctcgaatacctagctgtggaagaattctaagaaaactcttgtattaacctttataaagagtattgtaacttaagaatcagattctactctgtaaatttgtccataccttgtaatatatttttatttccattttacctttc

SEQ ID NO: 2004 - DNA, 898 bp, Zea mays
  Clone ID: 700195606_FLI
cagaggcccagcccacggtgtcagtgtcacctctgctatttcttcacccgtccgttcacttgcgttcatccggcctacgttaaaatctctccatcccggcgacgactggcgacagccgctgccggcctactccaggtccccaggtctacgtcggacccttcgccgcggcgaacaccaccagagatctgtcactgattttgcagtcctcttgtcagatggcgagcacggggcggtcgatgctgctgtcactgctcctcttcgcagtgacgctgtcgctgctggagatgtacagggccaagttcgcctcgtcggagctcatgaccattgccggtggattcgtctgctccctcctattcctgctactcctcacctttattggaaactatcaagaagctagtggagatagaactgggtggggtgcagttgttgtagcacaacttgtagctcttattgtagccggcactgtccaccgtgtctgtatcacaacatgcttcctgttttccgctggactcctttacgaggttgacaagctctctggcatgatccttgcgaggagtgagtctaaggtgaggcggcactaagcacagaagcagcacagagagatgatacatcgatatttttatgaccgcccctactagcgcggagatcggtggagagaggaggcatgacgagcagaggtaggaggaggcatggtgggcgaagaagggaggaggaggtgcggcgggaggagtcacgctgaaggaaccgagcctcgaggagaagagaaaggatgtgggatagataaagaataaattgttttgtgtaataagtgacagtggcaagtaaatacttcaaatccacatgtaggtttgttatacctatttttggaatagggaaagaggtactccagattttgtac

SEQ ID NO: 2005 - DNA, 559 bp, Zea mays
  Clone ID: 700195654_FLI
gattggaatgggaggacctttcgggatgatggctggatctatgccacctccgcctccattgtccaacattctgccggcaggttttccgcgaccaagtgggccacctcctccacctccacttccaccagctcagagccagccccagcagcagtctcctcaggcggcacagcaatcaccaacatcaactggattctttcagtcatcgggcatggggttctttccgcctgcgcaggtgcagcaatctccatctgcccaacgccagtgactcaacggtggctctggcattcatgggcgtaaaggcagcggcgcccttgtgtgttaactttgtacactgaacaatatttcactctgtgtcgagcttaaacgtggctggctggtcctgcaagcgaggcagggccaatggccacgaattagagagattgtagaataggcatgcgtcctctgctatgtataactattcacttttttttgttttgttttgtttgtctgagtagttttaacttttcctttttcccgtttgcattgatcccccgaggcagaagaaagtgactttggaaag

SEQ ID NO: 2006 - DNA, 393 bp, Zea mays
  Clone ID: 700195687_FLI
aagcagggggacgtcagcaaggactcgaccgctccaacagctgtccctccgccaagctccgttgctcctccgatagccacgacatcacaccagcagggcgccaagatctctccggctgccacattggcatgtacttagggcactagctctccctccgctagacacgtagcactccgctacgcccccgttgtacacctggatcctctccttacgcctataaaaggaaggaccagggccttcttagagaaggttggccgcgcgggaccgaggacgggacaggcgctctcttggggccgctcgcttccctcacctgcgtggacgcttgtaacccccctactgcaagcgcacccgacctgggcgcgggacaaacacgaaggccgcgggatttccacc

SEQ ID NO: 2007 - DNA, 606 bp, Zea mays
  Clone ID: 700195696_FLI
ggaggcctttataagggccttttcccctctttggtgaaatcggcccctgctggtgctgtgacatttgtggcatatgaatacatctcagactggatagggagcaaggctggagttgagtgaggtcttgatggatcatggagctatcaagataccatgacgagaactttttgcacaccgtggacatggaggatggagaccggaaggtcaatcgtcaagtgcatacaattcctagagatccgatacatgtaaagccttacatagaaaagagctgttttgtcgtttcttattctttccccaattgcctaatgtggtggtagggcattcgttggcttgtaaaacaaggctgactacaactaacttagtgatcgcgacgcgtcatacatgactaagtcaaaagcagccggcagttttgctgggatcgtgttacgaatcttttctcggctgcagtcatgttttccttgcggcttgttggggctgcgtcttctacagtcttttttatttatatggattgcacctgcaacagactgcagcagctacggttgtagggcagccgaacaaatttcatggttgatggcagtcgtaatttattcaaccattttgttgagc

SEQ ID NO: 2008 - DNA, 954 bp, Zea mays
  Clone ID: 700195724_FLI
caagcatttaaaataatgcatgatgagggtcttgctctggttcctctttgggatgaccgtcagggaaccataacaggcatgctcactgcatcagattttgttttaatcttgagaaagttgcagagaaacattcaagttattggcaacgaagagcccatttctgcttggaaagaagcaaagctacagttctatggtgggcctgatggtgctgccatgcagagaaggccattaatccatgttaaggattcagataatttagtggatgtggcactgactataatcagaaatgaaatatcttcagttcctatctttaagtgcatggcagattcatcaggggtgcctttccttaatcttgcaaccttacaggggatcttgaaatttctttgctcgaagctacaagaagaggctgagggctgttcccttctgcacaatcagcttctcagtattcctattggtacatggtctccacatacggggaggtcaagtagcaggcaactcagaactttgctactgagttctcctctaaatacctgcctggatattctgcttcaagatagagtaagctcaattcctatagttgatgacaatggatccctccgtgatgtctactcactcagtgatatcatggctctggcgaagaatgatgtttatgctcgcatcgaacttgaacaagtgaccgtacaaaatgctttggatgtgcaataccaggtgcatggccgaagacagtgtcatacttgtttacagacgagtaccttgctggaagttttggagggattgtccattccaggagtgcgacggcttgttgttattgaacaaagtaccagatttgtggaaggaatcatctcattgagagacgtatttacatttctccttggatagcatgtgtagccattccatacatgaaaaagcttgctgtacttggttcaaacgaaataaaaagcttacaaatgtgat

SEQ ID NO: 2009 - DNA, 703 bp, Zea mays
  Clone ID: 700195731_FLI
ctcctcaattccacgctgccaccaactcgccgtcctccgcgccaagcatcaaagctccgatggcccgcacgaagcagacggctcgcaagtcgacgggcggcaaggcgccccgcaagcagctggcgaccaaggcggcgcgcaagtctgcgccggccaccggcggcgtgaagaagccccaccgcttccgccccggcaccgtcgcgctccgggagatccgcaagtaccagaagagcacggagctgctcatccgcaagttgcccttccagcgcctcgtccgtgagatcgcgcaggacttcaagaccgatctccgcttccagtcctccgccgtcgcggcgctgcaggaggccgccgaggcctaccttgtggggctctttgaggacactaacctctgcgccatccacgccaagcgcgtcaccatcatgcccaaggacatccagctcgcgcgccgcatcaggggcgagagggcctgagcgaggcgagctcctctcaccgcaggcggcgtcgttgttgcttcggacctgcttgtaggacttgtgcttctcttggtttcctttctggtggcagaggcatcttggtaccattgtgcttgttcttagaatcttagggatagagagttttcagttgctgggtaacctgattgtttatcttgcattcctgcctctgtaatggttgtctgctgtcttaatggaaattatatttgctt

SEQ ID NO: 2010 - DNA, 976 bp, Zea mays
  Clone ID: 700195921_FLI
aaagtccgtgtctgggatgtttcggagaggcgagtagttgactgggctgatgcaaaggatatcataactgccgtgggttaccagccagatggacagggtcttattgtcggcatagctgcagggaggtgccggttctataaccatgcaggtgaaaacgtggaactggagaaagtactgaaggtaacgaagaagaaatctgctggtagacagatcaccagcctgcagttttcgtgcggcgatcctgctcggatcctgatcgcatcagcaggttctaagatacgagtatctgatggaggagctaagatcaaccgaaagtttgaaggacgtcgaggctccaaggtcctggtgccgccgtctctgacctccgacgggcagtacctcgtgtccgcaggtgccgactccaacgtctacatctgggacttggacagaccagcaaggggcaaaagccgcaccagaggaccaagaagggtgcgttcctgcgagcacttcttctcggagggcgtcacgtccgtggcgacatggcccggtctggcgcaccaacaagaagacctccagtcgccggagaagggggccgcccccacgctctgccgcgaccgcgagttctgctcgttcgggacgtggttctcggcagacggcgcgaggggcgccgcgacgtggcccgaggaaaagctgctgccgtccctcaggtacgtcaactgcgccgggatggacgactgccgcgccaaggtgtcggccgcctggaacaaggtcgtcgtcaccggcggcagcgacggggtcatccggtgcttccacaactatggactgccagtgaagctataggcttgcgagatcagagctgtattactgttccttactttcttgtactgtacagttcatgaaagttctaggacgaggaggggtgtacattggtttgcttgccgacttgctgtgaacgagccgttaattaacagggatattcttggtacattgagctgat

SEQ ID NO: 2011 - DNA, 893 bp, Zea mays
  Clone ID: 700196141_FLI
ctggcacagaggaaaattggctacggtacaaaacaccgaggcatcgatggactcttccaccagctgacagctatgatttcccctgctcacctcgccttcgccgccgccttcctcctcgtcgtccggtcgtcggcgcctggcgctgctgccgcccgcccgatcttcgatggcaagccatccccctccgaggccaccgccactgcgaggtggctcgccgcccagaacacgtggggtgtcctcagcacaatatcaagtgacttaagtggagctccatttggcaatgtagtttcatatagtgatggagtaccaggcgagggccgtggaataccctacttttatctgacaactctggatcccagtgcaagagatgcactggaagatgaaaggacctcttttacccttagtgagttccctctgggaacttgtggggaaatagatcctgaaaaccccacttgtgcaaaacttactcttaatggaaagttgaagatggttgaccttcagtcatctgaagcagatttggccaagtcagcactttttaccaaacatcctgaaatgaaggattggccaaagaatcatcatttcaaaatcttcaaaatggaaatcgaaaacatattcttgattgattggtttgggggtcctaaacccatatccccctcccagtaccttgaatttggaagaaatcagggctcattgatgtactcataagcgaagaatgcttcatcgatcaatatcccgtctgtgtatgctcttctcaaaaatgaaatccatattgcacatattgtaaagacatctctgtgcacggaataaacctgtagtgttattaaaatgaaatccatatggcacatattgtaaagacatctctttgcatagaataaagttttagtgttattatt

SEQ ID NO: 2012 - DNA, 487 bp, Zea mays
  Clone ID: 700196142_FLI
aacaacttgtgctagcaaaccttgctgcctactctcagcaacagcagtttcttccattcaaccaactagctgcattgaactctgcttcttatttgcaacaacaacaactaccattcagccagctatctgctgcctacccccagcaatttcttccattcaaccaactgacagcattgaactctcctgcttatttacagcagcaacaactactaccattcagccagctagctggtgtgagccctgctaccttcttgacacaaccacagttgttgccgttctaccagcacgctgcgcctaacgctggcaccctcttacaactgcaacaattgctgccattcaaccaacttgctttgacaaacccagcagcattctaccaacaacccatcattggtggtgccctcttttagatttcttatgagttatagttcaataataaagttttttgtctgatgtttgtggcttcccagaaataagaaagtacatttct

SEQ ID NO: 2013 - DNA, 298 bp, Zea mays
  Clone ID: 700196144_FLI
cggcttggtcctccagtccatcctgcagcagcagccgcaaagcggccaggtcgcggggctgttggcggcgcagatagcgcagcaactgacggcgatgtgcggcctgcagcagccgactccatgcccctacgctgctgccggcggtgtcccccactgaagaaactatgtgctgtagtatagccgctggctagctagctagttgagtcatttagcggcgatgattgagtaataatgtgtcacgcatcaccatgggtggcagtgtcagtgtgagcaatgacctgaatgaacaattgaaatg

SEQ ID NO: 2014 - DNA, 729 bp, Zea mays
  Clone ID: 700196226_FLI
gagatactgactatcatagctatgattcaaacagggaatatattctacaggccacgagaaaaacaagctcaagctgatcaaaagagggctaaattttttcagccagagggagaccaccttactctacttgctgtatatgaggcctggaaggctaagaacttttcagggccctggtgttttgagaactttgttcaatcaagatcattgaggagagcccaggatgtgaggaaacaacttctcactatcatggacagatacaaacttgatgttgtctccgctgggaaaaacttcacaaagataaggaaagctatcactgcaggcttctttttccacgccgccaggaaggatccccaggaaggatacaggaccttggtcgaaaaccagccagtgtacatccaccctagcagcgcattgttccagcgccagccagactgggtcatctatcacgagctggtgatgacgacaaaggagtacatgagggaggtgactgtgatcgatccaaaatggcttgttgagctggcgccaaggttttacaagggtgctgaccccaccaagatgagcaaaaggaaaaggcaggagaggatcgagcctctatatgatagataccacgagcccaactcttggcgtcttagcaagcgccgagcttgattgtaactcactgtaactgtgcactgcatgctcttcatggccagttgatactccataatgtaaatgtttgtgagttgtcac

SEQ ID NO: 2015 - DNA, 870 bp, Zea mays
  Clone ID: 700196278_FLI
gcgccgtgttcctccatatcccagacaagcttgtttggactgggcttgagaggcttgcggggaagctgaggccacatagaggccggatttttgtctcacataacattaagttttgctcaagactgggaggcgatgagtgcacacgacggcttgccaaattgggccttgagtatgtggggaagcacactcatgatagcttgttgtttaaccactacgaggtctggtttgaattccgcaggccaaaagtttagatcttgatggtacagaaagagagagtggttggcttctgtgatgcaattttggcagtttcaagcacagattaagccatgccttgtactgtttgaacactactgggacctgacttgagattgagattgatgttcgctcggtgcctaattcaagcatatgcatatacaccaaaagtcatgattgagcaatgctgtggtgcttcagtgtgtcttcccagtttcattcggtgagtggtggatgaaggcttcagtttttattagcaccgattactgtatgttgtataacttcagtaacatttctggtagaaactatgtgggtagctgatgtcaaagtagtaggatacatgcttctattccgaaagctacctctgtgggctgtggccaaaatagactcttatgagcacacatggttttgtaagctgtaacaaggataacttcggttgtcttgtttttgcattttatagaacatgcacatttttatgctgctgtatcctggtgagtatttgcaggcatatgattttgtcaatttacagttacagtgtaaaaaaaaaaaaaaaataaaaatacccctttttcccccttccttctcatttcttcttaatcataaataataaaagggggg

SEQ ID NO: 2016 - DNA, 711 bp, Zea mays
  Clone ID: 700196383_FLI
gccgccgcaccagcaatcacagcagcccggagaacgccctggtccaacaagatgcagatcttcgtgaagacgctgacagggaagaccatcaccctcgaggtcgagagcagcgacaccatcgacaatgtcaaggccaagatccaggacaaggaagggatcccgccggaccagcagcggctgatctttgccgggaagcagctggaggatggccgcacccttgcggactataacatccaaaaggagtctacgctccacctcgtgcttaggctccgcggtggaatcattgagccctctctgcaggcgctcgctcgcaagtacaaccaggacaagatgatctgccgcaaatgctatgcacgactgcaccctagggctgtcaactgccgcaagaagaagtgtggtcacagcaaccagctgagggccaagaagaagatcaagaactgaggtgctgctcctagtcagtttcatggacaatgttgggctgtattgctgtgtggttgttgaacggtgtttgtttacccaacatttgggccttctgttatgttttaccttgttgtcgatgacactactatatgacaatagcaactctgttattgtagttttggtcactgttcacctgatatgtgccatatttcggtaaagtatcgttagtgggcaaccggaactgtgtcctttctacttattccattttaaattattgaacttttatttagc

SEQ ID NO: 2017 - DNA, 418 bp, Zea mays
  Clone ID: 700196414_FLI
gccagcagcagatgaggatgatggacgtgcagtccgtcgcgcagcagctgcagatgatgatgcagcttgagcgtgccgctgccgccagcagcagcctgtacgagccagctctgatgcagcagcagcagcagctgctggcagcccagggtctcaaccccatggccatgatgatggcgcagaacatgccggccatgggtggactctaccagtaccagtaccagctgcccagctaccgcaccaacccctgtggcgtctccgctgccattccgccctactactgattcatgatatttgggaaatctcctctatccatctctctctatctatatatgtaataatgcagtaagacgacacacattatcatgtgtggtatgaccaataatatatgcatggtcataataaagttttggttttaatg

SEQ ID NO: 2018 - DNA, 1617 bp, Zea mays
  Clone ID: 700196436_FLI
cgggaagagtggaatgtctctccccaagacgagagtctgctatccagtgttgtgtttgctggcatgctaatcggagcttgtgcttggggctttatttccgacagatacggaagaaagtaaggatctgctccagcaaactctttatgtttcaatttacaggccttggcttcttaaggcaggcaggaataagataaagtcctttaggattcacaggaaactgatttcatttctcactagtctgaagatattggatctaatcacacctacatccaaataaccaatacagttttgacagtggtcgtggtactggtattagttttactatgtgacctgtggttggaatcagttcactgagtcaataaaccaatgagtcatttcagttagcgacctcatgtagtgaatcagcacggtaaaaggctgtactatcagcattgagttggaggtggttgctggcattgtcttcccttccatgcttcctcttgcttcttttcttcagaatcacacctgagtcaccacgctatctttgcgcacaaaatagaatgactgatgcaaggtttgtcctggagagaatggccattgcaaaccaagcagctcttcctatgggagttctcacataccaccaagaaacaaaaactgaatgcattactcatgtttctgaggatgaacatcttattccagtcagagagaaggaacatacagataggaatgctattagttccaaatctggtgctgttgctgtattgcacaagctattatcacataacttgctcaaatcaactctacttctttggtttgtttactatgccagttccttcgcttattatgggataacattgctgacatcacaactaagtgatgtgaatagaagctgtaaatctgatctggtctttgaagtgcaccaaaataatggcaatctttataaagatacttttatcactagtttagcaggtagactacaagatcccaggcttgattttatccgctttgcttgttgatcggtttggccggaaagctactatgtcgtgcctgatgtttgcatgttgtgctttccttgggccactcgtacttcatcagaatgagttgctgacaactactcttttattcggagctcgtgcttgtggcaccggtgccactacaactttatgtctatatgcccccgaggtgtatccgacatatgttcgctcaacaggggtcgggatcgcaaccgccatcggtaagatcggcggggttatttgccccctcgtcgccgtgggcatgctgcggagctgccatcagatggaagcggtgctggtgtttgagctggtgctgttcctcgctggggtctcctgcatcctcttccctgtggagaccaagggccgagaaatggactgagcacgcacggtggtggtagctcagcacatttgggcatccagatgggcttgtggttcatcttgattctgtataaacacaactctactacatccgcgacaagcttagcggatatgcaaaggggtgtaaacaggagctatagtaattacgagaaagaactggcaatgagcaatatttgtaacaggattattgttatagaacttcctcatcatcagtcaggaggtaaataaatatgtgaagttaaatagt

SEQ ID NO: 2019 - DNA, 552 bp, Zea mays
  Clone ID: 700196479_FLI
gcccgtgccagcagttcggatcctgcggcgtcggcagcgtcggcagcccgttcctgggccagtgcgtcgagttcctgaggcaccagtgcagcccggcggcgacgccctacggctcgccacagtgccaggcgctgcagcagcagtgctgccaccagatcaggcaggtggagccgctgcaccggtaccaggcgacatacggtgtggtcctgcagtccttcctgcagcagcagccgcagggcgagctcgcggcgctgatggcggcccaggtagcgcagcagctgacggcgatgtgcggcctgcagctgcagcagccaggtccctgcccttgcaacgcagctgccggcggtgtctactactgaggaaactatgtactgtagtaataatgtaatggagccgctgactagctacctagctcgctagtttactcatttagcggcgatgagtaacgtagtgtcacccatcaccatgggtggcagtgtgagcaatgacctgaatgaaccattgaaatggaaaggaataatatataaggaaaaaagatgattggaaactgat

SEQ ID NO: 2020 - DNA, 720 bp, Zea mays
  Clone ID: 700196505_FLI
ggcggaaaggtcccggtctcaggccgcggccagtcccctggagatcgagaaccttgctgagataatagaagatttcaaaatggtgttggttgtgaggaatgatctgaagatggggaaggggaagattgccgcacagtgcagtcatgcaactcttgggctattcaaaaaactccaacagagagctccaaaatcactaagaaggtgggagcggtgtgggcaagttaaagtggttgtgaaaatagaaagcgaggaagacatgctagttttacaagggagagcaaagtctttaaatctgccaactcacataaccatagacgctggaagaacacagattgctccaaattcaaggacagtcatggctattctggggccagctgatatggttgatgatgttactggcggtctgaagcttttgtagaaaaccaccttgtcagcattttcaacttgggtcttcatagagcagtgctgggactttgcaggccacagtggtctctgcacttgtactgatgtgcggcagaagaatgaaccttggccccgttggttgacctgagtttcttgtccatgaatttatttggaaggagagcttgcattcttttttcacttgtaccgaccgttatctttggagttgtgatgttagcagttcgaattctggtgttgacaacttatagaccatcatttcttctgtaacatagataagaaaatactatttgactattgtcc

SEQ ID NO: 2021 - DNA, 566 bp, Zea mays
  Clone ID: 700196512_FLI
tgctactggcaaaggaaacatagcgcgcctgattaatcactcgtgtatgccaagctgctatgctaggatcgtgaccgtcagtggtgacaggagccagatcattcttattgcgaagagagacgtctctgccggagaagagctgacgtagttcctcagccctgccagtataactacctgtttgaccctgacgagtccgaagactgcaaggttccatgcctgtgcaaagctcctaactgccgtggatacatgaactagggtgctgctagaagagtaaaaaccaatctaacaaacaaggactgaggctaactccttacagaagccaaaagccggccattttttttcctggaattctttcggtagtttctcgttttcttatattactcaccagaagcttacaattcgtgggctgcacaaggtttggaccattttgttcagaaattgcgatttagggcagccgtaggcagtcatccatttgtatattcttccattgctgtgataagatggtaagaatgctcaaatttttttttttttggttaaatgaaaataagaaaaactcagtttgattc

SEQ ID NO: 2022 - DNA, 767 bp, Zea mays
  Clone ID: 700196549_FLI
ctattgggtacaagatcggaacgatgattgagattcccagggcagctctagtggctgacgagatcgcggagcaggctgaattcttctcctttggaacgaacgacctcacgcagatgacctttggctacagcagggatgatgtggggaagttcatccccatttatctggctcagggcatcctccagcatgaccccttcgaggtaactgctgcagctcctctgtcaccctctctcatctgaggccatactcgcatctccatcatttacagatgttctcgaccagagaggagtgggcgagctggttaagcttgctacagagaggggccgcaaagctaggcctaacttgaaggtgggcatttgtggagaacatggtggagagccttcatcggttgctttcttcgccaagactgggctggattacgtttcttgctcccctttcagggtcccgatcgctaggctagctgcagctcaggtgcttgtctgaggggctgcctcctcgttggcagcctgctgttggtgcatctggtgattaataatactactatgacagagccatatgctctgtgaagagtattagtagcagcgctcataaaagctacagttccatctattttctcagctatgtaaaacttccaaactgttcatgcttaaaactgagggttttcgtggtgtgagatgtgcatgtcgttgttgaggccattgctgcacattccacctattgaggccctcctcaaattaagcctcgaaaaagctgatatcttttcgtag

SEQ ID NO: 2023 - DNA, 626 bp, Zea mays
  Clone ID: 700196809_FLI
tcacttaccacttcttccattggaagaaaggaaccccttttgctgctgatgaccaaggcatctacagcagattgacatggtgggagcaaattgacaatggtcagcagcttactcggaacagaaagtttttgactgtggtacctgtggtgctgtatctgatcgcatcgcacttgactgactacaagcagccgatgtttttcctcaatacaatggcagtttttgtgctagttgtggcaaaattgccaaacatgcacaaggtccgcatatttggaatcaatggagacatctgaggaccactgcaggaagtacatggatgcaatgccatgatgtgatgaagagctaaacagaacaagcagtgtgtttctcaaacttgacacaactgtctgtaatatatgtacaggtttaggaagaactgtaaatgttactctaccatagaagctttgccagcggactggcctgtgttgttgccgttgctgctttcttttgagtttcactggaaggggaaacggtaactccggtaaacaaccaccagcatgtggataagaaaaaaggaagtgtgtagcagatgctatttggtatctggttcgattgaaccaagaaatcagttaagttcatatttttgtctt

SEQ ID NO: 2024 - DNA, 479 bp, Zea mays
  Clone ID: 700196812_FLI
tgggcccagaggatgtgagtacagttcactgattctaacaggacccatcttgttggtgccctggtgggggaatggggtttcgactgatttttctgtcttctgttggcacgtagctcaatcggtctaccaccggcacctacacgttcatcttctcgggggacggcagatgaattggccaccggggtgagttggtgttgtaaaggtctgtttggttcactgcctaacttgccacactttacctaacttttctgcctaaggttagttcttcaattcgaacgcctaaccttagacaaagtgtggcgcagttagccacgaaccaaacagaccctaagactcaagcaatgacttcgtaaggcatgtgttgttcactcgttagaatttcataatatgctgtcatttgcagtttgctattagggttgcacaaatagtcatcggtagacgctgtcccaatgattttgtgtacggagctcaaatagtat

SEQ ID NO: 2025 - DNA, 460 bp, Zea mays
  Clone ID: 700196910_FLI
agtgcgtcgagtttctgaggcatcagtgcagcccgacggcgacgccctactgctcgcctcagtgccagtcgttgcggcagcagtgttgccagcagctcaggcaggtggagccgcagcaccggtaccaggcgatcttcggcttggtcctccagtccatcctgcagcagcagccgcaaagcggccaggtcgcggggctgttggcggcgcagatagcgcagcaactgacggcgatgtgcggcctgcagcagccgactccatgcccctacgctgctgccggcggtgtcccccactgaagaaactatgtgctgtagtatagccgctggctagctagctagttgagtcatttagcggcgatgattgagtaataatgtgtcacgcatcaccatgggtggcagtgtcagtgtgagcaatgacctgaatgaacaattgaaatgaaaagaaaaaagtattgttccaaatt

SEQ ID NO: 2026 - DNA, 631 bp, Zea mays
  Clone ID: 700196943_FLI
atgaagttaatcttcaatcagccaagaggaaaatggccagatgaattgatcaaagtggtgtggagccacaacacaacaatatcaaggtcaacaggctttacaccattcaaattactgtttggtgacgaagcaataaccccagaaaaagctaaagcaggatcaataagaacaatggcttcggcagaggacgaagctgattgttcggtggcaaaagatgctatagaagggattaggcttcagggagtggagaacatcaacaaatatcaagccaaaacaataaagtggcgtgacagaaaagttcggctaaagaacattaagccagggcacttggtacttcggagagtggccaacccagatacagtaggcaagctacagctgaagtgggaaggaccttttttggtagtatcttcgtcaagacccggctcttacagattgaaggatatgaacggcaacgacattcctagatcttggaatgcggatgagcttcggcgatattatgtttagctgatgtaatatttttatttttcttatggcactcttttcctttctgaagggggagaaaggtttttaatggggccatagcatgtaatttccctttttcttattcagctctacgagagcaaaatccccc

SEQ ID NO: 2027 - DNA, 773 bp, Zea mays
  Clone ID: 700197008_FLI
tgatgttaccaattttgaattggaggactactatgtacttggcagaatgatttattattagttgaccttttgccaagcacaatggattaatttccatgttcccaaacagggtatatgcgaggataggactctggaattttaccttgtcacctatgatgacattggtggagtaacttgtcgacgatttagggatacacagagccaaaactctggctactctcctgtcttttggacaacagatactacatttcttgaaccaccattctctgagcaagagctggtcaattatgccagccgcgatcatatccaaggtgttacttccaatcatgcaggcgctgagaacagggttgtctcaaggatattacgcatcaattccagttatgatgtggttgatactcatctctcgactcccttggatgatgggaggagcgtggagggaaggatttggctatatgaggatggaaccttcggttttggatttgttggcagtaattcaattatagatctgaggcatgtctcctcggctggctgtattcttgatacttaacattagatgatctggatcttgctggcacataatttttgccagcgagacccttgtacagtacttggcgtgaggcatgttgcctccgatttgttgtactctcgatgataaggtcactgaatactggtcccttctggcacttagctgttgctagaatgcccttgtaaaccgaaccttggttcctttgggcatgtacttgttgacataataccgatgtatattacagtac

SEQ ID NO: 2028 - DNA, 632 bp, Zea mays
  Clone ID: 700197014_FLI
tgaagtccacaaacttagagatttggtgagatcactgcaagaaagggagaagactctggagctacagcttctggagtgttacggtttgcaggagcaagatgctgcggtgagggagcttgagaatcagctgaagattaacaacgttgaatcaaagttgtacttgctgaagattgaatctttacagactgaaaaccagaggctgcaaacacagctctcagagaactcaaaaatattctctgagcttgaggcgacaagaacaaaatgcaagtttctgaagaagaagtttatatcggatgcagaacaggcaaaggagcaaatcatttctcttcagaaaatggtcgactcattgcagaacaaacagactgatgaggagaaaaaatttattgagtttgaaaataaactgaagagactagaggagctggaaaaagaggcaacagagctaagagcggcaaattcaaggctgcagcaggagaatgcacatcttattaggcgactggaggttacacgcctaccccctgtacccaagcccaaaactagtatggaggtgattctttaccgttcttggattgtattgtagctggcacttactaaatcaattttaatcatctcttggagtgatcatttctaaaatg

SEQ ID NO: 2029 - DNA, 399 bp, Zea mays
  Clone ID: 700197123_FLI
gccgctagtatccagcagcagccagaattcaggccaccaatgtctgaaattgtacaagacctagctagacttgtaaatgccaccggtgaggaatcagagtaacccccaaaaaaagcatggagccatggaaggcatacaatacaaacgtcgcgaccaagttacgtgctgtacaatttttttgggaagataattgtcttgcttggtctggggagaatactgtgaagatgtattttcctcagagagcattgcacactaatgtcagattggaatttcatttagacctggctggggagtggaggtgcagccatctgtgcacctgattgttgatcaaatccatgtaatatttttgcagacatgatattatatatagcgacagtggcggagcctccgccaagcgcc

SEQ ID NO: 2030 - DNA, 683 bp, Zea mays
  Clone ID: 700197143_FLI
gtgaggataaaaatttctgatgtttgtcaaaaacaagacatataccgtctcgtaaaagttattggaacacataaggttccagaaaagtatagtattggaaagaagatgacaaatgttgcacttgagatattgaatttaaacaaaaaggagattattacaatggatacaatatctaatcatgattttacagaggaggagtgcaaacgtttaaggcagagcatgaagtgtgatttaattagcagactaaaagtgggtgatatcctagagaaagccaagatattgcaatatgtaagagtgaatgattggtttgaaaatgaaaagcagaggcttgggcatcttcgtgaccgtgcaagtgaaactgggcgcagaaaggaacttagagaatatgtagaaaagctgcagcttctcaacgattctgaggaaagaactcgcaggattattgaaattctggaattgcatgttgactcacatatggatcctaattatgagtctgctgaagaaacagatgagaaaggaactggtatatatcttcctgtaatgttaatgcttcatgttgcatgttgattagtaaatatcggaatgtaactgtttctcttgcattgaataaatcttaagctgtagcataatttcatgtggtttgttgcaatatattctaaatatacatctactagaagtttctgcac

SEQ ID NO: 2031 - DNA, 374 bp, Zea mays
  Clone ID: 700197286_FLI
gaagcctcaaactaaggagaagaaaccgtacacaccctttccaccgcctcaacagcctagcaagattgatcttgaacttgagaacggtgagtatttcatgagtgacaaaaagaaatcagcaaagaaatggcaagagaagctggacaagcaatctgggagagctgaagaaaataaaagaaaaagagaggctgcatttgttcctccaaaggagaacactgcaggtccatccaaatctgacaagaatgccagtgacaacagtgagatagccgatatagcgaagtcattaaagagaaaggcgaaggaatttagaaagaacgaggcccaggagagtgtcatagctgaatcatatatcgcaagtaatgatgaattgcggc

SEQ ID NO: 2032 - DNA, 1048 bp, Zea mays
  Clone ID: 700197413_FLI
gcaggatgatgacggacaagttatcgaaccccactccatcagtgctgggctggattaccctggcgttggacccgagcacagtttcttgaaggacattggacgtgccgaatacgatagtgtgactgaccaggaggcactggatggtatgtctcgctctctttccattgtctgttattggttgaactatttttctttttgacgaagttgatttccaatgaacctacaaaatgctgttagtgttggtatcagctttcaacatcttgacttatctttaaatgactgggtgttatatatattcagttgatgtagctgttcaggatattgtgatgccaataatgtagtcctagcctcctagattttcctcggtagataagccaaatgtttaagatatgccttattcctgagctaatgctggcatgcgaatttttttttaataaccaaacacaatgttgaagtcttgaaacagtattatgcttagatgtgacagtagatacattgttgactgttcagcatccataaggcccatatgattttttttgtttctgaacatttgagaaactgtctcaacagctgctgatccagtagttttattcactctgtttatgtcctgaatgctactatgttgaacatgtatatcatgacatgcagctttcaagcgcgtgtctcggttggagggcatcatccctgccctggagacctcccacgcgctggcctaccttgagaagctctgcccgacactggcggacggcgtgagggtggtggtgaactgcagcgggcgaggagacaaggacgtgcacaccgccagcaagtacctggacgtctaaaacaccagcgaggaggctggtttccatgtcaagttttggagggttcagcagtaattaatttagcgctgttctttttggataaaagcacaaataacctggaagctggtattgttgttgtagccggtagtgcccccctgtttttttattttacaagtaatctgaatagctttggagtgcataatcaataatcaaataaatacaaagcttttggccttattaaaccc

SEQ ID NO: 2033 - DNA, 1611 bp, Zea mays
  Clone ID: 700197473_FLI
ggacggcggcgatggcgaagaggctgctcccgtctctgaaccgggtgctggtcgagaagctggtgcagcccaagaagaccgccggcggcatcctccttccggaaacatccaagcaggtagcaccatcgtccgctaccgttgttttttagtagtttaggggattcagtttccggcgagggacgtttggatcatggtgtcgggcaaggtgttccgcgccgtcgcttgccgaactgaaaacggctgcagcagttgggcgatttggatcgcttttgtaggttaccaatagttgtaagcagctaaaaatttctcaccatgcttcctccctctggtgaagttatgtctgattgggttgtgattagctctatgttattcagattgcttggtttaggctgccattcttaacttagctataacaattttatcgttcaagcagtcatgttatgcttttttttttattaagggtagatttatatactagagtacttgtgaaatactagcatgtttatggctacctgcagttccaaactgttctgtcccattgttttgtgggatctcagtaagatacattacttgctattttcaagtttttacctgaaaatgtacctcagtaagatacatgacttgctattgtctgtgggatcccattgatttcctgtttgacggtatttcttgtctttcagaatttaaataaagattttacttatcgattagcattcaattcagcactgtattttggtgtgttcgactggagaaacggattattgtgggtgtagaatcaattctctgcttgacaatgttgctcttgttgcagctgaatgctgctaaagtggtggctgttggccctggtgagcgcgacaaggcaggcaatctgatcccagttgctctgaaggaaggtgacactgttctcctgccagagtatggtggaactgaagttaagcttgcagctgataaagagtaagcaaaccattcatctgtcatactgctagtgcatgattaatatctcaattaggcacacaatagaactgttgcaattataaaaattgtcttgcagctgtattatttgctgtcctatgaaatcatcaagatatatgctgaacaggcaaacccatgatatgatgtggaatcatgatagtgactgttttaattgtgtcaaatgttgtgttggtgataggctgtttgatactgcatgtcaactatgccttttgcgacttagaaaaaaaatgatgcatcttaacctttgttcgctaactggcaacacaatcagttgtggtcgcaaataccaagtcaactgtttgttggattcttatcattgaagattgtttttttccttctgtttaatgccatttaacctcttctgaaaaatcttcaggtacctcctcttcagagagcacgacattttgggcacacttgtggactgattcagagcatcagcaagcctgtcactagtcgttggttctagacttctagtgtgagatgcgtagtatcagatcctgggatcaaaatccctgagaaagaactctgaactgtcgtgatgtcatagattttgtgatgaaacatcataattgcctgcttcttgttgcaagcgaacttttgcgtttaaaatggttccct

SEQ ID NO: 2034 - DNA, 1304 bp, Zea mays
  Clone ID: 700197580_FLI
agccggagagtgcatgcaggagcttctgaaatcatggaaagattttgaagcaactcaggaggctacaaatgttgaaagtttacaaaacggtcctactcttgaaattcggatacctgccgaatttgttacttccactaatcgtcaagtaaagggtgctcaactttggggaacagatatatatacaaatgattcagatcttgtggctgtgctaatgcatactggctattgctcgcctacgtcctcccctcccccatctgccatccaagagcttcatgcaactgttcaagttctaccaccacaagagagttatacttcaacattgaggaacaacgtacgctcacgtgcttggggtgctgggattggttgtagcttccgcatagaacgctgctgcatagttaagaaaggtggtggcaccattgatcttgaaccacgccttagtcacacatcagctgtggagcctacacttgctccagttgcggttgagcgcacaatgacgacaagagctgcagcttccaatgcattgcgacaacaaagatttgtccgtgaagtgacaatacagtacaatctctgcaacgagccatggttaaaatatagtataagcattgtggcagacaagggattgaaaaagtcactttatacttctgctagactgaagaaaggagaagtaatatatttggagacacattttaataggtacgagctgtgcttcagtggagagaagcctcggggtattggatcgagctctaatgcatctgatgcagaacctgagaaacaccagagcagtagtcaccattcgcaaaacggctctgtggagcatgaactccgggatgtgttccgatggtcccggtgtaagaaggccatgcctgaaagtgccatgcgctccactggtatcccactaccagcagatcagctcgaggtgttgcaggataacctagaatgggagtatcccctcgcccgagttcacttcctctcggcgaactagcagcagctgatgttgcagccaacgaaggagctatcgtttcttgtggacagaagaggagcttgccaacactgtaggtttttttttgctactgtataatgtatgatgcaccctgtcatgtgtacaaagaaagctcaactgttgtaggctgtttgtgttgtgtggcattctactagtcttcacattaaccatatttgttagggttgcttgctcctgcccatgcctgaaagatatattgttggttttaggtcctgataaaataattggcgatttgtaacttaagattattcaaggtagtaaagaaaccataactctaaaaaaaaat

SEQ ID NO: 2035 - DNA, 688 bp, Zea mays
  Clone ID: 700197637_FLI
agcagccgcatccacaacctgcctctctcgtcccctggcggcgtccgcggcaggatggcggaatctacggcgaggacggtgaaggatgtcaacccgcacgagttcgtcaaggcctactccgcccacctcaagcgctccggcaagatggagctccctgagtgggttgacattgtgaagactgcgaggttcaaggagcttcctccttatgatcctgactggtactacatcagggctgcatccattgcaaggaagatctacctaaggcaaggcatcggtgtgggtggctttcagaagatctacggtggccgccagaggaatggctcccgcccaccacacttctgcaagagcagtggtgctgttgcacgcaacatcctgcagcagctgcagattatgggcatcatcgatgtcgatcccaagggtggacgcctcatcaccaaccagggaaggcgtgatctggaccaagtggctggaagggtcgctgttgaagcgtgagcagtgtcatctttggtttcaatggtgtcatgtttgatggttgagaaggctgcgctctatttgctcttttgggttaggattttcgagttcagaggactttaaggtttattgcatctagctatggcgccacactatgttccccgagtacctaatgtgatatcaagactcaattctcgaatctaagatatatgtttgc

SEQ ID NO: 2036 - DNA, 2123 bp, Zea mays
  Clone ID: 700201122_FLI
gtccacagcacccctcccctccggcctcccttcccgcaccgcggacgacaagtcaaataccgcgcgtgcgtaccacttggagccatccggcaccacgccacgagtccacagtccgcgcgccccccacgggccgtcgtcgccccggcttctcctctccttcccggcttcccccaacccctcgcgaaagctcgccgctgctgcgtccgcgccccgtggcggcacggcgcggcacctcgtggggaaaccgacggaggccttcgccgagcctttgggggccggcgctttttcctggtgccgtccttctgtactgcctgcgggtgggttgttccgatcataaccgacaaggcgcggcgtgctctcttccctcgcgttgtagactctcgcgggatctgtctcggcggcggcggcgggggtgggggtgggttactgggctcgcttcatcctcccggatcacggcggcggtttgttcagaacatgttagaagccagggaagatcggtgaaatgcttgcattgatataataagtccaggctgaagttattgagctgacagcactaagatataatagtttgagaatctcaatgggttgcttttctacattttgcaagaaaagaagggcaacgcggcaaccaagttcccaccataatgaagacgtacctggctgttcaaatataacaaaatacacttacaaggagctagtaagggcgacaaataactttaacccattgaacaaaattggtgagggtggttttggttccgtttacaagggacagctcaggaatggtacagttattgctgtcaaggtcctttcgtcggagtcaagacaaggagtaagggagtttctgaatgaactcgtggcaatttccgacatctcacatgataatcttgtgaaactttatgggtattgtgcggaaggagaccaaagaatccttgtttacaatcatcttgaaaataatagccttgcacaaacacttctaggctccagccacagcaatatccagtttgattggaaaacacgagtaaatatttgccttggcattgcacggggattagcatacctccatcatggtgtcagtccccacattgttcatcgagacattaaagcaagcaatatacttcttgatagggaccttaccccaaaaatctctgattttggtctagcaaagcttcttccaccaaacgcaacacatgttagcacaagagttgcaggaacactgggttatttggctcctgagtatgctattcgaggacaggtgacacgcaaatcagatgtgtacagctttggcgtgctgcttctggaaattgtttgcgggagatcaaacagcgatacaagattagcatacggagatcagatactcctcgaaaagttcccagagatcaccaacggggctctcctcttgcagacatggatgcactacgagcaggggagtctggagaggatcatagacaggtccttgggcggcggcgacctggacgtggcgcaggcctgcaggttcctgaaggtcgggctgctgtgcacgcaggacgtgacgaggcaccggcccgacatgccgagggtcgtcgccatgctgacgggcgagtgggacgtcgagccggagacggtcagcaagcccgccataatcagcgacttcatggacctcaaggtcaggagcacgaggaaagcgagcgacaacgtggccacgccgcctacgtcctcctcgacgttcctgtcctccctcatggcgcactcctcgcccttgctgtcgaacgagtccacgcaggcctccatggcgttcaccggggtgtcggatcgcgagtgatccttgatcccttcgtcaaagactggtcaggctggctggtagtgacctgagttggttggaggtgtggaagacatgtgtagtgtaggcaggcaggcacagatggatttaattgcttcgtttgtaggcgcaacatcattgttgagtcaaaaggttcaagtacatgtgaggaaactgctttgtgtgcaattttggattgaagacgcgattcttttttccacggtgtaagtacaagcaagcccaaaagaagaggttaccgcgtccggcccaagaacaagaatgtatctggcccagattgggtttctaatacaatttcccttctctactg

SEQ ID NO: 2037 - DNA, 1636 bp, Zea mays
  Clone ID: 700201128_FLI
gctcagctgattgagcagtccaagaaccaaaggataaggtgggtgggcgcctgggcggggaccgccggagcccggagggaggagaagcgagcgaggtgccgtcgtcagctagcactagcagccatggaaggcggcgcgcacgagttcgacggctccaccttcaaggagtgcttctccctctcgtggaggaacccctacgtcctccgcctcgccttctccgccggcatcggcggcctgctcttcggctacgacaccggtgcgttgcgactgcgtgcgcgtccttcttcctgcctgtgctgtgtgtcactgtagtgtagttccatttcttcacccgccatatccagctcaaagaaagatgggccctataggagttcggatgatgatcgtgtccagctagatgatatggctagctagctattggtgaccgaactgtgtttaatttcctgttagcgtctgctagctggaaaagtgttcgacgatatcgtacgtgttattagtgagcaagtgaccagtgacgtgagctccgcttccgtgtctgtgcgtgcgtgtgatgagtgctgcaggtgtcatttcgggagctctgctctacatccgcgacgacttcgtttcagtggacaggaacacatggcttcaggaaatgatcgtgagcatggcggtggccggcgcgatcatcggcgcggccatcggcgggtggaccacggaccggttcgggcggcgggcgtcgatcctggtggccgactccctcttcttcgcgggcgcggcggtgatggcgtcggccacgcgccccgcgcagctcgtggtgggccgcgtcttcgtcggcctcggcgtcggcatggcctccatgacctccccgctctacatctccgaggcgtcgcccgccaggatccgcggcgcgctcgtcagcaccaacggcttcctcatcaccggcggccagttcctggcctacctcatcaacctcgccttcaccaaggcgccggggacgtggaggtggatgctcggcgtcgccgcgctccccgccgtcgtccagttcggcctcatgctcgcactgcctgaatccccgcgctggctctacagacaggggagggcggaagaagcagaggcgatcctgcggcggatctactcggcggaggaggtggagcgggagatcgaggagctgaaggagtcggtggcggcggagcgtgggtcgtcggagaagctgagcctggtggcgctggtgcggacggcgacggtgcgccgggggctggtggccggcgtggggctgcaggtgttccagcagctggtgggcatcaacacggtgatgtactacagcccgacgatcgtgcagctggctgggttcgcgtccaaccagacggcgctggcgctgtcgctcgtcacctcgggcctcaacgcgctcggctccgtcgtcagcatctacttcatcgaccgcacggggcggaggaagctgctggtcatcagcctcgtgggcgtcatcctctcgctcggcgtgctcacggccgtgttccacgagaccgcgtcccactccccggccgtgagcgccaccgagaccgctcgcttcgacgcctcgctgacgtgtccgtcctaccgcccgtcgtcgccggccagcggcggggcgtcctgggactgcacccggtgcctc

SEQ ID NO: 2038 - DNA, 238 bp, Zea mays
  Clone ID: 700201132_FLI
gacttatatagagttacatggatcaagccctgggccacagatcgggtggcctgtggtgtagatctgccactgattatgactatggatgagacttttgtgatgtaattgatgagactatggatttaaatattgttatgtgattgtgtgtgagatattttatgtgaaaatatgttgtgctatatagttgttgatatatttgttatgttgtggaatgtggaataaaataaaaataaacaac

SEQ ID NO: 2039 - DNA, 1293 bp, Zea mays
  Clone ID: 700201134_FLI
ggatgtcagagattcataatgttgctatagcagacaatcatggtcgggtccataatttatctcggtatcaggccaggtggaacaaacctaggcctgaaagtgcgacaattgatgaggaactggcttcgaagttgaattctatggcagctaaggaaaaactgtactgcgaaattgcttcaacggcagaatcgggatgggatttcagctctcgatggatgaggaattctactgacatgacaacattggcaaccacttacataatacctgtggacttgaacacatttctttttaagatggagctggatattggtgccttggctaaagtcgtaggagataatgcgacttcagaattttttttaaatgcttcgaaagcacgtcatattgcaattgactctattttgtggaactctgagatggaacagtggcttgactattggcttcctggtgatgcagactgtcaggaagtacacgaatggaagcctaactcacagaaccgcaacatatttgcttccaacttcgttccgctgtggctaaatgcataccattccgaattcgtacgctttgctgatgaggcaaaatcaaacagagtcatggcgagcctcaaggcatctggattacttcatgccgcagggatagcaacttccctgacaaacacgagccaacaatgggatttcccgaatggatgggccccactgcagcatcttatagctgaggggctgctgcattctggatcagaggccaaaaaactagctgaggacattgctacgaggtgggtgagaacgaactacgccgcttacaaagcaacgggtgcgatgcatgagaagtacgatgttgaggcttgtggagaatctggaggcggtggagaatacaagccccagactggttttggctggtccaatggcgtggtgttgtcattcttggaagaattcgggtggccagagggcaaggaaatagcttgttgagcggcgaagcgctcacgacagggtggatctggtcttgccggagagcaatctggttaggcatcgttcatgtcacacatgtctagctacgagagtggcgcattgccttctgcagttcgtcaagtgcgtttgtgtgttcttgtttgcttttagttgcgactaggctgtagatccttcttgtatcacaacaatatatgtactgctactgtaccggccccggcctcttgtttaatctgaaatgctcattgtatatcctcttacgaaacgcaaacacgtgctttggcacgttcgtcgtcgaaaagagaagagaatataccattttgctctcttgaat

SEQ ID NO: 2040 - DNA, 834 bp, Zea mays
  Clone ID: 700201151_FLI
tttctatgttaggagtggagttatctgcgtggaggactgacgacgctcgaccgggactacggatggatcaacaacatccatcacgacatcggaactcatgtcatccatcacctcttccctcagatcccgcattaccatctcatcgaggcggtaagggtttcccctactcttgcctttttcttttcttttcagtgagtttcttcgcctagatcataagacctgcttttttttggatgtggcctgcagaccgaggcagcaaagccggttcttggcaagtactacaaagagccgaagaagtcgggtgctctgccgtggcacctattccgggtgctggcacagagcttgaagcaagaccactatgtcagtgataccggagatgtggtctactaccaagctgagtcgaaaacgagcacctctgcacaaaaatccgattgacagggagtatagagcgtagcgtgttcttcatttttctcggggaggggctgtgcctgaagacctgaccagcctccacctctgattagcgtgagtgggtacgtcgactgaagaacgtaagctggcgaagtagtaccatgtatgtatggagagggttaaatgtaattctttccaatggtccaaggcggatgctgcttccaatgtagcagcatgcgattctttggacaagatgtatactattacagtgaagagtgaaaaaaagagagagttagctacatagaaagttttctgagctctatacgcgttacctccgttttcggatatttttgtcgtcagctcgatcatttttgaactaaacggcgataaataaaaaaaagaaaggaaggagtatatcttatttat

SEQ ID NO: 2041 - DNA, 431 bp, Zea mays
  Clone ID: 700201160_FLI
gcaggatccaagcaacgcggaaggagggaggtgagcaccatgtcggcgctgttcaacttcaactccttcctgaccgtggtgttgctggtgatctgcacctgctcctacatcaagatgcagttcccggcaatcctcaacgaccgcaccggattccgtggtttcttttggaaagctgccaggataggtgagcgattgagcccttgggtatcagtcgggtgcttggctatgggaatatccactattttcttctaaggccgaagttttaatctccacaaatttagtctaggacgcagcaccttgtttcacttgtagagaaaaaaaaaactattgtaagcattttgcttcagtttttaatggtgggcactgtaagatctgtatctgcactgagatttctgatattaacaaaaatgttttctcataagatttctgag

SEQ ID NO: 2042 - DNA, 643 bp, Zea mays
  Clone ID: 700201269_FLI
cgacgaccatgtcgttgctggaggcgcacatgcggggcgcgccggacggcgtgtacacgcgcgacttccccgaccggccgccggtgatgttcgacttcacgggcgacgccacggcggccaaccggtcgttcatgctcacgtccaagggcaccaaggtgaagacgctgcggtacaacgagacggtggaggtggtgctgcagaacacagccgtccttggcgccgagaaccacccgctgcacctccacggcttcaacttcttcgtgctggcgcagggcccgggcaacttcaacgcgcacaggcacgtccgcaagtacaatctcgtcaacccgcagcagcgcaacaccgtcgccgtccctggcggtggctgggccgtcatccgcttcacagcggacaacccgggcgtctggatcatgcactgccacctggacgcgcatctgcccttcggcttggccatggccttcgaggttgaagacgggcccacgcccgacgccgtgctcccgccgcccccgccagactacccgcgctgctagtagcgttcagaaaagagaaagaacagactgccggagatgaagggacaaactctgtttcagtgtccatctatggttttaaattatagccccccccccctccccctgatggtatc

SEQ ID NO: 2043 - DNA, 754 bp, Zea mays
  Clone ID: 700201283_FLI
ctccgatccatctcttcggctgcctgtgctacccttcccttcacctcacacaggaatatactacacattcctgccttagatacatatatacttttttactgaaaaaaaaggctgagccggtgcgagcgaggcttgagcaatggcgagcgcgtttagctcgagggcatgcgcgctgctggcgctgctcctggggctctgcaccgccggcgcggcggcgggcagggtggacgacgggctggaggtgacgtggggcgacggccgcgggagcgtctcgcccgatggccaggtgctgacgctgtcgctcgaccgcacctccggctccgggttccgctccaaggacacgtacctcttcgcgcgcgccgacgtgcagatcaagctcgtccccgacaactccgccggcacggtcaccaccttctacttcatctcggaggggccgtgggatgtccacgacgaggtcgacctcgagttcctgggcaacgccagcgggcagccgtacacgctgcacaccaacgtgtacgccagcggcaacggcagcagggagcaacagttccacctctggttcgaccccaccgccgacttccacacctactccatccagtggacgcagcagcacatcctcgtgctggtggacgggacgccgatccgggagttcaagaaccacgcggaccggggcgtgccgtacccgtcgtcgcagcggatgcgcctctacggctcgctgtgggacgccgaggactgggccacgcagggcggccgc

SEQ ID NO: 2044 - DNA, 1225 bp, Zea mays
  Clone ID: 700201295_FLI
ggctgccatccgaatcccatgtcgtcgctgctcctcctccaggccctggctccagccatgaccgtcccccgccaccatttcctcatctcccctctccgcctcgcctctgcagccacagttccgttcgctcgacgcttctccaacgccgcttccagcaacaagccggagccactcctctcggaaccggatctggagtcaggtctgtatcttgtgtcaacgccaattgggaaccttgaagatatcaccttaagggcactgcgtgtcctaaaatgtgctaatgtgatactatctgaagacacaaggcattcaggaaagctacttcagcattacaacatcaagacacctcttcttagcttccataagttcaacgaacgggagagagagcccactatcttaaggaggcttcatgaaggtgaagcagttgcactgataagtgatgctgggacgccaggtattagtgaccctggcatggaactggctagactatgtgcaactgagaaaatccctgtcattcccattcctgggccatctgctgcaattgctgctctttctgcatcgggtttgccatcaaatgaattcacatttggtaaataatgctgatactgtactcattttatttttcagttgtaaggaactattggggtcagttcatattttcaattttagttgggtttttaccaaagcatgctcggtcaagaagagataggcttgagatatctgctcgtgaagctgctacacaaatattctatgttcctccccatggcattcagcagtttcttgttgatgctgcttcatcttttggcgattccaggcattgtgtggtcgcaagggagataacaaaaatacatgaagagttttggcgtggaactttaggtgaagcaaatgaagcttttgcaactcgacaaccaaagggagaaataacagtgctcatagaggggaagttaatttcagatgacgaaattccatcagaggatttccttgagcatgaactaagagaattgacggcaaagggatatactctttctgcggcggtgaaattggtcactgaagccacatcagcaaagaagaaagatgtttatgcactcgcattgaggttgtttggaaaataagtaaaatggaatttttggtcgcatctggtaattaaacttatttctatgtactggcatattttccatttgactctgtagataccatgaatcacattgggaaggtgttatttctctgt

SEQ ID NO: 2045 - DNA, 1658 bp, Zea mays
  Clone ID: 700201316_FLI
acggcgtcggcgcgtacgtggacctgatgcagggcctggtcccgggcatgcgcgacggcaccgtccgcaccgcgctcgacaccggctgcggcgtcgccagctggggcggcgacctgctggggcggggcatcctcaccgtgtcgctggcgcccagggacaaccacgaggcccaggtgcagttcgcgctggagcgcggcatcccggccatcctcggcatcatctccacgcagcgcctgccgttcccgtccgccgccttcgacatggcgcactgctcgcgctgcctcatcccctggaccgagttcggcggcctctacctcctggagatccaccgcgtcctccgcccgggcggcttctgggtgctctccggccctcccgtcaactacgagaaccgctggcacggctggaacaccaccgcgcaggcgcagaaggccgacctggacaggctcaagaagatgctggccagcatgtgcttcaagctctacagcatgaagggggacatcgccgtgtggcagaagtccgccgacgcctgctacgacaagctcaccccggtcaccacgcccgccaagtgcgacgacagcgtcgaccccgacgccgcctggtacgtgcccatgcgctcctgcgtcacggctcccagccccaagtacaggaagctggggctcaacgccacgcccaagtggccccagaggctcagcgtcgccccggagcgcatcagcgtcgtcccgggcagcagcgccgccgccttcaagcaggacgacgcccggtggaagctcagggtcaagcactacaagacgctgctgccggcgctggggagcgacaagatcaggaacgtcatggacatgaacaccgtgtacggaggattcgcaggcagcctcatcaaggaccccgtctgggtcatgaacgtcgtctcctcctacggcccaaactccctcggcgtcgtctacgacagagggctcatcggcgtcaaccacgactggtgtgaggcgttctcgacatatccacgcacctatgacctgttgcatcttgatggcctgttcacagcagagtctcacaggtgcgagatgaagtacgtgctccttgagatggaccgtatccttcgtcccacgggctacgccataatccgggagagcacctacttcctcgattctgtggcacccattgccaaagggatgcgatggagctgcgagaagcacagcagcgagaacaaggccgacaaggacaagatcctcgtctgccagaaaaagctttgggcaggaaagcagtgacgagagaggatcatccttcttccttccgagtataaaaaagtaggcatccagatcggccaacaaggcaagaggcgcttcaatacacatggaagatgagcgagtacttctgatacaaagagtgttcggcagttattatcaaaataaataagccgagtaaaactccatataggatccaacagttaccatttttcattaatcacagtttaattctttttctgtaccgacagtttgtaggcaaggagtgggtcaattcatataccatatggtgagcaaatgtaagtttactccacactagatgtgtatagcttggttggtgctactgctatcgatgtaatagcgggccacgtatttacttcacatgttttgtggatcaatatactatgactgtgatgtcct

SEQ ID NO: 2046 - DNA, 704 bp, Zea mays
  Clone ID: 700201343_FLI
gtcctcctgtatgtatatctttgattttttttattgtaatatgcatattggtaactagtgaataatatttactacactaatttgcagatgggaaatccatggatctacatgtaccctgagggcttgaaggatctccttatgatcatgaagaacaaatacggaaacccacctatctacatcacggagaacggaatcggggatgttgataccaaggagacacctctacccatggaggatgccttaaatgactacaaaaggctagattacatccagcgccacatcgctactcttaaggaatcaatagacttgggatcaaatgtgcaaggctacttcgcttggtctctgctggacaactttgaatggttcgccggcttcaccgaacgttatggcattgtctacgtcgaccgcaacaataactgcacgcgctacatgaaggagtctgccaagtggttgaaacagttcaacgccgcgaagaagcccagcaagaagattcttacgccagcttagaaatcgggggcctcatgatgtgggtgcagcccataaaaaactggtgtgtggtttcgaaccgaaaattttctgttttttttccgccacgagaggttctggaggcatactctccagcaccgtggctaataacgcattgttccaattcagtctggccttgtcatgcatgcaataaataaagtgatgggtttccctgtttc

SEQ ID NO: 2047 - DNA, 620 bp, Zea mays
  Clone ID: 700201353_FLI
caggaatacctttatcaagaaatccaaaaagtctgcggcaataagacagttaccgaggatcacctgccagagttaccgtacttgaacgcggtgttccatgagaccatgaggcggcattctccagttccattagtgcctccaagattggtccatgagaataccaacttggctggctatgaggttccagccggcacagagataatcatcaatctgtacgggtgcaacatgaacaaaaacgactgggccgagcctgaggaatggaagccagagaggtttctggacgggaggtttgaagcagtggatatgcacaagaccatggcctttggcgcaggaaggagggcctgtgctggcagcatgcaggcgatgaacatctcgtgcaccgccatcggcaggtttgtgcaagagtttgcctggaggctcgaggaaggcgacgaggacaaggttgacaccatccagcttacaaccaacaggctttacccactgcatgtgtacctcgcacctagaggaaggaaatgagcctctactgtaaacgggtttcactgtactaatttaaaaaaataatttgctgttgcctgtgtatgacttttggatgatctctatgctgtgaagttgttggtctg

SEQ ID NO: 2048 - DNA, 1220 bp, Zea mays
  Clone ID: 700201362_FLI
ctggtgggcaggcgttaaggtacaactacatgcggatgaggaaacttaccgatcaatgggtaaagagcatgcactcgtcatatcaaatcatcgaagtgatattgattggcttattggatggatattggcccagcgctcagggtgccttggaagtacgctcgctgtcatgaagaagtcatccaagttccttccagtcattggctggtcaatgtggtttgcagagtacctctttttggagaggagctgggccaaggatgaaaagacactaaagtggggtctccaaaggttgaaagacttccctagaccattttggctagctctttttgttgagggtactcgctttactccagcaaagcttctcgcagctcaggagtatgcggcttcccagggcttaccagctcctagaaatgtacttattccacgtaccaagggatttgtatctgccgtaagtattatgcgagattttgttccagccatttacgatacaactgtaatagttcctaaagattcccctcaaccaacaatgctgcggattttgaaagggcaatcatcagtgatacatgtccgcatgaaacgtcatgcaatgagtgagatgccaaaatcagatgatgacgtttcaaaatgtgtaaagacatttttgtggcaaaggatgccttactggacaaacatttggcaacaggcactttcgatgaggagattagacctatcggccgcccagtgaaatcattgctggtgaccctgttttggtcgtgcctcctgttgtttggtgccatcgagttcttcaagtggacgcagctcctatcgacatggagaggagtggcattcactgccgcagggatggcgctcgtgacagggctcatgcacgtcttcatcatgttctcccaggctgagcggtcgagctcagccaaggcggcacggaaccgggtcaagaaggaatgaaaacggagggtggaaatgtgattctgggctctatttatgggcagctttcaaaatgactcgattcatattaatgtatacagcaccaaattccagacagaaacaggatgctctgctcctcttgtatttgtgtgcaggaaagaattttagggagttcatttttgcccccctcttttgggcagaggaactgtaggacatgaacttgatgttggtacatttgccctgtagacattctggaagcctttcagtagttcatttatcagtaaagcttgcatctttcatcc

SEQ ID NO: 2049 - DNA, 2251 bp, Zea mays
  Clone ID: 700201371_FLI
cttcaaccgccgccgcaaagaacggcccacttgactacttgaggttgagggtttcttctcctcgtgcgcactcgcgtttcctcttcatccgctgccacaatctttgcggcgccctcacacaccgccgccgccggctagagcctagggccgtaaccgtaacagccacccctgagactgagatggatacagcggaggaggctgggcaggaagtagtcagcgctgttggggaggatagtatcccggaagctgccgcctgcagcagggaggagaggaaggaggaagaggaggaagaagtggaggtgagcttcgatgaacttggcctggacgagcagctgaagagggcgttgaggaagaagggcatcctcaaggccaccccgatacagcgggaagccatcccgctcatcctggaagggaaggatgtggttgcaaaggccaagactggctctgggaagacctttgcctatcttctcccacttctgcacgagctactgaagttgtcctcagaaggacgtatacgaaaacctgcaccaaatgctttcatcctggttcctactcgagatttatgccaccaggtgtataatgaggcattatctctccttgagctctgtacatgcaaattgagggttgtgcaagttaccgcgagcatgtcggataaggatattactgttgcattgtctggcccccctaacattctcgtatcaactccagcttgtgttgcaacatgcatatcaaagggaattattcgtggacctgcagttaaagagtcactttcaatgatgattcttgatgaggctgacctacttctatcctaccgctgcgaagttgacttgaaagctctcatcccacatatcccgagaagctgtcagtctattctgatgtctgcaacttcaagctctgatgttgacaagttgacaaaactacttctgcataacccatttgttctaactctttcggaggttggtcaagcaaaggatgatgtgatccccaaaaatgttcagcagttttggatctcctgtgatgccaaggataaaatacttcatatccttgcacttctaaagtttgagctcattcagaagaaagttcttatatttgtaaactcaattgatatggctttcagattacgactgatcttggaaaagtttgggataagatctgcagttttgaatgctgagttgccacaaaattcccgactacatattatagaggcattcaacgcaaggctatttgattatctaatagcaacggatgacactaaaacaaaggagaagcaaaccaatgaggaaaataaaaaagaggcaacattgtcccgcaaacggaagaagcaaaccaataaggaaaaccagaaagagcaaaaggtgtcccgcaaacatttgcaacagactttagatgctgaatttggagttgtcagaggaattgacttcaaaaatgtatttacagtagtcaattttgacatgcctctggatgctactgggtatgttcacagaattgggcgaacaggtagagcaaataagactggtgcatccatatcgcttgtttcaccaaaggaggatagtacttttaaagagattgagcatatgttgcaagatgtcgaaaagaaagatatggactgcatttcacctttcccattacttacgaaagatgctgttgaatctctacggtatagggctcaggatgttgcaaggagtgtgacaacacgtgatgtacaggaagcgcgtcgacaagacataaagaatgaaatcctcaattctgagaaattgaagtctcattttgaagagaatccaacggaccttgatttgctcaaacacgataagttgctatgcaacaaggaaattcctgcatacctgcgtgatgtccctgactacctaattgatccgaaaacaaaagaagccagcaatgctgtcaagctttccagggctgctatgcatatcgacaagccccaaaggcggaaaaggcaggggtttaagggaggatcagggaaaagcagagaccctctcaagacattctctgctgagggcaaacgagggagacggaggaaagaaagggagggagaaccagatagaagaaagaagagtaagaaggcgtgaagttgatttttcaagcagtttgctatcaagctcgcccaattttgtaggctttgtttgaagcaacttgacaaagtgctgtatcggtgacactcgtaggtcgtagctaaggagtatgtttttattgcctgatggcaactcttaatttttaaagtgtactcgcttccccc

SEQ ID NO: 2050 - DNA, 611 bp, Zea mays
  Clone ID: 700201408_FLI
gcgatctagaacagcaagtggcagatcattaccttgctcagaagggccatttgtgcatgatggatattcaagatcaaacattgacagatcttcaatgaatcctatgaatcatcaacatactgttctgaatcatttgccatctggagcaccactaccaggccatatttctcagatgctaccagccaggtctgatatgcacactcttaattgctggaggccctcttgatagagttgtaaactgaacttcttgtttgtgattttgacatggaaagctcagggcattggaggcaatttgaattgagttcaacaactggtggctgttagtctgagatggagatgcacttgccagggtttaacgatgagatctgtcatagtatgtggaatggacattttacaatgtaactagtcctgacaacagtatccagcagacaatctctcttagtgtgagctcatcttttcacatgacgcaaatgtcctccagttttttagatgttgcttccagtatggatcaggacagcgaactgttcctatgctatggtagtaaatatcttgtgcagatacattaattataaatagaggtctggtagtaaataccaggaactggtatcatc

SEQ ID NO: 2051 - DNA, 1423 bp, Zea mays
  Clone ID: 700201413_FLI
gggacaagcatggacgtgttgcacaatcaaacgccgcggagcccggaggaacgaaccattgatcgcaagctcctcatccatgactttcaagtgatcattctggctggaggtgttggcagaaatatgcgtcctatcaccagtgatacaatgccaaaatctcttctccctgtggctaacagaatcttgttgtcttatcagttagagtttgtcattaagatgcggtttcctgaggtgatagtggtcactgcagaaggctacgaagaagtcatacaactctttcttattacctatggtgaggccttcccagaattacgaattaagttacaggttgtgaacgactacacaaacacagctggtgtcctccttcaccttcgtcctatccttactagagacttcatcgtcatcggtggagacttgatagtcgaaggtaatttcctccatcacatggcagataagcacagagcaagagatgctgctgtcactgtcttgggtttcaggaggaagatagaagaggaaggagcaggtggtgcttcctcatcctctgctgctggagaagatgaagaatattttgctgtggaaccaacaactggaaggcttctcatgcttttcgattcgacatctgtgagctcagaattcatcagagtcaagaaaaaactatttcgaaagtttcctaattttacattacactcttcatcaatgcgcgacgctcatttttatatgttttctcgttggactttagatctcctcgaaaacgatccaagtcttagcatcaaatcagatttcgttccctttttaagcaggtgtcagtatgaccagcacctagtagaaaaattggaaattccttcgttcttgtcgcctgttgtggctgagatgtcttcagtgaaacatgaccccgaagacaaagttaagtgttatctattccaatttccagatgctgaaggaacaaaatactgcgaccgagtcgattctatttcgagcttcttccacatcaatcgcaccatcgctgaaggaggaaaagaatatcaacctactgaacctaggggtccatccaacaaagccattaacttcattgctacgaccgcgaagatcgagaagacgactgctattccttctggttccattgttggggctgacactataattggggatcgcgtaggagtaaagaaaactatgataggcaaacattgtaaagttcatagcaatgccaaagcgattaattctgttattttcgatcacgtgactgtcgaggaaggcgccaaaatacaaaactcgattatcggtcaacattgttacatagaaaagaatgcggagttgactgattgtattttgggagcagggaataaggtagaagcaggtgctgtctggagaggaaagaagctcaccgctcgaatttgataatgccaataccatgtttttttttttg

SEQ ID NO: 2052 - DNA, 1250 bp, Zea mays
  Clone ID: 700201481_FLI
gagtggcgatggcagtactgcacttgcaggcggcggcggtggcggtgctgctgatggcgacggggctgcgcgcgcagctgcgtgtgggcttctacgacagctcgtgcccagcggcggagatcatcgtgcagcaggaggtgagcagggcggtggcggccaacccgggcctcgccgccggcctgctccgcctccacttccacgactgcttcgttgggggctgcgacgcgtccgtgctcatcgactccaccaagggcaacacagcggagaaggacgccgggcccaacctcagcctgcggggcttcgaggtcgtcgatcgcatcaaggcgcgcgtcgagcaggcctgcttcggcgtcgtctcctgcgcggacatactcgcgttcgcggccagggacagcgtcgcactcgccggcgggaacgcgtaccaggtgccggcggggcggcgggacgggtccgtgtcgcgcgcgtcggacaccagcaacctgccgccgccgacggccaacgtcgcgcagctcacgcagatcttcggcaccaagggcctgacgcagaaggagatggtcatcctgtcgggcgcgcacaccatcggctcctcgcactgcagctccttcagcggccggctgtcggggtcggccacgacggcgggcgggcaggacccgaccatggaccccgcgtacgtggcgcagctggcgcggcagtgcccgcagggcggcgacccgctcgtgcccatggactacgtctcccccaacgccttcgacgagggcttctacaagggcgtcatggccaaccggggcctgctgtcctcggaccaggcgctgctcagcgacaagaacaccgccgtgcaggtcgtcacctacgccaacgacccggccaccttccaggccgacttcgccgccgccatggtcaagatgggctccgtcggcgtgctcaccggcaccagcggcaaggtcagggccaactgcagagtcgcctgattcatcgtcatcactcgtgtggagttgtagattcattatattgattgatttggaccggacgacgtcgacgggatgctacatggcctgcttgcgcaattgtatgtatgcctgtacttgcgcgtgtatgggtttcgctgtgcaaattttcgttgtctcccccgattgattgaggcgtgtgtgcgtgtgtgtctcttctgaatctgaatggaaaatctgtaacctgagctaaaactgctcgtgtactacccaatagttgcttcaaactacgatggatttttattc

SEQ ID NO: 2053 - DNA, 471 bp, Zea mays
  Clone ID: 700201525_FLI
gtgcaagctatgggcagcctccagcctactctactgaagcaacacctcctgctgcatcccaggatcactctgctgcccctgctgcggcccttggaacaacagcttcgacagctcctgaaaacagtgggggcgcccaaacatccgctgaaacttgagcttcagcagctaattgggaacaaacattttccaagaccctgccgtgtggtttcctccgcgctgttgcttaatataattacgcatctaatttagggtctacaactacaagttatttttttttctgcctgttgtttttgacaccatgacttgctgtttccttgctatattgagtagtaccttgcagttattttattgctggcatatatgtctggactagtgatatatgtgtttgtgtggttacccttgttggaccgtaatggtctggacagataaatgcccatctatatgtattctgagccctgttatgtttgctct

SEQ ID NO: 2054 - DNA, 1513 bp, Zea mays
  Clone ID: 700201552_FLI
agcagacagagggcagtcacaaggtggtaacagcagcagcagcaggtggctttcttcatcctagccagctccgtggtgttcctcctcctcgacagagaagccgggctccaagaagaaccggcgataagagccggcggcggcggcggcgacgaggagtgcagctggtctcgggggcgctgggtgtacgacaacgtgtcccggccgctgtacgacgggctcaagtgcgccttcatcttccccgaggtggcctgtgacaagtatggcaggaaggatgtcatgtaccagcactggagatggcagcctcatggtcatggatgcgacctcccaagattcgatgccatgaagctgcttgaagagctgaggaacaagagactggtgtttgtgggtgactcggtgaacaggaaccaatgggtctctctcgtgtgcatggtggaggcctcgatacctgacgacaggctcaagatgcgcatcttcaatggctcgctcatctccttcaaggcactggagtacaacgcgacgatagatttctactggtcgccgctgctggtggagtctaacagcgacaaccccatcatccaccgggtggagtaccggatcataagggcagacaggatcgagaagcacgccagcgtgtggagggacgccgacgtcatcgtcttcaactcttacctgtggtggaggaagcagaaggatgacatgaggatgaaggtcatgtacggttcatttgaagatggtgacgcaaagctagacgagatggaaatggcggatggtttcgagatagctatcaagaaactgacggaatggcttgcaaagaacattgacaagaacaagactaggatatttttcgcaggatcatcaccaacacattcctgggctagcaactggggcggacaagacaagaacaagtgcctgaacgaaacggagccgatcagctacagacccggcggcgggtacaaggctgcaaccacggactacagcctgatggccatggccaggtcctacttccggcggacgctggagccgagaggcatacgcgtccagatactcaacatcacggagctgtccgactaccgcaaggacgggcatcccacggtgttcaggaggcagttcgttcccctgaccaaggagcagatcgcggacccggccagctacgcggactgcacgcactggtgcctcccaggcgtccccgacgtctggaacgagttcctgtatggctacctcacgcagcagagcaaatgacgatgcattattacaagaatggccttgttatatgtagtagtgtacagtgcagtacagattgccagctgctccgtttagattattagggatggacctgctgttacatgtagagagagacagacaggagatctgtcttgcccaacattaattctagtatctgtaaatcttgttcttcttgtccaacattaattctaggatctgctgctaaccattttttttggatttatgtaaactgagtgattatctgaaatagaatgatctgagtttgctgttc

SEQ ID NO: 2055 - DNA, 721 bp, Zea mays
  Clone ID: 700201559_FLI
tcggtcctcctgctgctcctggccgccgccttggctggcatgagcgccaacgccgccaccttcaccatcaccaacaactgcgggttcaccgtgtggcccgcggccaccccggtgggcgggggcacgcagctgaacccgggcgggacgtggaccgtcaacgtgccggccggcaccagctccggccgcgtgtggggccgcaccggctgctccttcaacggcaacagcgggagctgccagacgggcgactgcggcggcgcgctggcctgcacgctgtcggggcagccgccgctgacgctggccgagttcaccatcggcggcagccaggacttctacgacatctcggtcatcgacggctacaacctcgccatggccttctcctgcagcaccggcgtgcggctggtgtgcacggaccctggatgccccgacgcgtaccacaacccccccgacatgaagacccatgcctgtggcggcaacagcaactaccaagtcaccttctgcccgtgatcggccggaataggctctgcatgcatgggctagtgatttggattttgcaggaataattctgatttggatttgcacaataatatataagcgtgcattacacgtgcacgcatttgtatgtacgcgcgtatacgtcgtacctacgtagctggatttgtgtgcgtgcttcgtaccaaatattaataagaataaacaaatatgactcgtgtcatatatatat

SEQ ID NO: 2056 - DNA, 934 bp, Zea mays
  Clone ID: 700201581_FLI
ggccgccgcgactacctccgctacgccctcgacaacgccgaggcgttcggcggcaccggctgggccgtctccgagttcagctgggacatcaagtacgccggcctccaggtcctcgcatcccagctgctggtggaggccaaggaggagcggctgcggctgagcgcggaggaggtggcggtggtggagcagctgcggtccaacgcggagtactacgtgtgctcgtgcatgaaccggaaccccggcggcgcgaagcacaacgccggacgcaccccggcggggctgctcttcatccggccatggaacaacctgcagtacgtctccggcgccgcttcctcctcaccgtctactcggacgtcctcgcctcgctgggccagcccctacgctgcggctccggcgacgacggtggcgaacccgccgccggcgacgcgggcgacgtgctggctttcgccaagtcccaggccgactacatcctgggcacgaacccgatgcgcaccagctacctggtcggatacggcgcggcgtacccgcggcgggtgcaccaccgcgcggcgtcgagcgcgtcgtaccggcacgaccgggacttcatcggctgcctgcaggggttcgactcgtggtacagcgcgcggcaggagaacccgcacgacctcgtcggcgccgtcgtcggcgggcccaacggcgaggacgtcttcaacgaccaccgcggcgcgtacatgcagactgaggcctgcacgtacaacacggcgcccatggtcggggtcttctccaggctcatgcagctggaggggcagtcgccacgcccggcgccggcgccggcggaggatctttgataggagaggtcgttttccttgaaaggttcccagcgacaagtggtggtgcgaaataaacttttcaaaaaggattaaaaaaagtgatattgatcgtttaggctggatgt

SEQ ID NO: 2057 - DNA, 1159 bp, Zea mays
  Clone ID: 700201601_FLI
gcagcagcagcgccgcgacgcggaggcggagctcaacctgcccccgggcttccggttccacccgacggacgaggagctggtggcgcactacctctgcgcgcgcgccgcggggcgccgcccgccggtgtccatcatcgccgaggtcgacctgtaccgcttcgacccctgggacctgccggagcgcgccctctttgggcgccgcgagtggtacttcttcacgccgcgggaccgcaagtaccccaacggctcccgccccaaccgcgccgctgggtcgggctactggaaggccacgggcgcggacaagcccgtggagcacgggggccggacggcggggatcaagaaggcgctcgtgttctaccacggcaagccgccgcgcggggtcaagacggagtggatcatgcacgagtaccgcctcgccgaagccggcggcgcccgcgccaagaagtccggcgccggcacgctcaggctggatgactgggtgctgtgccgcctgtacaacaagaagaacgagtgggagaagatgcagcagcagaaggagaaggagaaggagaagaaggcgatggagtcggaggcgtcgctctcgcactcccactccgacacgcggacgccggagtcggagatcgacgacgacccgttcccggagctgggctctctgccggcgttcgacgacatgggcgcagccccagcccctgccggcgtcgtcctgcccaaggaggaggtggaggacttcggcgacctcggcggcgacgactggctcgcgggcatcaacctcgacgacctgcagatgccgggggatgccgccgatttctacggctccatgctcgtctcgccgatggccgccaagatggagccggacggcggcttccccttcttctgagatccttcggcgactccggggaccggatgcagcgcaacgcaaactgtgtatagttcagattttcttcatggaaccaacaacaacaaaaaaaaagttcttgctaatatcttgttctagtggtgtagtgcagaagtagcagcaggcatgattgaagttccattgtagtactgatgttcatcgccacttgatctgtgacaagtgacggcattctttcgtttcttggctgcaaattcttcgttgtccagaatataatttcagatgggtaatgccaattcgggccgt

SEQ ID NO: 2058 - DNA, 1307 bp, Zea mays
  Clone ID: 700201609_FLI
gcgatctagaacacaaacaaaaaaacaacaggagaacaggcaaaggcctccctccctcaactcaggaaaccatccaacttgtcgatcggccttgcttgccttggtactcctgcttccgccatggttcagatcaaagagttccggatcgtcatgcccatgtccatggaagagtacgagatagggctgagctacaccatcatgaagatggagcagcagaacaccaacagcaaggagggcgtggaggtgctgcagcaggccccgttccacgaggatgccaagcttggcaagggccacttcacttccaaagtttatcatctgcaaagcaagattccgtcatggatgaagggctttgcacctgccagtgccctcgcggtgcacgaggactcgtggtgtgcgtttccaaagagcagaacaggttagcagttttccctttggacagactctgtaatgtaatgaaatgtaaatattccagtggctgagaatgttctctcaacttgtcccccattgtgtttccatgaacggcggcgcgggttccatccattctgactcgcccgcacgctagtgatcaagtgcccgctcttcagcaagtgctcactcaccattgacactgtgaccagacccgacaacggttgctctgaaaatgcgcacggtttgagcggcgagcagttagccgcgagagaagtcgagatcatcgacatcgcttccgtgtcgcgggactactggagcaaggcgatcggcgctccgagtgtcgacctgactgccttcaagtcacagcggacagaacgtggccctcttctcaagggatggatggactcgtgccatccggtgatgaccacgtacaagctggtgaccatggacgctcccatatggggcctcggcgaacgcctggaagactgcatcattgcgggggagagggcgctgttcttggcatgccaccggctgtgcttcgcgtggatcgacgagtggtacggcatgaccgtggagcagatccgcgagatggagcggcagacggacatgctgctcaagaagacgctgaagaaggccgggagcaagcacgagggcaacaggaagacgctcaaagacgagctagtggccgtggggagctagtggccgtggggcatcaaatatgtcacagattaggcatgtgtaagtgtaatgtgtccacaattaactgaagaaaatatgcatcgctgtatgtatctatataggagtacaatcaaggcagccatctgtggtttgtctttaaccccctaaaactagcaagctagctcgtgcaaatagtattatgtcactgcttcctgcattct

SEQ ID NO: 2059 - DNA, 2469 bp, Zea mays
  Clone ID: 700201658_FLI
gagctctgcacaagaaaaggggaggaaggacgagccggagccactcagccgccacctcaccccccccatcggccgcctgcgtcccaccacccgctcctgctgccgggcctgccgcccgttgctctcgccactgaagccctcgccgccgcctccgcctccgcccgcttgcttgccctcctgccggctgcctcccggatgagaagcggcgcaacctgggcagcggaagcgtggtcggcctgagccttcgccggggtttctgccgagaaggatcctggagattaagcgcatgggttccttggaggcccggtacaggccggccggggcagctgaggacacagctaagagaaggacccaaaaaagcaaaagtttcaaagaggttgaaaaatttgatgtttttgtgctggagaaaagttctggttgcaagttccgatcgatgcaacttttgctcttcgctatcatgtctgctgcatttctaacactcctatacacaccatctgtgtatgaacatcagttgcagtcaagctctcggcttgtcaatgggtggatatgggataagagaagttctgatccccgatatgtatcttctgctagcattcaatgggaggatgtatataaaagtatccaaaatctgaatgttggtgaacagaagctcagtgttggactcctgaattttaacaggactgagttcgacgcttggacacacatgctcccagaaagtgatttctcaatcataaggctggagcatgccaatgaaagcattacctggcaaactctctatcctgaatggatagatgaggaggaagaaactgagataccatcttgcccttcgcttccagatccaagtttccaaagagcaacacattttgatgttattgctgttaagctcccctgttctcgtgtggctggttggtcaagagatgttgcaaggctacatttgcagttatcagcagcaaaattagcagcgaccacagcaagaggcaatagtggaatccatgtgctgtttgtgactgattgcttcccgattccgaacctcttctcttgcaaggacctagtgaagcgtgaaggcaatgcttggatgtacaaacctgacgtgaaggcgttgaaggagaagctcaggctgcctgttggttcctgtgagcttgctgttccactcaacgcaaaagcacgactctacacagtagacagacgcagagaagcatatgcgacaatactgcattcagcaagtgaatatgtttgcggcgcgatcacggcagctcaaagcattcgtcaagcaggatcaacaagagacctcgttattctcgtcgacgacaccataagtgaccaccaccgcaaggggctgcaatctgcggggtggaaggtcaggataatacagaggatccggaaccccaaagccgagcgcgacgcctacaacgagtggaactacagcaaattccggctgtggcagctcacggattacgacaaggtcatcttcatcgacgcggatctcctcatcctgaggaacatcgatttcctgttcgcgctgccggagatcacggcgacggggaacaacgcgacgctcttcaactcgggagtgatggtcatcgagccttcgaactgcacgttccggctactgatggagcacatcgacgagataacgtcgtacaacggcggggaccaggggtacctgaacgagatattcacgtggtggcaccggatcccgaagcacatgaacttcctgaagcatttctgggagggcgacgaggaggaggtgaaggcgaagaagaccaggctgttcggcgcgaacccgccggtcctgtacgtgctccactacctggggcggaagccgtggctgtgcttccgggactacgactgcaactggaacgtggagatcctgcgggagttcgcgagcgacgtggcgcacgcccgctggtggaaggtgcacaaccggatgcccaggaagctccagagctactgcctcctgaggtcgagcctgaaggccgggctggagtgggagcggcggcaggccgagaaggcgaacttcacggacgggcactggaagcggaacgtaacggacccgaggctgaagacctgcttcgagaagttctgcttctgggagagcatgctgtggcactggggcgagaagagcaagagcaactcgacgacgacgcggaacagcgccgtgccggcagcaacgacaacgcctgctgcgagcctgtcgagctcgtgagacttgtagatagctttgtctgccgagagtagtataccagtaccagatacagaacttctgaagctctccatacatacatagcgacagctctgtaaaggtagctatgtaggccttttccttccccgaatgactatataccttcgtcttcgttcgccgtcacagctgcaggcagctccctccctcccgctggtttccgatggttaacaattccttttttttttgccaataattcatcagtataggatgtccggctatgttgcctc

SEQ ID NO: 2060 - DNA, 921 bp, Zea mays
  Clone ID: 700201662_FLI
ccagtgtgtcgtccatggcgacatcaaaccgagcaacatcatgctggacgagtccttcaacgccaagctcggcgacttcgggctggcacggctcatcgaccacggaatgagcctgcagaccatgactgccgtcgctggcacgccagggtacctggacccggagtgcgtcatcaccggcaaggcctcccccgagtccgacgtgtacagcttcggcatcgtgctgcttgaggtcgcctgcgggcgccggccgatggcgccgccagcgagcacgggcgagggcaaggacggccaggtgttccggttggtggagtgggcttgggacatgcgcggccggggcgccgctctagacgccgcggacgagcggcttggtggagccttcgacccgtgggagatggaacgcgtggtctccgtcgggctctggtgcgcgcacccggacccaaagatgcgaccgcggatccgccaggctgccgaggcactgcggtcgagaagcttcaggatgccgctcctgccgcccaagatgccggtcgccgtgtacctgcagccgttcggtccctccaccctgcacttcagcgacaccaccacctccgtcgggtcttctgttaccgtgccgtacacttcgaccacgagccgtgcgacgacggcgacggggacggggatgtctaactccagctcgccgccggcggtcactcaacacttgagcccaagagcataggtcaaatgtacaactgtacggcgtacgtcggtatgtgtgtagtgtaattttgttaaaacaaaatacacttaaaagctaggcaaaatttcctaatgtatttttgagaattatgtgcactcatcgcatgagactttcaattgtcctgctacacctagcttttaaaagaataaaatatgattatggtgtatcttggatacaacttgcttttt

SEQ ID NO: 2061 - DNA, 374 bp, Zea mays
  Clone ID: 700201723_FLI
gaccgtatgcggtcacattttctgccagccgtgcatcaaggctgccattaaggcccagaagaagtgccctacctgccggaggaagctcactccaagacagcaacaccgggtgtacctcccatcgccttagtagcccagtgcagagtcattttgctacaagttctgccgtgccgggggctgtatgttggaggcaactgggggggggggggggggagcatagaggtcctgtttggttcgttcatttagtgtcataatcagttaacagggtaatctattaccattgctttatgtttggttagactatactgtaaacgattgcagtgggatgcaataccagccaatacaaaattattgccgctgctttttgactgttt

SEQ ID NO: 2062 - DNA, 504 bp, Zea mays
  Clone ID: 700201727_FLI
ggccagctcggcgccatcgccgccggcgcgtacgctctgcacgagaagcacaaggccaagaaggacccggagaacgagcacggccaccgggtcaaggaggaggtggccgccgtcgccgccgtgggctccgccgggttcgccttccacgagcatcacgagaagaaggacgccaagaagcacgcccacaactgatccgtcgcaggctgcctcagccgaagcagcagcacatcgtcgcggttgctgtttcatctgttctcccagcctcgtcttcgtctactgtgtgccgggcaggccttgatttgaggctttgagctaccgatatttgcacggacgtaggaactgtgttggtcctcggcgttcttgtatcaagatcaaatcaggccttcaataagtgtgtgtgtgtgcatatatcttttttttaaaatttatctcttttttttgtatcgagagatgttctgaataatgtgaatttacgtgtgtttatataaacgaatttaagaagtc

SEQ ID NO: 2063 - DNA, 864 bp, Zea mays
  Clone ID: 700201791_FLI
gcgctcgccaatcgccattgctaacaggaggagagagaaccgtgagcgccaaaccaggatccgatccctgtgaacagagagaaggggtagccaccaccgaaggattacgattgtcaggcggccgggtttgagaacgccaatgccgggagagagattaagaacgacctgtacggatcttcctcaagcctcgttcgttttcagaggatcagcccattccaggccttgttccgggtggaacgaatgagcctggtttggaatttggtagaacttatttatattgttcgtttcggcccgaattggaatggaaactggcctggattaaaattttccttcacctcacggcccggaaccaacccttgtgtggtaccctccggatcgaagcctggacacacgcgaccgacgcggcggcggctcgacgcaaccggcgcgacgcgcggctttgacgcgaccggcacggcggcggcgcacagccccgacgtcgaccctccccgctgccttctccccggtgaggatttgctctcttccttccctatctcctatcctctgctctcgctgccccaatctgtcaccctcgatctcggtcctctccgctctcaccaagtgcgccgccacctgcaagaactgcgtccctgtgttttggtgcatcggcgactcccgagcctgcgcgcgcaacggctcaacggctgcagacaggatgagtgggcggaggacaggatgagtgggcggcgcaacggctcgggcgagccggatcctgcggagaagaggtcgtcctcgtataacgaaggaagtacagtttggaatgaaatccctgttactagctgatgctgtgcagtttttatttatttattaatatactggctttct

SEQ ID NO: 2064 - DNA, 1268 bp, Zea mays
  Clone ID: 700201839_FLI
ggaagattgacaattgctgcaggaatgggacaatcttgcccaagtccatggacgaggcacagtcgaaatctgcgttccagatgcaagttttcaagatgccaccagacctgaaccggactaagctgttcccccctgctaatttcaagatcgtgggtgcatcatcgctgaacccggactatgcctgtggccagccggtgcctgtcagcccaaccgcgttcccagacccgagcgggcttgactcgacgacgcttgctgtggcaacatggcaggtggtgtgcaacattaccacgacaaagggggccaagcccaagtgttgtgtgaccttctcggcgtactacaacgactcagtgatcccctgcagcacctgcgcttgtgggtgccctgcaaacaggcgagggccaacgtgcagcaccaccgcacaatccatgctgctgccaccggaggcgctgcttgtgccattcgacaaccggtcacagaaggcgttggcgtgggctgagctgaagcattacaatgtgccccggccgatgccttgcggtgacttttgtggcgtgagcatcaattggcatgtctcaacggactacaacaagggctggagcgctcgggtgacattgttcaactgggaggatgtcgacatggccaattggtttgctgccatcgtcatggacaaggcgtatgacggctttgagaaggcttactcgttcaacggcaccgcagtgggcaagaacacgatctttatgcagggtctggaggggcttaattacctggtgaagcagaccaacatgagtgggtccgactaccttgttcctggcaagcaacagtcagtcctctcattcaccaagaagctgaccccggggttaaatgttgttgctggagatggcttcccaacaaaggtcttcttcaatggcgacgaatgcgctatgccacagagaattccgatcagcactggattcagcacccgtctcagcagtggccttgctctggttccgttccttgttgcttcggctttcctattgctccagcaatgatccacgggactccaattctttgattctttcaggtggtttggtcgatgccatttgtaagaaagcctctttttttgtttctgtgattgctttagtagattctacttagctgctgtatgttagtcagatgaagcagcagctgtgaaacagtatgaatacttggatagtgagagaaaaagtgaggaagcatttgttgcgggtttgcaacattggttcctcgttctaatggcatttacgaattgtctc

SEQ ID NO: 2065 - DNA, 793 bp, Zea mays
  Clone ID: 700201865_FLI
gagcggcggcgcgggcggacaaggagcaggcggaggaggagttgtgccaagccacaatgggtatctcgcgtgactcgatgcacaagcgccgagccaccggtggaaagcagaaggcctggaggaagaagcgaaagtatgagcttggtcgccagccagccaacaccaagttgtcaagcaataagacagtgaggagggtccgtgttcgtggaggtaatgtgaaatggagggctcttcgccttgatactggtaactactcatggggaagtgaagctgttacccgcaagacccgtatcctcgacgtggtctacaatgcatcaaacaatgagcttgtgaggacacaaacccttgtgaagagtgccattgtgcaagttgatgctgccccattcaagcagtggtacctcactcactatggagttgacattggtaggaagaagaaaacccctgctgcaaagaaggataatgctgagggacaagaggttgaggcagcagctgaggaaacgaaaaagagcaaccatgtcacgaggaagcttgagaagcgcaaggagggacgtacccttgacccacacattgaggagcaatttggcagtggacggttgctggcatgcatttcttcccgccctggacagtgtggccgagctgatgggtacatccttgagggtaaagagcttgagttctacatgaagaagctacagaggaagaagggcaagagcgctgtagcttagagcattctcatggattgtcttgcaccgaaatgtgtgtcctgatgagtacactttttttggttagtcgtctc

SEQ ID NO: 2066 - DNA, 1116 bp, Zea mays
  Clone ID: 700201877_FLI
acaaaatttgattttcctttcctttccttttccacccccgactattacccctcctcccactccacggagaagcgaaaccgacctttccccctcccccgcattccacctcgcggagatccagtccagccctagggtttcgccagcggcgagccaaactccacgagcgggggaagaggggaaagcagggacgacgagggggcagccatggggcagcagtcgctgatctacgcgttcgtggcccgtggcacggtcatactggccgagtacacggagttcaccggcaacttcaccaccatcgcctcccagtgcctcatgaagctccccgcaagcaacaacaagttcacctacaactgcgacggtcacactttcaattacctcgtggaagacggattcacatactgtgttgttgctgttgaatcggtggggcaacaaattcctattgctttcatggatagggttaaggaggatttcacaaaaaggtatggtggtgggaaagctgctactgctgcagctaacagcctcaatcgagagtttggatcaaaacttaaagaacacatgcagtattgtgtggatcaccctgaagaggttagcaagctggccaaagtgaaggcgcaggtttcagaagtcaagggtgttatgatggaaaacattgaaaaggttctggatcgtggagagaagattgagctgcttgtcgacaagaccgagaatcttcgctcacaggcacaagatttcagacagcagggaacaaatgtcaggagaaagatgtggttacagaacatgaaaatcaagctcatcgtcctgggaataatcatcgcactcattctgatcattatcctctctgtctgtcatggtttcaaatgccattaagcacagaccagaatactgatacattcaactgcacctattatactgctgcttggagcaaaaaaaagtatgatcttttgttgtttcgctagtgtgctgtggcccggtcattatgcataggtgttttacattgtcgtagtgtttgataaatgatggatggtgactgggtttgttgtgtcaactgtcataactattgtgcatttttggacgctatatgtgtagccttgatatgaatagatttactgtacttat

SEQ ID NO: 2067 - DNA, 697 bp, Zea mays
  Clone ID: 700201886_FLI
gcactcgaaaaatatcgtgcactttgatttgaagtgtgataacttgcttgtaaatcttaaagatcaatcacgtcccatatgcaaagttggtgactttggtttgtccaaaataaaaagaaataccctggtttcagggggtgtgagagggacactcccatggatggctccagaattactcaatggaagcagcaataaggtgtcagagaaggttgatgtattttcttttggtattgttatgtgggaaatcctcactggcgaagaaccatatgccaatatgcactatggcgcaattatagggggcatcgtaaacaacacactgaggccacatgtgccagcttcatgtgatccggagtggagaaggctcatggagcagtgctgggctccagatccggcacagcgcccagcgttcacagagatcgctggacggcttcgctccatgtcagttgcagcaaatcaggcgaaggcaaccaaataagatacaggtggagtactgcctttcaacccccaatccgttgggggttctcttctcctttttttccttttgactggagagtaatacatatacatgcatgttatagagtgctgtaaaaattagtgcatcaatttatttataaccatgttatgagctggattgtatccgtgaatattctggacccggtttgaaggttggtgatgtgtagaagtattagttggaatt

SEQ ID NO: 2068 - DNA, 1148 bp, Zea mays
  Clone ID: 700201893_FLI
agaccaattaactagcttcttctagctctagctaggctcgtctgctgcaagaaggtaacagcgcaggcatggaggggaaggaggaggacgtccgcctgggcgccaacaagttctcggagcgccagcccatcggcacggcggcgcagggcacggacgacaaggactacaaggagcccccgccggcgccgctcttcgagcccggggagctcaagtcctggtccttctaccgcgccggcatcgccgagttcgtcgccaccttcctcttcctctacatctccatcctcaccgtcatgggcgtctccaagtccacctccaagtgcgccaccgtcggcatccagggcatcgcctggtccttcggcggcatgatcttcgccctcgtctactgcaccgccggcatctccggcgggcacatcaacccggcggtgaccttcgggctgttcctggcgaggaagttgtccctcaccagggcggtgttttacatcatcatgcagtgcctgggcgccatctgcggcgcgggcgtcgtcaaggggttccagcaggggctgtacatgggcaacggcggcggcgccaacgtcgtcgcgcccggctacaccaagggcgacggcctcggcgccgagatcgtcggcaccttcatcctcgtctacaccgtcttctccgccaccgacgccaagaggaacgccagggactcccatgtgccgatcctcgcccctcttccaatcgggtttgccgtgttcctcgtccacctggccaccatccctatcaccggcaccggcatcaaccccgcgcggagccttggcgccgccgtaatttacaaccagcaccatgcctgggctgaccactggatcttctgggtcggccccttcatcggcgctgcgctggctgccatctaccaccaggtgatcatcagggcgatcccgttcaagagtaggtcttaaaggagccgatgctgctgcttcgagatgctgccggtcttgaaaggatggattcgtggctgtttcaaatgatcccctactatgttacgtgcagttccattccattcctctttcaaagttcggagctgcttttatccgaacccagacttgtaattcatctgtaccaattgtgtaatatgccgcgcctctgttatgtgcaattcaaaattatgagac

SEQ ID NO: 2069 - DNA, 873 bp, Zea mays
  Clone ID: 700201922_FLI
cctcgcgccgccgccgcgtctcctcctgtacaggtaagaaggagaggaagagggcgaaatggtgaagcacaacaacgtcatccccaacgggcacttcaagaagcactggcagaactatgtcaagacatggttcaaccagcccgcccgcaagcagagacgccgcattgctcgtcaaaagaaggctgtgaagatattcccccgcccgactgctggtcctctacgccccattgttcaatgccagactttaaagtacaacatgaagtcaagggctgggagaggctttacccttgaggagctgaaggctgctggcatcccaaagaagcttgctccaaccattggtatttctgttgatcaccgccgcaagaacaaatcccttgagggactgcaggccaatgtccagaggcttaagacatacaaggccaagctggttatcttcccaaggcgtgcgcgcaaggtgaaggctggtgactctactccagaggagcttgccaccgctacccaggtccagggtgactacatgccatttactcgtggtgagaaacgttcagttgaggttgtgaaggtcacagatgagatgaagtcatttgctgcctatggcaagctccgccttgagcggatgaacaagaaacatcttggtgcccgccagaagaagcagctgaggcagagaaggaagataagaagtgaagcggttgaagatagtaccctgttttgttctattcagtcattagtgaatgctactacttaaagtgcttgttctatgtttttttgcggtaatggaaatagagcccagacaaacattttggtgtcctactgtttgatgccttgtacttgtttgcgaactcagttatctaatgggttattggattcttgccc

SEQ ID NO: 2070 - DNA, 804 bp, Zea mays
  Clone ID: 700201948_FLI
gatagcccttgattcaggattatccacaggtggctttactgactgtttacttcagcatggagcatcacatgtttatggtgtagatgttggctatggacaggtggctgaaaaaattcgcacacatgaacgtgtttcagtgatcgaacgcacaaatttaagatatctatctcaactgccagaaccagttgacttggtgacactagacctatcatttatctccattctcttggtcatgcctgctgttatcaaagtaatgaaaacggattctacattgataacacttatcaagcctcaatttgaagcacgtagatcacaggtaggaggtggtgggattgttcgagatcctttggttcatcaagaggtactggatagaataatttcaggcgtggaagaatttggattctgcaataagggttggatcgaatctcctataaagggtgcagaagggaataaggagtttcttgcttgcttcaacaggatcccaatatcagagtcacagccagaggcagaggcaaaggaacctgtaacctaggatgtcagcagaaattactcaaagtgcgtcatcattgatcaggacaccctcataaagtatctggaagctatattgattatcaaccataacctctgatattcctgacattcttagttgtgtgataaaatttgtccagtttatcaccattgtttatagtctgtaggaactaggggtacttgtaggagatggagggaggtcgatggcgctgtggtggtgtcaggccatgccaccttgtagggaccgaccatagggtgataggatgcactgcctct

SEQ ID NO: 2071 - DNA, 769 bp, Zea mays
  Clone ID: 700201960_FLI
caccccaagatcgcctccttcggggacctgggccacgccatctacggcgcgcccgggcgccacgcggtcgacgccatgctcgtgctcagccaggccagcttctgcgtcggctacctgatcttcatctccaacaccatggcgcagccaccatgggtcgcgtccgcaccaagaccgtgaagaagacctccaggcaggtgatcgagaagtactactcccgcatgaccctcgacttccacaccaacaagaaggtgctcgaggaggtctcgattctgccctcgaagcgcctccgcaacaaggtggctggcttcagtacccacctgatgcgccgcatccagcgcggcccagtccgcggcatctcgctcaagctgcaggaggaggagcgcgagcgccgcatggacttcgtgccggagaagtccgcgctcgaggtcgaagagatccgcgtcgacaaggagaccatggagatgctcgctgccctcggcatggccgacctgcccggcgttgagcgccaggctgaggtctccaacgcccccgcctacggccgcccgcagtacggtggtccccgccgtgaccgcgtttagacttcgcggtggttgcctcttgatcgcactgctattcgtagttgttgtcctactatgctaaacttcttttagatctttggttgcatctgtggcggttaagttttgaacttgcctgttatggtataaattctgaagtgtttggttctgcgtgtgatgaacatgataatttatattcttgcgctttataagtt

SEQ ID NO: 2072 - DNA, 580 bp, Zea mays
  Clone ID: 700201963_FLI
atttttgttgactgtaaatttaataaatatgcatatcacacaaactttgtttaaatactatccaagatggatgcccaaaccacaaggaggcaattcatttctacgtaaacaagctttgtataaattgacttttgcgcaaccaggtcgggctaggaattgttatcgattagctaccagatgttttattcgtcatttacaaatcgatcaagaagaatctaaacaaagatacagttattttcgtgatttaaactcacagcgaatttacgctgcctgtgaagatttgggttatccttataaatacttcattggaaaacttcctaaaatgggaattgaaattgatcgtaaatgtttagcgaatattgcaatatgggaaccccgtacttttgagtctttagtggaaattgcgaaaaaatatgatgaaacaaattttaaactagaataaaattttatttaataagttttcatgaataagcttacccaattcttagaatttactagattggtgcaaattttgtacagattttattgtatatttattaattttgtaaacaaaaataaattatttgtttttatttagtat

SEQ ID NO: 2073 - DNA, 1376 bp, Zea mays
  Clone ID: 700201996_FLI
gttcttttcccaaataatggtggagaatttgtctgtcctgcgcttctcaaatctcggttttgagcctctctggtcaagacaatatataagttgcacatttcttatatattgtcttgaccagagaggctcaaaacaatatataagaaatgtgcaacttatattctcagaagactttggtactgaaggacgtggaggatactttgatggctacggtattattcgagacataatgcagaatcatctcattcagatactagctttatttgctatggaaactcctattagtttggaagcagaggatataagaaatgagaaggttaaagttcttcgttccatgaagccgttgcagctggaagatgtggtcgtaggacagtataaaagtcacacaaaaggtggtaccacataccctggctataccgatgataagacagtgcccaaggatagtgtgactccaacgtttgctgctgcggcgcttttcataaataatgccagatgggatggagttccctttcttatgaaagctgggaaagctttgcacacaaaacgagctgagattagggtacagttccgacatgttcctggaaatctctacaaggggagttttggcacagatcttgatagggccactaatgagcttgtgatacgtgtgcaaccggatgaagcaatttacctaaagattaacaacaagattcctggtctcggtatgcgactagataggagtaatttgaatctccattatgccgcaaggtactcaaaggagatacctgatgcttacgagagactcctgcttgatgccatcgaaggagagcgcaggcttttcatccgctcagatgagttggatgctgcatggtcactcttcacacccctcctgaaggagctggaagagaagcggatagctcctgagctctacccatatggaagccgtggacctgtcggggcccactatctcgccgccaagtacaacgtaagatggggtgacttgagtgcggagcactacaaggcatgaaacgaagatggctatatctttgtgatattcttgcttttccatttctgtaagtttgcacgccctcgcagtgagatagatttaagagagaaaaaagatgagaataaggcgggcagttaactaggttggaaggcatgtatccattactagactgaatagctttgttggcataattgcagctgttagggctagtttgcaacctcatgtttccaaggaattttcattttcccaaagaaaattagtttatttttcctttggaaaatgagaatctcttgggaaaatttagttgccaaactagcccttaaaaatatgttgtcaaggaatcagttcatttttcacaggaacagtaaaggaaacggaaaaaaattgccgc

SEQ ID NO: 2074 - DNA, 566 bp, Zea mays
  Clone ID: 700202053_FLI
ttctcctcgcccctcgcctccctccacctgcagagagcgccacaagagcgcttcgttctagcagcagcggacgagggagacaagaggaggaagagatggcaggccgtgatggagccaagtcatcggcgtccatggaggaagaggcatgcggggagaagaagtacggaggaatcgcacccaagaagaagcctttgatatccaaggaccacgagcgcgcctacttcgactctgcagactgggtgctgggcaagcaggctgcgaacagtagcacgagggccaccgtcgagtctctgaagcccaagctgaagagaacgcctcaccaccagctgccccctcgcaagcccacctgcgcttccggttgagacgaccggacccatggctacgcgttgcagctgctcggaggtgagggagggaggacgccgaggccgagctcacataaatgtctagctggtcggaaaccgtggtagggacgaatccgagatgcaatctggcttgttggccgttgcattgcagcacctattgtgtctttatcagttcgttatcaattatctggctttaagtttggc

SEQ ID NO: 2075 - DNA, 621 bp, Zea mays
  Clone ID: 700202091_FLI
cgccatcggcgtgccggagcccctgtccgtgttcgtcaactcgtacggcaccggcacgatccccgacaaggagatcctcaagatcgtgaaggagaacttcgacttcaggcccgggatgatcagcatcaacctcgacctgaagaagggcggcaacaggttcatcaagaccgccgcctacggccacttcggccgtgacgacgccgacttcacctgggaggtggtgaagcccctcaagttcgacaaggcatcggcttaaggttgggagtgtcactgtggacatgaggactaccttcctctggctctgctgttacctgcaagcattgctgctgctggatgtgtgtgtttgatcagtgactggctgctgctccatagaagatgaacggagagaaggatgatgaagggctttggcaatcgccgctgcaactgcaacccatgccatgccggcttagtgattgggtataatttggcttggcagcagccagcattattatgtgctgatctgttatcttttactagtttggtcgtccgatatctttctttctttttccccccttttcgactctgtactgaaactgctgagagattcgcagtattgttgtatcgtattcatatgctactgtt

SEQ ID NO: 2076 - DNA, 969 bp, Zea mays
  Clone ID: 700202112_FLI
attttagccgccgccgctgctcatctcacatccctcgagaagacgcctgctcctcgccgatcgatacgatggccgtcttctccgacctccacaccgccgacggcctcaagtccctcgaggctcacctcgccggcaaaacctatgtgtctggtgactccattactaaggatgacattaaggtcttcgccgcggtgccgtcgaagcctggcgctgagtttcctaatgccgcccgctggtacgagaccgtctctgcggctgtagcctcaagattccctggtaaggctgttggtgtaaatctgcctgcgggatcagctcctgcggcagctgctcctgcggatgaggctgaggacgatgatgaccttgatctttttggtgatgaaactgaggaggacaagaaggcagatgatgagcgtgccgccgctgccaaggcctcttctaaaaagaaagaaagtggtaaatcctccgtccttatggatgtcaaaccatgggacgatgagactgatatgaagaagctggaggaggctgtccgcagtgtccagatggagggtctgacttggggagcatcaaagcttgtgcctgttggatacggcatcaagaagatgactatcatgttgacaattgtcgacgatcttgtgtccatcgacactctaattgaggaccaccttacgcaagagcccatcaatgagtacgtccagagttgcgacattgtggctttcaacaagatctagagttcagtttctgagtttgggcaacggcagcggctcagctcgtcaagtttgtgctgggatgccagtttatcccttctagtctattacagaaatgttgttcggagctgagtctattataaacatcttggtctgagtttattgttgagtggtgccagtttttttcaatatacatttatcttaaaaacagcggtactgatgtttttttgtctaaagttaatgagtttgcaatggttctgagtct

SEQ ID NO: 2077 - DNA, 633 bp, Zea mays
  Clone ID: 700202142_FLI
gcgataccaaaggctatatcaaatgctggattagagtcatcccatgttgatttttttgagattaatgaagcattttctgctgtcgcacttgcaaatcaaaagcttcttgggattccttcacacatgtggggttgcaggaaaagattaatgtccatggaggagctgtgtctctagggcatcctcttgggtgcagcggtgctcgcattttggtcacccttcttggtgtccttagggaaaagggcggcaagatcggtgttgctggtgtctgcaacggcggaggtggagcatcagctcttgttctcgaactcgcataagaagcattggcttgaagcactggatatgtagttaattcagtcgcatgcatctatgcatgatgaagtattgaaaaaaaaagaccctacgatatccatgccgggtgccactgtctgcttaattcaacagaatatgattgtgcaatcattctgccgtgccgcttttgctgaccttaggaacacggcgtcggaggcgcaatcattctggcaattagcaccagctagctccctgaggggcgaccttgtactctctacattgatgtatgtgtagtgctggacattcttaagttaattcggcaataaagtgtgttgtgcttctgct

SEQ ID NO: 2078 - DNA, 1696 bp, Zea mays
  Clone ID: 700202213_FLI
gtgcaggcctgaaacccctgaaccagagaggccaccacacaggtgtatcaatatgcttcaaggttgcagaagtgttgatgagtttgagaggctcaacaaaattaatgagggaacatatggtgttgtatacagagcaagggataagaagacaagtgagattgttgcattgaagaaggtaaagatggagagggagcgagaaggtttcccattaacctctcttagggaaataaatatcctcttgtctttccaccatccttcaatcgtggatgttaaggaagtagtagttggaagtagtttagatagcatttttatggttatggagtacatggaacatgatcttaaaggtgtcatggagaccatgaaacaaccatatacacaaagcgaggtcaaatgtttgatgcttcagctgctagagggtgtaaaatatctacatgacaattgggtactccatagggatctgaagacctcaaatcttttgctgaataaccgtgggccccagaactgttgttaggaacaaaggagtattctactgctattgatatgtggtccgtgggctgtataatggctgagctccttgccaaagaaccattatttaatggaaaaacagagtttgaacagctagataagatttttagaacacttggcacacctagcgagaagatttggcctggctatgctaaattaccaggcgtgaaagtaaattttgtcaaacaaccgtataataggctaagggataagttcccagctgcatctttttctgggcgaccaatcctgtctgaagctggttttgatctattgaatagactgctaacttatgatcctgataagcgcatatcagcagacgatgctctgaaacacaaatggttctctgaagttcctctgcctaaatcaaaagacttcatgccaacatttcctgctcttaatgaacttgacaggcgtaccaaacgttatctgaagagtcctgatcctctggaagagcaacgtctgaaagaactgcaagggaacataggcaaccgtgggctttttggctgaactaagagtacttgattggattcctgtccgtactaactgttatgcttcaccctgaatccacgaggtcagatgtcttctgaggcttggtgccggtttgagtggataaggtttctccttgtggcccatcatagaaattttgttgcaggattaacactccatccagattgatcataaaagcaaatataaaccgtcttcatcgtaaggtgtgacatgttggctttgaatgggtacaccagtttcacctttggaacttctgtatgtaaaatattccagattggtacgttgtaaacaatccccagtgtgtcggatttaaatttaaataaaacatcatcattattagttttcttcatgctccttgtgccttttcttttgatctttgcattttgtttgcaagagacgaaagaagcgcaggggaaggaagccttttgcttttatcaggaaatcaatgacattaatacaacttagaaggtgaattaattgtgagatatgtccacaacaaattcggaacttgaactaatctaagctgtggctgcttcaagataggaaagtgacaatttgtggagggccttcaaaagtgttttactagtgaaccatggtggtcagtgtactatccttgtacattaatgtaaccgttcatctaagttatttggagactatttgcctt

SEQ ID NO: 2079 - DNA, 850 bp, Zea mays
  Clone ID: 700202311_FLI
agcgcacccagtcacgccgccccgccgccgccccctatataaattaatgagccaagcccgagttaaccaaattaaagaaaaaggaaattttcttgggcgttcttcggcttcattgtcacaaggttcgagttcgtcaccgtctagtacgactgtgcgagggaggaagaggcgaggagaagatgcagatcttcgtgaagaccctgacggggaagaccatcaccctcgaggtggagagcagcgacaccgtcgacaacgtcaaggccaaaatccaggacaaggaagggattcccccagatcaacagcgactgatattcgctggcaagcagctggaggatggacgcacgctggctgactacaacatccaaaaggagtcaactcttcatttggtcctcaggcttaggggtggaaccatgatcaaggtcaaaactctcactgggaaagagatcgagatcgacattgaacccactgactcgattgacaggatcaaggagcgtgttgaagagaaagaaggcattcctcccgtgcagcaaaggctcatctatgctggtaagcagcttgctgatgacaagaccgcaaaggactacaacatcgagggtggatctgtcctccatcttgtccttgctctgaggggtggttactagtctaaacctgatgaactagcagtcagataaactgttgtgttggctgcgaaatgtgcaggcctgatgttgaacttgcaaggagataataacaaattatcagctttgcgcctgtgcccagtggaaggggctgtcttccaagttattgtctgatatggaattgttccagattatcatgtctcggcgtttacccattattattatttgatttg

SEQ ID NO: 2080 - DNA, 1524 bp, Zea mays
  Clone ID: 700202346_FLI
cggtcacacgactgcataattgtgctcgctcgccgggccccgggacgtgacacatcgcacggccgaagcagcttgccggctgccgcgtttcgcctcccgcctgccgtgccgcccgtgaccgcgagaaggccggcagctttgcatgaggaggaggaggatgggggcactgcacgtcgtcggcgagcccaggatcagcttccgccagcagcctgcagcagtcgtcgcgaagaacggcggccacggcgccgtcgtcgaggagatccacggcctgatccgcgtctacaaggacggacacgtggagcggctcccggcgatcccagccgtgccctgcacgtggggcggcacggcggccccggacgcgccgggcggcgtcgtcgcgagggacgtggtggtggaccccgcgacgggggtgtgggcgcggctgtacgcgccgacgtcggcgggggacggagccaggcgccccgtcgtggtgtacttccacggcggcgggttctgcgtcgggtccgcggcctggagctgctaccacgagttcctcgcccagctcgcggcgcgcgcgggctgcgccgtgatgtccgtggactaccgcctggcgcccgagcaccgcctgccggccgcgttcgacgacgggctggccgcggtgcggtggctgcggcaccaggccgcagcgtcagcgtcagcgtcagcgtgcagcaacgacgacctgtcgtggtggcgggcccgctgcggctttgaccgcgtgttcctcatgggcgacagcgcgggcgccagcatcgccttgcacgtggccgcgaggctcgggcagggccagcttggcgcgctgccccccttgaccgtcaggggcgccgtcctgatccagccattcctgggcggcgaggggcgtaccgcgtcggagaagaacgtggcgcagccgccacggtcggcgctgacgctgcccacctccgactgctactggcggctggcgctgccggccggagccagccgcgagcacccctggtgcaacccgctgtcgggccgcgccgcgccgcgcctggagaccactccgctgcccccgctcctggtgtgcgtctcggagacggacatcctgcgggaccgcaacctggagctgtgcagggcgttgcgcgaggcgggcaagcgcgtggagcaggccgtgtacggcggcgtcgggcacgcgttccaggtgctccacaactgccacctgtcccagccgcggacgcaggagatgctcgcgcacatcaaggccttcgtcagcgccaggtagcaggcgcctccgccgcagcagcagcctcctccattcatcgttcgtccctaacaaacagacagtcgccatgttaatccactacctaatcctaatccaatcgaagagtagatgccgtgtaagcaaccagaaccagccttgtgcagtactgtatcagtagtgtgtgtgacttggagctacccacgtgttactggagcagaaagcgtccaatgcccagcccgggttgttgttcttgttgtagcggtgccggaaagcaaaagcttaaaact

SEQ ID NO: 2081 - DNA, 815 bp, Zea mays
  Clone ID: 700202431_FLI
gttttcctcactctctcctccagctcagggtccggcggcgaagggaaggcaagatgtacaccgcgaggaagaagatccagaaggagaagggccttgagccctccgagttcgaggactccgttgcccaggctttctttgatctggagaacgggaaccaggagctcaagagcgacctcaaggacctgtacatcaacaatgctatccagatggatgttaccgggagcaggaaggctgttgtcatccacgtcccataccgcctgcgcaaggccttcaggaagatccatgtcagactcgtcagggagctggagaagaaattcagcggcaaggatgtggtaattgttgctacaaggaggattgtgaggccacccaagaagggttcagctgttctgcgccctcgcaccaggactctgactgctgttcacgatggcatcttggaggatgttgtctacccagctgagattgtggggaagcgtgtcagataccgtctggatggttccaagattatcaagattttcttggacccaaaggagaggaacaacactgaatacaagctggagacctgcactgcggtctaccgcaggctgtgtgggaaagatgtggtctttgagtaccctatgaccgaaaatgcataaatatgatgccctctggatatctccactctatttcgttgattctgaatgttatgttgggtctccctatgtacttcaaaaacatagttttgatgctaaagttgcctagcaatttggtacggggaagtggcagtggacgtgaacaatgttaagttttgagcatttaaattaaacctttgccctgat

SEQ ID NO: 2082 - DNA, 838 bp, Zea mays
  Clone ID: 700202452_FLI
cctcgccaagcgcagcagccgccgcagcacatctctctctcgatctcagccatggcggaggtggagcagcaacaggacacgccgaagctgttcaaccgctggaccttcgatgatgtccaggtgaacgacatctcgctgaacgactacctcgctgtgaacgcgacgaagcacgcgatgtacctgccgcacaccgcggggcgttactccaagaagcggttccgcaaggcgcagtgcccgatcgtcgagcgcctcacaaactccctcatgatgcacgggcgcaacaacggcaagaaggtcatggctgtccgcatcatcaagcataccctggagatcattcacctgctcaccgatgccaaccccatccaggtcgtcgtcgacgcgatcatcaacagtggaccccgtgaggatgccacccgtattggttccgctggtgttgtgaggaggcaggccgtggatatctcacccctgaggagggtgaaccaggccatctacctcctcaccactggtgccagggagagtgctttccggaacatcaaaaccattgccgagtgccttgcagatgagctgatcaacgctgccaagggctcatccaacagttacgccatcaagaagaaggacgagattgagcgtgttgccaaggccaaccgttgaacggagcttgtatcctggtgcactctgcgctggaaacttttatgttactggcagtcgtatcggttcctgttttaccaatgtttagagttttttgagacctatatgcggttttggttttcagtgcacaattaaaattactgagtaatgtagttgattgggaacagaaagtgcctggtttaccgaactc

SEQ ID NO: 2083 - DNA, 890 bp, Zea mays
  Clone ID: 700202538_FLI
acctgatgagcctcgtcattctggttctggcagcggcttccggtcatttctcaaagagactgtccgcgatgtgttcgagtctgaggggattcacatccctcatagtcgtcgccatggggatgatgaccaggacgacggttacgcacagccaactggaaatggccgcaccaaaaaccgctccctgccactctcgaccctgatagagatgctcaaggaacaaactggaaaggatgacattgatgtgggttctatccggatgacgctgttcaacatctttggtgatgatgccagcccaaagattaagaagttcatgaaggtcatgctcggaaagttccaccagggccagtcaggtgagcaaggcagtggtggtggtggtgtctttggcatggttggtgcccttgctcaggagttcttgaaggctaagcttgaagggaaggaggaagaggctttcaaacctgcattagagcaagaggttcacagtgttgacgaggtgtacgccgggagtaaggcctgggcaccaaacaatggcattctgatcagtgggtgccagactaaccaaacatcagcggatgcaactacaccgcagggtgtctcctttggtgctctgagcaatgctatccaaaccattcttgcagacaagcacgggaaggtgacgaataaggatctcgtgatgaaagcacgtgagctgctgtccaagcaagggtacactcaacagcctggactatactgcagcgatgagcatgttcatgtcgctttcatatgctaaaacttggattgttacagcgattgctttcctccatccttttgtgttgatcggtgcaccagaggttgatgtttttcttcccatgtatgttacagctatattgtatcagtgtttgttgcttgaggat

SEQ ID NO: 2084 - DNA, 1265 bp, Zea mays
  Clone ID: 700202543_FLI
gacaaataaaaaagaacggagggaatatttcgttggacaaaagtagcggcaaagcttttttccttcgtctgatgcttttcttttgtcatttttcatggaaaaagttcagtgtcaaaattcttgtttcaatctgcagatcaggatttcagggaactcgtgcagaaggtccctgaaggttgcctattcaccatcgtctctgactcatgccatagtggtggcctgctggacagtgctaaggagcagataggtaatagcaccaagcagaataagacccagtcccgtgaacctgatgagcctcgtcattctggttctggcagcggcttccggtcatttctcaaagagactgtccgcgatgtgttcgagtctgaggggattcacatccctcatagtcgtcgccatggggatgatgaccaggacgacggttacgcacagccaactggaaatggccgcaccaaaaaccgctccctgccactctcgaccctgatagagatgctcaaggaacaaactggaaaggatgacattgatgtgggttctatccggatgacgctgttcaacatctttggtgatgatgccagcccaaagattaagaagttcatgaaggtcatgctcggaaagttccaccagggccagtcaggtgagcaaggcagtggtggtggtggtgtctttggcatggttggtgcccttgctcaggagttcttgaaggctaagcttgaagggaaggaggaagaggctttcaaacctgcattagagcaagaggttcacagtgttgacgaggtgtacgccgggagtaaggcctgggcaccaaacaatggcattctgatcagtgggtgccagactaaccaaacatcagcggatgcaactacaccgcagggtgtctcctttggtgctctgagcaatgctatccaaaccattcttgcagacaagcacgggaaggtgacgaataaggatctcgtgatgaaagcacgtgagctgctgtccaagcaagggtacactcaacagcctggactatactgcagcgatgagcatgttcatgtcgctttcatatgctaaaacttggattgttacagcgattgctttcctccatccttttgtgttgatcggtgcaccagaggttgatgtttttcttcccatgtatgttacagctatattgtatcagtgtttgttgcttgaggatatgtttcaatggactatgtcaatattgaaataacttttgagaaatgtttctatatatgaataatatacacacttgtatcatgatctgtacc

SEQ ID NO: 2085 - DNA, 812 bp, Zea mays
  Clone ID: 700202569_FLI
ggtacttgattctagcttctgccttccgattggaaaggctaagatagagcgacaagggaaagatgtcactatcactgcattctccaaaatggtgggatatgcccttcaggccgctgatatactggccaaggaaggtatcagtgccgaggtaatcaatcttcgctcaattagaccgctggatagagctactattaatgcatctgtgaggaaaaccaatagattggtaaccgtagaagaaggcttccctcaacatgggattggtgcggaaatatgcatgtctgttgtagaggacagctttgagtatcttgatgcaccagtcgagaggattgctggagctgatgtgcccatgccgtacgctgccaaccttgagaggatggctgttccacaggtcgatgacatcgtccgggcagccaagcgtgcttgctacagggcagcagtaccgatggcagcaaccgcctagtccagcagaaccctgcatgttgcatttctttgtctaattttaatgtccgtgctccagaaagacgtgtcgcataatggtgtgacgagtacccactgccgctgcaactcaactatagcatgagctgagtttttgtagagccaccgagaggtgttcagtactccagttccagttccgcttatcttcgccgccgcagccggaaggctgcgcgtgactctgcgtctgttttatggttcacgaatgattgcagatttgcagcagagcctctggagatgagaattttacttgtggcgagatgttgtgagtaacttgtattcagaagggggaactctcaagagatcctcaagtcgtgatt

SEQ ID NO: 2086 - DNA, 897 bp, Zea mays
  Clone ID: 700202902_FLI
gggtgcagagcaacgtgcaggcgttcccgtcggtcagcttccgctacatcgccgtgggcaacgaggtctccggcggggacaccggcagcatccttcccgccatgcagaacctcaacgcggcgctggccaacgccggcctgggcggcagcatcaaggtgtccacggcggtgcagagcgacgtcacccagggcttcccgccgtcgcagggcaccttctcgcagggctacatggcgcccatcgcgcagtacctgcagagcaccggcgccccgctgctgtgcaacgtctacccctacttctcctacatcggcaacccggcccagatcgacctcagctacgcgctcttcacctcgccgggcaccgtcgtgcaggacggcagcaacgcgtaccagaacctcttcgacgcgctcgtcgacaccttcgtctccgcgctcgagaacgccggcgctggcaacgtccccgtcgtcgtgtccgagagcggctggccgtccgccgggggcgacgccgccaccgcggccaacgcgcagacctacaaccagaacctcatcaaccacgtcggccagggcacgcccaagcgccctggccccatcgagacctacatcttcgccatgttcaacgaggaccagaagacgggagccgagtcggagaggcacttcggcctcttcaacccggacaaatcgccggcgtaccccatcaatttctcctaattcctaaacaagacggcgaggtccattccaagacatttataaggcaatacacacacatagatatatatatacacatacatacgggggaaaactgaataaataaactgcctgaagtagaatgcaaagtgtattcatgtaaggcaactgcttcgattatttcctaaagatcaataacaagaagtggatttatttc

SEQ ID NO: 2087 - DNA, 752 bp, Zea mays
  Clone ID: 700202950_FLI
gtttgatccccgcggggagctctagttccgccaagcgtgcgtaccggcgtccggatccgggaccgaagatgacggagtccctggtgcggaacaagccggggatggccagcatcaaggagatgccggtggtgcaggacgggccgccgccgggcggtttcgcgcccgtgcgcttcgcccgccggatccccacctcggggcccagcgccaccgccatcttcctcaccaccttcggtgctttcgcatatggcatgtaccaggtcggccaggggaacaaggtccgccgggcgctcaaagaagagaaaattgctgctcgcagtgctatactgccgatgctccaagcagaagaggatgaaagatttgtcaaagagtggaagaagtgtcttgaggaggaggcgaggatcatgaaagacgttccagggtggaaggtcggcgagagcgtgtacaactctgggaaatggatgcccccggctactggtgagctccgccctgaggtttggtaagggcctgttgcaggcactgaatgccatcatgtcacgggggcacggataaagcttcatttttcattaaggatcagctgtttaaagacctgtatttgttgtacttgaaatctggctggttaataattggacatgtaaagccgacgtttacattgatgtaacgtgttcttgtctgctattgcttcccagcctctggtgtttcttcctgtaagtcattccgaacatgaatccttgttattgaagaaagtatgaaat

SEQ ID NO: 2088 - DNA, 956 bp, Zea mays
  Clone ID: 700202956_FLI
cccaaccccatcaagtctggccaggtctctcccatatcgggttctcccttcctcttcctgtttccgcgcgcgagatcgccgccccgggtgggccctagatcccgatggcctcgcgccgccgcaccctgctcaaggtcatcatcctcggcgacagcggggttgggaagacgtctttgatgaaccaatatgtgaacaagaagttcagcaaccagtacaaggctacgattggggcggatttcctcaccaaggaggtgcagttcgaggacaggctcttcactctgcaaatatgggacactgctggtcaggaaaggtttcagagtcttggcgttgcattctaccggggagcagattgttgtgtcctagtctatgatgttaattctatgaaatcgtttgataatcttcacaactggcgtgaagagtttctaattcaggcgagcccatcagatcctgacaatttcccttttgttctgttgggtaacaaagttgatgtagatggtgggaacagccgtgtggtgtcggagaaaaaggcaaaggcatggtgcgcctctaaagggaacatcccgtactttgagacgtctgctaaggatggaacgaacgtggaagatgccttccagtgtattgtaaagaatgctctgaagaatgaaccggaggaagaattcctcggtggccagcctcttgattatttacagaatgacagcacatcctcgttgcttaccatagaccatcacctgcatacaggaaaggaaatctaacgaagttaatttgtctttgttcggcgatcagcagcattggctacaaaaggattatttctcactatcagggctgctactgccgtgcaaccttgctgccagtctttttggattatcatttttgacctccagtgaacaatgcttgagaaataattgctgctgtaagttgttgttcagtataagtcatttcaataacagtgtctggct

SEQ ID NO: 2089 - DNA, 797 bp, Zea mays
  Clone ID: 700202976_FLI
gcgcagccacatgggcctgattcagcaagatccagttattttctcaacgacaataagagagaacattatctatgcaaggcacaatgcaaccgaggctgagatgaaggaagctgcaaggatagcaaatgcccatcatttcatcagcagcttgccacatggatacgacacccatgtgggaatgagaggggttgatctgacacctggacagaagcaacggattgccatcgctagggtggttttgaagaacgcacctatattgctgttggacgaggccagctctgcgatcgagtctgaatcgagtagagtggtgcaagaagctctagacactctggtcatgggtaacaagacaacgattctcattgcgcacagggcggcaatgatgaagcatgttgataacatcgtcgtcttgaatggcggtaggatagttgagcagggcacacatgactctctgatggaccagaacggtctatatgttagattgatgcaaccccattttggcaagggccttcgccagcatcggctaatgtaattattcttttgagtttgtttaggtgtaaattatcctaggggatgatcaggtttccttgtgcggccactcagtcaggggcccttttcggcacatgaaaaatgctgggagttgccgccctgttgctgttccgagtaagccgacctggtcttcttgacaaaaaaataaaaaaaaatagcttgcagatccaagtaattctggaaatagttagcaagtttggagggcattgtaattgttgtaatatatgagctgaaacattctttcagaggct

SEQ ID NO: 2090 - DNA, 496 bp, Zea mays
  Clone ID: 700202992_FLI
ccgcgatgcaccatgacggcacgcctgacctgagagtcgtggcggagaagctggccgacaacctcagggtcagggacacgtccttggacacgaggaagatggtggtcgagatctgcgacatcgtcaccgggaggtctgcccggctggccgcggcggggatcgtcgggatcctcaggaagatcggtcgagcggcgccaggcgacgagcgccggtcggtcgtcgccatcgacggcggcctgttcgagcactacgccgagttcaggaagcgcctggaggccacgctggtggagctgctcggggaggaggcgtctaggctggtggaggtgaagctcaccaaggacgggtctggcctcggagccgccctcattgcagctgcccactcgcagtactgaacgcccaacggccgtgtgtgtcggtgtgcaactcgtgctgaattcctgtacgttttcaagaacaagtttgctcggaatctgccaacaagcaagtgttctaatgg

SEQ ID NO: 2091 - DNA, 886 bp, Zea mays
  Clone ID: 700203005_FLI
ttccctcgctactcgctagtcgccacttctcccgttgccccccgcgtctctcttctcgttgcgacgactgggcgatccctgccgccccccgtctcccgctccccgccgccaggtgcccaggttgtcgccgggcccttcgccggcgatgagcacccaacaggaggttactgagaactacgcaaatcctaagacatgcttcttccatgttctcttcaaggcatcggcattggcgttctacatactgtccacactgttcgtgaacaacttcgtcatcatctttgtcatcactgtgctcctcgcagcacttgacttctgggtcgtgaagaatgtcagcggaaggatactggttgggctgcggtggtggaatgagattaacgatgagggagagagtgtctggaagtttgagtgccttgatggagagtccctggctaggatgaataagaaggactcatggctgttctggtggactctatatttgactgcggctgcatggattatacttgggatattctcgctcatcagacttcaagctgattaccttctcgttgttggagtttgcttgagcctcagcattgcaaatattattgggttcaccaaatgcaataaagatgcgaagaagaacatccaggattggacaaggaatgcacttctatcaggtagtgtcagatcgcatctgcagtcagcatttggtgtctgaacaataacctatgaccttgttatacgtgtagtgctgtataatttacagataacatgattggttactagagtgcgtctgtttttttttttgttggctatgtgcatcttgctaggcagagtcggaagaacattttcagagccgtgtatcaactcgatgtataatgcagtttgaataaaatcttcctttaac

SEQ ID NO: 2092 - DNA, 3389 bp, Zea mays
  Clone ID: 700203022_FLI
ctctcctccgctctgctcctttgctccccacggcaaaccgtaaaccctagcctgaggggcacccctgtcgcagccatgggcgcaagccggaagctgcagggcgagatcgaccgcgtcctgaagaaggtccaggagggcgtcgatgtctttgacagcatctggaataaggtctacgacactgagaatgccaaccagaaggagaagttcgaggcggacctcaagaaggagatcaagaagctgcagcggtacagggaccagatcaagacgtggattcagtccagcgagatcaaggacaagaaggctctgatggatgctcgaaagcagattgaacgagagatggaacgatttaaagtatgtgagaaggaaacaaaaactaaggccttctcaaaagaagggttaggtcagcaaccaaaaacagatcccaaagaaaaggccaaagctgaaacaagagactggcttaataatgtggttagcgatttggaaaaccagattgataacttcgaagcagagattgaagggctttcaattaaaaagggaaagcaaagaccgcctcgattggtacatttagagacgtctattacgagacataaagctcatataaagaaattggagtcaatcttgcggcttttggataatgatgagttgagtcctgagcaagtcaatgatgttaaagattttcttgatgactatgttgaacgtaatcaggaagacttcgatgaattcagtgatgttgaggacctctatagcacattgcccatggagaaggttgaagcacttgaagacatggtttcacttgctccttctagtcttgtgaagggtgttgctcctgtttcgactactgcagttttgagcacaaagagttctgttgcaacttcacctactcagcctacagtatcaacagcttcttcacaaagtacatcacaggatcaaacagaggagacagcttcccaagaaagcaatcctgaatctacgccacaaacaccacctccaaaaggtggaaaccctggaccttcagtaccagctgtgcccattgttgtcagtactggtagtgcggctgtttctgtacctgcagaaacaattagttcccctgtgcgactaactgtacccgccacagcagccgcagtgctttcttctgctattccacgaagtgctcctgagaatacacttgctgttacctcaattcctgcaaacttatctaccactttgaaggatgatgaaagcatgagtgttcctccacggcgaccatctcctgctattactgaaattggaattggcaggggcataactcgaggaacaactagtcaggcattaggtacagctcccataactattggtccagtctcaggaaatgtatcggttagtgcacttcctgcaataaatgacttgtccaaaataaatatattgaacactgacgagaagattaacagtggtggtctttctcagcagttggttatgcctcttggtagtaaagttcaaccccagcaggttcccaggactaatgatgcaatcggctctgattctgctaacacaaatgaaaaccctattcttggtggaagagtattttctcctccagttgtttctggggttcaatggagacctcaagctgctgctgcatttcaaaatcaaagtgaaactgtatgtatctcttcagttaatttattttattatatagttcaactgcctggcgtattggtgagatgccttcccggtgagcccaaggtcctgtgtttgacccagcctctctaaaaaaatgcgggggtaaggtttacctcggttatttcttccccagattccactcatgggagctgccagtactgggtctgtcctttttatatagtccaattggccttcttcatttaatctgatttattaatagcaaatgctccatccagccaattttaagtgatgttctggaatatttctccctcggttaaaattatagggtgtattagtaggaacgggaacaatagttaatggtatgaaatcaagtgaatgagggaacaagaattaccaagctaccccaattccagtacactggagacatatgatagaatagtcagtgcatgcaggtttttgtgataaatggaagcaatataaaaagaaaggaggtatcaatttagttttcaagtcaactttgttcaaaatatcgtttttttactggagttgatcaaacatgtgtaaggttattctgaattcgttcttggttttgtgtgaattgttaatgttcctgtgttcaatgcttctgtttgtgggcatccgaataatccaaataactgatgcttttctactgaaagaacatttattttgaattttgatttgataattcctcattgggctcacaaatacttgtttgcctatatgacattttttctcgctgtatttccagaatcagtatcgtggaaggcctgagatttctgctgatcacagggagaagtacatacagagactgcagcaagtacagcagcaaggtggcagccttctgaatgtttcccatataactggcataaatcagaagcaatttccaacaccgcagccaaatccccttctacaacagtttaattcacagagttcctctatatcttcccaagtgaatcttgggcttggagttcaaggatcagacgcggggcatataaaaagtgaagatcaacaaattttggctgaagatgttggtgtggaatcttccgcaacaacaggagcaaataaacaaacaagtgaagatgacacaaagattccatattcggtatatcaagcttttgcactgttcgagagaaaaaaaaacttttgtacatgtcctcaaacttttatttgcacgcatctgctcatgaaacggttttggctgtgtgctcagtttgtttcttccaaccgcgtcagatgtttgagtttagctaattagaaaaacaaactaacatgcaaagctgaagttaccaaacagttataaaatcagttcgattgttactttgtttggaattctacgcaaattccttttgaaatttgggagcaggggtaattacagttataattttgctacagcttgacttatccttaaaataggcaaaagcttctcagtactgtcaataatgcttataatgtgtatattattgaaagggaagtatgcgaggaactataaatacataaacatcaaggaacatgttccatgtttttttctttaaagcaatatacaaaatatttgtaatttttaggattttgtttgccactgagatttggaaaacacgatatatatacacagatgctatggtccttgcaaaaccataagtgggaactttttctcgaaacacgtaggagaactgcacccattatatattaagcaaatagagaaaaggtctatagaagacccaataacaaaagaaaaagaaaaaaagaaagaaacc

SEQ ID NO: 2093 - DNA, 603 bp, Zea mays
  Clone ID: 700203027_FLI
cagctgagggagctggcgattctaaatggcacactgagagaggaaagcccaagccctcacctcagccctagtgtgtcccccttcaactccaccgggatgaagcgcgcaaaaacagggcggtaatctctgttccgaaagccttcatccccccaaatcaatcatggttcaatgcccaattattacacaagctactgctggagatgattggtgatgcatatgctgggatcatcagtgatggcctatgcctgtcatgatctgtgcgctttatcgacaagcacacaaacatgcctgtgctgtgcttggacgaatggtctccgggcttgttgtttgactctactattatttattctttgtgcttctgactgcctaagtattattaacattattggtttgggaaagttaacaaggcccggttggccagtcgctgtagaaagcttggggagaggaggggggggggggggggtgtcaatgtgacggacaataataaggtttcgttggtgtacctgagatagttgtaatatgtcatgtgctgatgcttttgtgtggtgctagtacaagacaaccagacagctatagttgaggcaatgattattttgcgttcat

SEQ ID NO: 2094 - DNA, 1500 bp, Zea mays
  Clone ID: 700203055_FLI
ggaggccctcatccacggtggtggcgccgccagcgccggcggcggcgtcgatccgggcgtgatcatcaagaacgacgtcgcgcaggcaaagtgggaattcgcagtcagtagggagcaccggcactgactcgagctcagctcagaacacaatgtctcagatggagttggtgtccccagcctcctctgcgccgcggcaggaggtcatgatggtgaccactgatgattacagctacaagccaggcctcgccgctgcgcccgctgctgccgccccgccgagctttcagcagcaccacccgctcccgctgcagctgcacggaggagagggagggggagaccatgacaagacggaacggcggctggcgcagaacagagaggctgcgaggaagagcaggctgaggaagaaggcttacgtgcagcagctcgagactagcaggatcaggcttcagcaggtcgagcatgagctccagagagcacggtcacagggcctgttcgttggagggtgcagcgccgccggggacatgagctctggcgccgccatgttcgacatggagtacgcgcggtggcttgacgacgacaccaagcggctggcggagctccgaggcgggctgcaggcgcacctgctggacggcaacctgggactcatcgtggaggagtgcatgcagcactacgacgagctgttccagctcaaggcggcgctcgcgcgctccgacgtcttccacctcctcaccggctcctgggccacccccgccgagcgctgcttcttctggatgggcggcttccgcccgtccgagctgctcaagatcctgataccgcagctggacccgctgacggagcagcagctgctggggatctgcaatctgcagcagtcgtcggagcaagcggaggaagctctcgcccagggcctgcaccagctgcaccagtccctggccgacacagtcgccgcgggcacgctcaacgacggcgccgccgcccccaactacatgaacatcatggccgtcgcacttgagaagctcgccagcctcgaaaatttctatcaacaggccgacaatctaaggcaccagacgttgcatcagatgcgccggatcctgaccactcggcaggctgcgcggtgcttcctctccattggggagtactacagccgcctcagagctctcagcaacctctgggcttcccgtccccgcgagtaagattcagacttgatcaactgcaaaaactggagtttattgttgatcaactgcactgtagttgttcccaactcccaagcatgccttaatcacatgtattccttcgggtttttttttgaaagatagaaccacttgttttcagatttcattaggccttgttcgtttgtgccggattggtgggtcggaacgattcctagccggattgcttctctaatttatataaactttgattagctggaacaattccgggtgcaatccgatagaaacgaacaagaccttatatgaaaagtcagaaatggacatggctgacactggc

SEQ ID NO: 2095 - DNA, 1129 bp, Zea mays
  Clone ID: 700203093_FLI
gggagttgtatgttggcattccaccaggtgtcgagtctcggctggcagcgctgacagttgacaccgaggagctccagaagctatcaggaatcagggcaggtgcagatgtgccagcagctctgctgaacaacatcgcgcagatggcgtccggtgtgcccgctattttcaacacgctaaacgtccgtcgggccatcatccctgccgccaacggccactgctctgcccgcgcgctcgctcgatactacgcggcgctagcggccggcggttctgttcccccgccgcactcttcgggcgccatgccgcccctcggcagccacgtgcacacccccaagttcccgaccgcgccgctcaagaagaagaagaagggcgccggaaagaagaagggcgccggcggcggctccatgggagacctcaaggtccaggatataagcggcggcagcagcgacaggaacgggtactgccagctgcgcaccagcgacgccgacagcgaggcggggagcggcagcggcggaggcggcaggatgttcggcagcgacaggatcctcgacgcgttcatgggcgtcggcgagtacgagggcatggcgcaccgggacggcaagttcgggctcgggttcaggaggtacgacgacgccggcagcggcagcggcaggctgaggtgcttcgggcactccgggatgggcggctcgaccgggttctgcgacgtggagaacggcttcgccatcgcggtgacggtgaacaagctgtctctgggcagcgtcacgcgcggcgtcgtccggctcgtcctcgaggaactgggcctgcccgtgccggacgagtactcggccaccggggagaaggggcctgacatgatgctcaacctgacgacaacgacgacgactacgccgccgcaactgagatgacgacggcgaaactgagattaccaggttgggttcgtaataatctgtggaacgagatatatagcgagcagaaggaaggtggggtacagggatttggtggacagtatatatacgcgtgccattttgattttgacgtggcatgtaaaactcggcaaattctggtatattacgaagcaagctgggtgctgggaattgtggccagcagtacaagaaatggacatgctagtttgttg

SEQ ID NO: 2096 - DNA, 664 bp, Zea mays
  Clone ID: 700203110_FLI
ccctctcctcgcctcctgcatcggcgctctccaccgccccggccccttcctccaccaccgcgccgccgcctcggtccacttcctcgcgccgcgcaggaagacccgaccgccccccgcgatgagctggcttgggaagctgggcctgagcgggcttggaggcagcccgcgcgcgtcggaggcgtcggcagcgctggcgcaggggcccgacgaggaccagcccgcgccggggaacgagttcgcgcaattcggcgccggctgcttctggggcgtggagctcgcgttccagcgcgtgccgggagtcacgcgcacggaggtcggctacagccagggcaacatccacgatccgacctacgaggacgtctgcaccggcaccacaaaccacaacgaggtcgtccgcgtgcagtacgacccggccgcctgcaagtacgacgacctcctcgacaccttctgggcgcgccacgaccccactactcccaaccgacagggcaatgatgttggaacacagtataggtcagggatatactactataacccagagcaggagaaggcggcaagagagtccctggagaagcagcagaagcttctgaaccggaagatcgtcaccgagatcgttccagcgaagaggttctatagagcagaagagtaccatcagcagtacctggag

SEQ ID NO: 2097 - DNA, 1628 bp, Zea mays
  Clone ID: 700203210_FLI
ctcgtctgttcagtcttcagagctgggttcggtctattcctcatcctctcttgttgatccggagtgccttaagttttggccgtcttgttactgtctgctgttccacagtcgacgaatcacgaatgctaatggaggaagaatgcgtagaggcaccgtcgtacatccacattgacagcaacgctttctcctacagaaagcataagagtcagacagaggaggacatagctgtgtgtgagtgccagtatgatatcttggatccagagagtccatgtggagaccggtgtttaaatttattgactaacacagaatgcacgcctggctattgccgttgtggtgtgtactgcaagaatcagcggttccaaaaatgtcaatatgccaggacaagacttgtaagaactggagggcgtggatggggccttgtggctgatgagaatattatggctggtcaatttgttatcgaatattgtggagaagtaatatcatggaaggaagccaaacggagagctcaagcttatgaaacccagtgtttaaaggatgcctatatcatttacctcaatgctgatgagtcaattgatgcaacaagaaaagggaaccttgcgagattcatcaaccattcatggaggccacgtacctgtgggaagatgatgatgacaggttttctgttgagaatatccctctttacgattctgctgatgacgaacctacaagcattaacaaggaaatcctcgtatcaagtgatggcatggttacccaatacagcaacatcagcagagtacagagtaccgaaaatcctggaaacactggaacaaatgaatttgcgccaattatcgtcgacgaactgacaacaagctcaaatggattagcaccaatgaacgttgaaccattgactgtaagctcaaatgagttcacgccatcgaacgccatgccaatggtagctcgtctagtcgagaatgggtcaactggatacagcgcacaggacactcacgacgcttctcagaattcagcgcccaaagctgcaaatcacgcgaaccaaactggacctcagaacaacagcaaccattcaacgttggtccctgtgaagcccgcgccgaaacgccgtggcaggaaaccgaaacgcgttgtgcacaagcagctggacatcccagatatctgcgaccggcttacatcgtctgtggcgtgcgaagaaatactgtactgtgaggaagtgaagaaccatgccgtttctgaaatcgatgccctgtacgatgagataaggcctgcggttgaagagcacgagagggacagccaagatagcgtctccacaagcctcgcggagaagtggatcgaggctagctgccgcaagtacaaggccgaattcgacctgtatgctgcagtactcaagaacgttgcctccactccactacggtcgaaggatgatgtgggcccaagagagcagaacgggttgaagtatctggagaacggctcatgatttcttttagctagaagcgtggaatattacgtacgccttcaatttgtagtatagggattgcattttttttaactgtggttggtcttgtatttaggtagaggcattgtaaggttacatgattttaaatagcgtggaatcatgtcaaacgcacatttgatct

SEQ ID NO: 2098 - DNA, 1118 bp, Zea mays
  Clone ID: 700203222_FLI
gcggcggcgacaagacacaatggggtgccggtcctgtgacaagcccaagatgaactaccgcaaggggctgtggtctcctgaggaggaccagcggctcagggactacatcctcaagcatggcctcggctgctggagtgctgtcccggcaaaggctggtctccagagaaacggcaagagctgccgcctgcgctggatcaactacctgcgccctggactgaagcgtggaatgttctcccaggaggaggaggacgtcgtcatcgatctccaagccaagctgggcaacaagtggtctcagattgcgatgcatctgccggggaggaccgacaacgaggtgaagaactactggaactcgtacctcaagaagagggtgatgcagcaggcccagggcgcgtcgtccaactccagccccaagagcccgcccgagctcacctccatgagcaccaccgccgacctgtcgtccatgtccatgcccatgcccatgtccatgcccatgcaccagcgccaccacgtcaagaacaacagcggcggcggcagcaccacgacgtcgcacgaccagcaggacgacgccaacatcagcggcagccgtgcagcgctgtcggccccaccgccgccgcccctcgcccagcagccattcgagcaccaggcggctaggagcttcgtgttctcggactgggcgccggagagctactcgctgtccacgcactggcccgccgccacgtcgacctctggcaacgtgacgccgtcccacggcagcgccgccgccttcggggaccagatgagcggcacatacggcgccggcgggctgccgccgccgcaccaggatcaccaccacagcgccgcgcccgccaccaccggcatcgcggggagtggctactttgacctgctcaatatgggagacatctacggtggattcagctcgacaaacaacgatgatctgctcttctgaactcaactgacgacgatggaggcgtgatcagtgttgtgcatgagtgagtcaaatgcagcggtatattgttggatttgttgcttcgtcttcttcttttgtacgtattttgtaacaaaattattatttgtaacaacattattaattgcgatgtagagaacacaccctaggctgg

SEQ ID NO: 2099 - DNA, 1050 bp, Zea mays
  Clone ID: 700203232_FLI
ctcatctgtccgtacgcgactcgccgcaggaagagggccgcgggcgacgacctctcgtcggcggtggacatggatgtcgacgccgacgcgcagcgcgccacggacaagctgaaagcagtgtcagaggcacttgggcatgagatccgggttttttcaagtgagaactttgcttcacaaaccagcaagttgcctagtgcagatcatgaggaagatgacgacttttatgagcttcagcctgctgattactacaacttgatttcaaacaggatgggagagcactttaaaatgctgaagactcgcaagatgcgggaagcagaacttgctgctcagcgagcaaagagaacaaaaacagtaatgagggtgcgtttcccggatggctacatccttgaggctgactttattccatcagagaggatacatagtctagtggacctgctcttgaaagtacttgctagaccagatctgccattctatctttatacagtacctccaaagaagcgaatactggacacatcacaggacttctatacagctggttttgtccctggggctaatgttcatttttcttatgatctccctgaagatgatctaaaagcaggaccctttctccgcgaagaaattctaagtttggatggattgtcacttctgctgaaacctgctagtcaacctgatgattctagaatgaactcttcttctcttcaatctgatgcatctcaatctgttcctgtaccaacaacaacaaataagaagcctggcagaccaaagtggctgaaaaggtgataccactccaggtgtcaagtgtgtgccatcaacacagaatcactctgttaggcttctaaacactattaatggccgaacaagctcaaatctgaacaggctacactgctgtagtacaagaattggatcctctgcttacagaagctgcaggggcattagaaatagaatcccaccttttttttctaggtgggagccaagtagcatgtaaatttgaatgtgtcgcgactcatcaagtcatcagaacagtgctccgctgtggctaagcactttgtc

SEQ ID NO: 2100 - DNA, 825 bp, Zea mays
  Clone ID: 700203247_FLI
ctttgatgaacatggtcttaaacatgacaaatgtgtgcaggccttacaaagaagcatgttgtgccatactgccatcccgccggaaaatgaccagtggtccacgattcatcattcagaccggtccactatgtacagctagctccatccctacaactacgtagcttcgttgccctccaaagttccaaaaacaagaagcccagaaaacaaaaggagggcatctcctgcaacgccaccaccggccgcgtcaccgacctgaccgtcttcgcgctcaacatctcggcgccggtcccggccgccatcgccaacctcaccgcgctgcagagcgtcaacctggcctacaaccagctgtacggcagcatcccggcgttcctgggcccgcgcgcgctgccggacctcaccttcctccgcctcgacggcaaccggctctcgggcgccatcccgcccacggcgaccgtcttcaacctcctcctcgtcggcaaccgcctcacggggccgatcccggccgccttcgccggcgcggcgttcggcgacgtggagctctcggacaaccagctcacgggcgacgcgtcggcgctgttcggcgccgagaagccgctgaacgcgctgtccctgtcgcgcaaccggttcaggttcgacctcggccgcgtggagctgccggaggcgatggacatcctggagatcgaccacaacatggtgtacgggagcatcccggccgccgcggcggagaggaagtggctggcgttcgacgtcagctacaaccagctgtgcgggcccataccgcaggggcggtacacgcaccggttcggggccaagcacttcgctggc

SEQ ID NO: 2101 - DNA, 836 bp, Zea mays
  Clone ID: 700203248_FLI
agaaaacactagcgtttcctcaccagggcgtccatcccagcagccatggcgatggcgtacaagatggcgacggaggggatgaacgtgaaggaggagtgccagcgctggttcatggagatgaagtggaagaaggtgcaccgcttcgtggtgtacaagatcgacgagcggtcgcgcgccgtgctggtggacaaggtgggcggccccggggaagggtacgaggagctcgtggccgcgctgcccggcgacgactgccgctacgccgtcttcgacttcgacttcgtcaccgtcgacaactgccagaagagcaagatcttcttcatcgcctggtcaccggcggcgtcgaggatcagggccaagatcctgtacgcgacatcgaagcaaggcctgcggcggctgctggacggggtccactacgaggtgcaggccaccgacccctccgagatgggcttcgacgtcatcagaggccgcgcgcaatgaggcccgcgctgcgctctgctcctatttacgtacttacctgtgcgtgggcgtgttctcctactactcactgctcagtagtcatctgcgttcgtgtgtgtgtgtgtgtgtgtgatccgccggatgctaattggcgtcggtgtgctcccgtagcgatcgatgcggccaatctgacgaggcttcgcgtgtgtttgctttgctattttcggttctcgggagagatggtgcaggcgtggtgtgttgatgttgatgggtggagtagaagctcaggggagtggcagcggactaatgaaacgtccacctctgcgacgtagaattccactgaaaaaatgctccagtgtaccataagctgcttcagattt

SEQ ID NO: 2102 - DNA, 1193 bp, Zea mays
  Clone ID: 700203252_FLI
gacgatattcatgtcggctttgatgatattggcggtctggatatgatcattgaggaactgaaagaatccgtcatctatccattgacaatgccccatctctaccagcatgccgcttcattgctgtctgcaccgtctggcgttttgctatatggaccgcctggttgcggcaagacgatgctggccaaagcccttgctaaggagagcggcgcatcatttatcaacctgcatatatcaacgctcacggagaagtggtacggcgattccaacaagatagtcagagccgttttctccttggctcgcaagatgcaacctgccatcgtattcatcgatgagattgatgccgttttgggcacacggagaagtggcgaacatgaggccagcggtatggtgaaagccgaattcatgacattgtgggatggactgacatcaagcaactcttctggcataccagcgcagatagttgtgcttggtgccactaaccggatacacgacattgatgaagcaattcttcgacgaatgcccaaaaaattccctattacgctacctgcattggagcaaagacgccgaatcctacaactaatcctgaaagacgctaaggtggatgctgagcattttgacttggatcatgtgtctagactcaccgccggcatgtcgggaagtgacatcaaagaggcttgtcgtgatgccgctatggctcctgtgcgagaatatatgcgacagcacggccgtgatggctctaaaaggccagttgacccagctgatttccgtggaatcaggactgatgatttccttaaacactcgaccgatcaatatatgatagaagtgcttcagcaacgacagaggggatccaacatcctagcaaatgatgtgctcgcagagattgacgagacatttgttgagccccaagactgagcctcgcacgagtcccatgcaagcagcagcgcctcatattacattgcaagaagtaatactccccttttacttgctcgttatagtttgcttttagttgttggcgtattcttttcacgccggcgagcgtatacgtcacgaaatcacccttcgtctgcttaaaggagcccttttagtacttctgatgttaaatagacagtgaaatagcgccctggcggtactttcaggacacacatatataacgaaacacgtttgtaattaatataagtgcctatcgggacttc

SEQ ID NO: 2103 - DNA, 1648 bp, Zea mays
  Clone ID: 700203256_FLI
gagcgacatgaggctcagctctgtccggcctgttgacccagatgcatggtgtatttaacaagcacacaatcccgccacccactgcacccatggcctctcactcacgttggacatggatcatgctgcatgcatcttcttaaccacctgactaatactgcctctttgtgctttatttctccacatactactaccggcgcaaacgctgtcatggcagcgcttctggcgatactaatgcacctcctggtcccggcgctgctgctgatgagagtcgtggcagtggtggcggccggggcaccgccgttctcgtgcggcggcggcccgtcgctggggttgccgttctgcaacacgaagctccccgctgctcagcgcgcggcggacctagtgtcgcggatgacacccgcggagaaggcgtcgcagctcggggatgtcgccaacggggtgccgcggctgggcgtcccctcgtacaagtggtggaacgaggccctgcacggggtggccatctcgggcaaggggatccacatggaccggggcgccgtccgctccgccaccagcttcccgcaggtgctgctcaccgccgcgtccttcaacgacaacctctggttccgcatcggccaggccacaggcaaggaggctcgcgcattctacaacatcgggcaggcggaggggctgaccatgtggtccccgaatgtgaacatcttccgggacccgcggtggggccgcggccaggagacgcccggcgaggaccccgcggtggccagccggtacgccgccgcctttgtccgcggtctgcagggcagcagcagcaacacaaaatcagtgccgccggtgctgctgacctcggcgtgctgcaagcacgccacggcgtacgacctggaggactggaagggcgtgacgcggtacagcttcagggccaccgtgacggttcaggacctggcggacaccttcaacccgccgttccggagctgcgtggtcgatggaaaggccagctgcgtcatgtgtgcctacacgtccgtcaatggcgtgccgtcctgcgccaacgccgatctgctcaccaagaccttcaggggaagctggggactcgacgggtatgtcgccgcggactgcgacgcggtgtccatcatgcgcaattcacagttctatcgcccgacggcggaggacaccgtcgcgaccacgctcaaagccggattggacatagattgcggtccctacgtccagcaacacgccatggccgccatccagaaggggaagctgacgcagcaggacgttgacaaggccgtcaagaacctcttcactacccgcatgcggctgggccacttcgatggcgaccccaaggcccacgtgtacggtaacctcggagccgcccacatctgcacgcaggagcacaagaacctagcgctcgaggcggcgttggacggcattgtcttactcaagaacagcgccggcgtcctcccgctcaagcgagggtcggtcgcctctgccgccgtcatcggccacaacgccaacgacgttctcgccctcctcggcaactactggggcccaccgtgcgcgccgaccacgcctctccaagggatccaggggtacgtcaagaacgtcaggttcctggccggctgccacaaggcggcctgcaacgtcgccgcgacccccaggc

SEQ ID NO: 2104 - DNA, 465 bp, Zea mays
  Clone ID: 700203296_FLI
gtgagggtgtgaagtacggagctggcattggccctggtgtctacgacatccactctcctaggattccctccaccgaggagatcgcagaccgcgtcgagaagatgctcgccgtgctcgacaccaacatcctctgggtgaaccctgactgtggtctcaagacacgcaagtacacggaggtcaagcccgccctgaccaacatggtctcggccaccaagctcatccgcacccagcttgccagcgcgaaatgagtcgtttgatagctccatggtctgatagcgcggaatgagccagtttgttttgaataatttgggtgttaccccctgttccatggtgttagtgttaggttagcctctcattggtgggatacgccgttacaagatgtgttctaagtttcgagtgtgtgttttcctttgggctatgtttctgggggtatgtgtgtgctatggttataaacagaaatgaaat

SEQ ID NO: 2105 - DNA, 1417 bp, Zea mays
  Clone ID: 700203377_FLI
gtggtggccggcgagctgcggcgcgggccttggacggtggaggaggacctcctgctggtcaactacgtcgccgcgcacggcgagggacgctggaactcactcgcccgatcagcagggctgaggcgcactggcaagagctgccgcctccggtggctgaactacctccgccccgacctccggcgcggcaacatcacgccgcaggagcagctgctcatcctggagctgcactcgcgctggggcaaccgctggtccaagatcgcgcagcacctccccggccgcaccgacaacgagatcaagaactactggcgcacgcgcgtgcagaagcacgccaagcagctcaagtgcgacgtcaacagccagcagttcaaggacgtcatgcgctacctctggatgccccgcctcgtcgagcgcatccagaacgccgccgccgcggggactccgcagcagcacaaggccggcgccgcggacacgccgctctcgtcgccgtcgtcgtggcagcccggcggtggcggcggcctctacgcgtcgccggacctccccgccacggacgcctgctgctggcctcccgcagactgctacccagccgccgccgccgccgtcggtgacggtgaccatcatcatcagctactgatgaacaaccccgccgccgtgccggagctgtcggcgagcactaccacggccgggtcggcctccccgtcatcggattccggcgcgggcgcacagccctgctggcttgcgccggtgggtggcgcggagtggttcaccaccacctgcgacgccaccagcagcaccgccgccgtcctcctggccgggcaccagcaccagcagcagcaacaatggtcgtgcctgctcggggaggcgacgtgggcgtcgtcatccgagctccctgatctgggctgcgtcgcggacttcgagatcggcagcttcgacgtggagagcatctggagcacggacgacagcttgtggttcacgcaggcgcagggcgtgtgaattgaacccacacgcgcggcgacatggaaatccacgaccacggcgtcaaattaaaccggtggtggatcggacaccccgcacgtcggggacgcctagcgaaggtgccgagagagctagctgagacacgggttagaagaaggagagagattatttggaggaaccgaagacgacgcgggacggctactctttgctcggttcaagatgcttgctgttcttgcctccaggacttttcttccgctccagttctactccgtttcctagtcttgattccctagcggcttgtgtagggtatatacgccaagaaaattccagaaaaaagggggaaaacgtagctgttgtagtagtacatatatactagtagcgtcaagtgtttgtacgtagctgttgagtaattaagcgcaatacatatgaacaagtgaagttactg

SEQ ID NO: 2106 - DNA, 1166 bp, Zea mays
  Clone ID: 700203389_FLI
tggggggttcagatcggatcggaagcttccataagtttccatcgggcttcgccggtatggcgatccgcaaggggtcttcgtacgccgtcgcggcacttctcgcgctcgcctctgtcgccgccgttgcaggggaggtcttcttccaggagaagttcgaagatggctgggaaagtcggtgggtcaagtccgagtggaagaaggatgagaacatggctggtgaatggaaccacacctcgggaaaatggaatggagatgccgaggacaaaggtattcaaacctccgaggattacaggttctatgccatttcagccgaataccctgagttcagcaacaaggataagaccctggtgctgcagttctctgtgaagcacgagcagaagcttgactgcggtggtggctacgtcaagttgctgggtggtggtgatgtagaccagaagaaatttggtggagacacatcttacagcattatgtttggaccagatatctgtgggtacagcaccaagaaggttcacactatcctgaccaaggatggcaagaaccacttgatcaagaaggatgtgccttgtgagactgatcagttgactcatgtttacactttgatcatccgtcctgatgcaacatacagcattctcattgataatgaagataagcaaactggcagcatctacgagcactgggatattcttccccctaagaaaatcaaggacccagaggctaagaagcctgaggactgggatgacaaggagtacattcctgaccctgaggacaagaagccagagggctatgatgatattcccaaggaaattcctgaccctgatgctaagaagcctgaggactgggacgatgaggaagatggtgaatggactgcccctaccattcccaacccagaatacaagggaccatggaaacaaaagaaaatcaagaacccgaactaccagggtaaatggaaggcacctatgattgacaacccagattttaaggatgatccatacatttacgccttcgacagcttgaagtacattggcattgagctgtggcaggttaaatcgggcactctgtttgacaacatcatcatcactgatgaccctgccttggccaagacttttgcagaggagacctggggcaagcacaaggaggcagaaaaggctgcttttgatgaggccgag

SEQ ID NO: 2107 - DNA, 880 bp, Zea mays
  Clone ID: 700203418_FLI
tgctcgcctcgggtcaaaccctaagcagggagttgatttatccgctgcagccatgagtaagttgcagtctgagtctgtcaaggatgccatctcccagattgttggggatgccaaggagaagaataggaagttcactgagactgtggaacttcagattggtctgaagaattatgatccacagaaggacaagcgtttcagtggctctgttaagttgccccatatccctcgtcccaagatgaaggtgtgcatgcttggtgatgcccagcatgttgaggaggccgagaagatgggacttgactacatggatgttgaggctctcaagaaaatgaacaagaacaagaagcttgttaagaggcttgccaagaagtaccatgctttcttggcatcagaggccatcatcaagcagattccccgtctccttggtcctggtctcaacaaggcaggcaagttcccgaccctggttactcaccaggaatccctcgagtccaaggtgaacgagactaaggcaacagtcaagttccagctcaagaaggtcctttgcatgggtgtcgccgtcggcaacttggcgatggaggagaagcagatccagcagaacatccagatgagcgtcaacttccttgtttcccttctgaagaagaactggcagaatgtgagatgcctgtacgtcaagagcaccatggggaagccatacagggtgttctaagtctgctcttttgtgaagtctgctaggttctggcaccgaggttttattgaattaaactcttgttaagagtatgtttttggacgatcctatatttcgtcctggcgctactatgtttcagaatggtggtactactataagtattgcttgaaaggatcaatataatttgcgtgtcatacc

SEQ ID NO: 2108 - DNA, 2164 bp, Zea mays
  Clone ID: 700203435_FLI
cacgattcgtgcccgccggccatcaggtccgcggtcgagctcatgtacgcggcgtgtaccttcaagatccccgagctcacctcgctcttccaggcgaacctggtggcttgaagtctatgaattgaaatggaatcattattcattaggctgctcaacatttgaatattacatttatggctgtatagtttatcaatcagtttaacatcaattgagctttgctttgtctttacggaaggcaaatggttaacatggtcttcttctacagcggcggcttcttaattttgtagacaagactctagtggaggatgtcattcctattctggaagttgcttcccactcagggctgactcaagtgatcgacaaatgtattcaaaggattgctagatcagatcttgatgatatatctttggataaggagctccctccagaagcagttgatgagataaaaaatttgcgcaagaagtcacaaactgctgatggtgatacgttcatttcggaccctgtgcatgagaaaagagtcagaagaatccacagggcacttgactctgatgatgttgagcttgtgaagttgcttcttaatgagtccgacatcacattagatgatgccaacgcattacactatgctgcttcttactgtgatcctaaagttgtctcagagctgttagatttggcaatggctaacttaaatttgaagaatagccgtgggtacacagcactccacttggctgctatgaggagagaaccagctataatcatgtgtctccttaacaaaggggcaaatgtgtcacaactgacagctgatggcaggagcgcaattggtatttgtcggaggttaacaagagcaaaagactacaatacaaagatggagcagggtcaagaatcaaataaagataggctgtgtatagatattctagagagggagatgatgcggaatcctatggcggtggaagatgccgtcacctcgcctttgttggcagatgatcttcacatgaagcttctctacctggaaaacagagttgcatttgctagattgttctttcctgctgaagccaaggtcgccatgcaaatcgcacaagcagacaccacagaagaattcggcggtatagttgcagttgcagcaagcacttccggtaaactgagggaggtggaccttaatgagacgccagtgacacaaaacaaaaggctccgttcaagggtagatgcactgatgaaaacagtggagctgggccgtcggtacttcccgaactgctcgcaggtgctggacaagttcctggaggacgatctgccggaaggtctggaccagttctacctccagaggggcacagccgatgagcagaaggtgaagaggatgcgcttctgcgagctgaaagaggacgtgctgaaggcgtttagcaaggacaaggcggagggcagcgtgttctcgggcctgtcctcgtcgtcgtcgtgctcgccgccccagaagtatgcccagaggtgatcaaggcaccagtttttgccgtatagtttgttatcatggtcttcgagacttggacccggacagcatatagggacatgtacacctgtgtatgtatagtgcttacaattggcgtaagtagaactatatatatggaacataaggaaacatggcaggaacaccgcgcaaaaagatgaaaagatggccgaagtgctctatgcgagtgcgcacctgattcgatggccctattcaacggcgccctgtcagcatgctgcatgcccactgagaccttcggttgcatagggataggaggagatttctgttcaattttggctagcaagtgatataggggtgtttaggactgtttcactttatgaaaatcaacttagctcataaacacttttaacttcaataacttaggtcctgtttggagtggctgtatttttctagtcccaagaaaataatgtggtatctgagaataccatggtctagaaaccaaaatgtgtttggcagactcttttaaaccatggtatttaaaatcttggttttgacaagaccacattatttctgggtatagaatactgtcagccgagttcggctcggctcggtgcggctcgttgactgaacgagctcgactcggctcgtccattccacgagctggtgaaagaggctcggctcggctcgaccttagctcgcgagccatattcttgt

SEQ ID NO: 2109 - DNA, 822 bp, Zea mays
  Clone ID: 700203439_FLI
atcatttctatacacacaacagtaaacatgtcagcaacctcttgtattgttatgttagatggataaattctgttaacatgtggtatataaatggggccaatcacttgtgttctgaccacattcgtgagaaggatggcatctgggctgtgcttgcatggctttcaattattgctttcaagaataaggacaaccttggaggagataagcttgtcactgttgaagatattgtccgtcagcactgggccacatatggtcgccattactacacacgctatgactatgagaatgttgatgcaggggctgctaaggagcttatggcaaacctagtaagcatgcagtcatcactttctgatgttaacaagttggtcaaggagatccggtctgatgtttctgaagtagttgcagctgacgagtttgagtacaaggatcctgttgatggctctgtgtccaagcaccagggcatccgatacctctttggagatggttcacgactggtgttccgcctctctggaaccggttctgttggtgccaccatccgtgtctacatcgagcagtacgagagggactcctctaagaccggcagggattcacaggacgcccttgctccgctggttgatgttgcgctcaagctctccaagatgcaagagtacactggacgctctgcccccaccgtcatcacataaattttgaagagtgttttagaatgagttgaggcgcttacacaaactttcattccggcctcttgttccatagtttttcttgcatgttacatctcaccgatgaataaaatgtatgtatcagacttgtctcgtttttttgccc

SEQ ID NO: 2110 - DNA, 2007 bp, Zea mays
  Clone ID: 700203463_FLI
cggcgccacgtcgcacaggaggaccaaggagggcggcgcgctccagagggagctcatcaggttcctcaacgccggcgccttcggcaccggcgcggacggccacgtcctgccggccgagacgacgcgcgcggccatgctcgtccgcatcaacaccctcctccaggggtactctggcatccgcttcgagatcctcgaggcgatcgtcaagctgctcaacgccaacgtcacgccgtgcctgccgctccgcggcacggtaaccgcgtccggcgacctcgtgccgctctcctacattgcgggcctcgtcaccgggcgtgagaactctgttgcggttgccccagacggcagcaaggtcaacgccgccgaggcattcaagattgccggaatccagggcggcttcttcgagctgcagcccaaggagggtcttgcgatggtgaacggcacggccgtgggctctggccttgcctccactgtgctcttcgaggctaatatccttgccatcctcgccgaggtcctgtctgccgtgttctgcgaggtcatgaacggcaagccggagtacactgaccacctgacccacaagctcaagcaccacccgggacagatcgaggctgctgccatcatggagcacatcttggagggcagctcctacatgaagcttgccaagaagctcggcgagctcgatcccttgatgaagcccaagcaggaccggtacgcgctccgcacgtcgccgcagtggcttggcccccagattgaggttatccgcgccgccaccaagtccattgagcgcgagatcaactccgtcaacgacaacccgctcatcgatgtcgcccgaagcaaggctcttcacggtggcaacttccagggcacgcccatcggggtgtccatggacaacacccgtctcgccatcgcagccatcggcaagctcatgtttgcgcagttctctgagctcgtcaacgactactacaacaacggcttgccctccaacctgtccggtgggcgcaaccccagcttggactacggctttaagggtgccgagatcgccatggcgtcctactgctccgagctgcagttcctggggaacccggtcaccaaccacgtgcagagcgcggagcagcacaaccaggacgtcaactcactgggactcatctcctccaggaagactgctgaggccatcgagatcctaaagctcatgtcctcgacgttcctgatcgccctgtgccaggccgtggacctgcgccacatcgaggagaacgtcaagagcgctgtcaagagctgcgtgatgacggtggcgaagaagaccctgagcaccaactccaccggtggtctccacgtcgcccgcttctgcgagaaggacctgctccaggagatcgagcgcgaggcggtgttcgcgtatgccgacgacccctgcagcgctaactacccgctgatgaagaagcttcgcaacgtgctcgtggagcgcgccctcgccaacggcgctgccgagttcaacgcggagacatccgtgttcgccaaggtcgcccagttcgaggaggacctgcgcgcggcgctgccaaaggcggtggaggctgcacgggcggctgtcgagaacggcacggcagggataccgaacagaatcgccgagtgccgctcctacccgctctaccgcttcgtgcgcgaggagctcggagccgtgtacctcaccggcgagaagacgcgctctcccggcgaggagctgaacaaggtgctcgttgccatcaaccagggcaagcacatcgacccgttgctcgagtgcctcaaggagtggaacggcgagccactgcccatctgctgaacagagaaaatacaaggagcagaagactgtatttttagctaataatgctttttattcccaatttatttattgtcgttgatatgctacggattcttgtcatacagctgcaacgccctgtaaccaacttcgaacatgtaataggttttcgagtatgcgaatcatatttgcagttaattaaatccaagtgttacttttttttg

SEQ ID NO: 2111 - DNA, 1135 bp, Zea mays
  Clone ID: 700203527_FLI
actcgaacttaaaccctagagccgcagccccggtcgctccaccgaccccaaatctcaaatcagcgggagggaactcgcacgcgaaggcaaatacgctttagatcccccattgcttctggctactaggccagcgcgcctcgattttcttctccgttttggtctaattcgctgaactcatggctcgcgtctacgttgggaacctggatccgcgtgtcacggcgcgggagatcgaggacgagttccggatgtttggggttctgaggagtgtatgggttgctaggaaaccaccagggtttgccttcattgactttgatgaccgcagggatgcacaagatgccattcgtgaattggatggtaagaatggttggagggttgagctgtcaactaaagttggtggtggccgtggccgagaccgtaacggttctgatatgaagtgctatgagtgtggtgaagctggccactttgcacgtgaatgccgcttacggattggttcaggaggcttgggtagtggaaggcgtcgcagccgaagtcctagatatcgcagccgcagccgcagccgcagcccaagatatcgaaggagcccaagctatagcagaagcccgcgagatcgttctcctaggaggcgaagttacagcaggtcgccactgggatctcctgcacggagtctcagcaggtcaccgccgctgccgccgcctcctcccagaaataacagcaggtcaccacctggagcccgagaagtgagcaggtcgccgccgccacctcctcccagaaataacagcaggtcaccaccggcagcccgagacgtgagcaggtcaccaccggcagcccgagacgtgagcaggtcgccaccaccacctcctgatgccagaagaagctatagtggatccccaggacagcagccacaacgcgacgagtccccatatgccaatgacgcctgagattctcttagctgccccaagatgctggaaaatgctaggggcccccagcatgttttgcctgtccggtcggcacaactgtaattctgtaggatcgagtctgagattttgttccagtgttttgggtttcccttgacacatcgctgctgatacaattgtggaggcaggagcacaacgtttctgttttaagtattgactgg

SEQ ID NO: 2112 - DNA, 736 bp, Zea mays
  Clone ID: 700203560_FLI
atcgccatctgcctcgccgcgctcgccgggacccgcaagttcgggctcggtcgggagaaggaccagcaccagcacaccaagtggtgcccgacgacgacgacaacccacgcgccatctgcgcagcaggagcttcggttccggtgcgcggtctgcgggaaggccttcgccacctaccaggcgctcggcggccacaagtccagccaccgcaagccgacgacgccggagcggtacgccgccgcccttgccgccgcggcgacgacgacagcggcccggggcgaccactccgacgagacgacggcgtcgtctctgtcggggtcggcggctagcggcgggccacaccggtgcagcatctgccggaggggcttcgccacgggccaggcgctcggcgggcacaagcgctgccactactgggacggcatgtccgtgtcgatctccgtgtcgtccgggatggcgtcgtcgtcgggcctcagtaccgtcaggaactttgacctcaacctggcgccactgccggagaatggcgacgccgggatgatgaagaggtgggccgaggaagaggaggtgcagagtccgttgccgatcaagaagcgcaggatgtcggactgactactcaccgatgccgtcgtgtctatcgtttcatgtaaaaatggatctacgccatcgttgtgtcgttaatttaatttcttttaattaggttctgtttttctggacataaattcgttcaattcattgattcgtc

SEQ ID NO: 2113 - DNA, 1035 bp, Zea mays
  Clone ID: 700203568_FLI
ctgcgtgctgctcctctcctctccactctcctccatttgctgccgcagctctccgagctcgccctcgccgccgccacctcagcgcagcacagcacagattcggagaggcttagcacgcagcgccagtgaagaaggccgagataatggaggtggagacgatgctggacgacgacgtgttcttcgccgagctcagcaagcggatatcgctgctcatcaccgacgacgacgagggcgcggacttcgccgccgcgcagttcatccccgccgccgccgccgccgccgcgcccctccaggggttcgcgtcgcgcgcccatgtgccgtcgcaggcgtcgctgctggcgccaccggcctacgcgctgtaccactaccaccacggcgccagctacggcggggacgacagcgccagggcggcgtggcagcagctgcagtgcggcagcaagggcaccggcgtgttcatcccacggtccacgcccgggtccgcgcaccccaagaagaagggcaagagccggggcgccgccgccaaggccgcgcggccggccggcgcgggcgcaccgcccaggaagcgcgtctgatctccgcttctctgcatcgtgatttataatggctcagcaaggagaaaaaaaaagaagaagaaaaaggaggggtaaaaaaaagagcaccagaactacgaactaaccccagatgcagcgctcgtcggaaccagccggattagctatgtttaattaatcattaaattttcagtgttgctgtcattcttatatggtaaataataaaaaaaccatagctactccccccctgggttaaaatgtataatgtgagccctaggggatcaggctgtgggctggggcaccaccgcaccaataatctctatgtgtgtatagtaaaagctagcggttggtggtgtcgtagttttcctggctaagtcgatttattaattatttctttgtatttcctttcttcccacatttttgtaagatgaagaaatgaattgtgctattggtgtaccactactatactagagcatagtgcagtgct

SEQ ID NO: 2114 - DNA, 1126 bp, Zea mays
  Clone ID: 700203684_FLI
caccagctcatcacatccatctcattctactactgcctcagagaccaagctgctgcaaccggagaaggagatctattctacaaagtgaagtacttagcttgggacatggaaaccgtcgtgggagacctcatggcgaccgagctgaggcttggcctgccgggcaccgtggacgactgcagccagcaccagcagcagacccagctgaaggtggccgcgccgccgtccaaccctactaggggcaagaagcgccccgccgccgaggaggaggaggcaaacaagcgcgacgcggaggcagcacccccggcggccaaggcgcccgtggtcggatggccaccggtgaggtcgtaccggaagagctgcttccagcaggcaaagcagcaggccgtcagcagcagcagcaaggcggccgacaaagaggatgctgcggcgccggcgcccagctgcacggcgtccgcagccgcctcaaacgccaccgccagcgccggggccggctcattcgtcaaggtgagcatggacggcgccccgtacctgcggaagctcgacctgaggatgtacaaggggtaccgggagctccgggaggccctggaggccatgttcgtctcctccggcagcgccaacaacaacaacaacctgtcggagttcgccgtcacctaccaggacaaggacggcgacctcatgctcgtcggagacgtgccgttcgagatgttcgctagcacctgcaggaagctgaggatcatgaagagatctgaagccacaggcctgggatcggcgagacaatgaagaaggtctgacgacgaccgagggcccgacaacgttcatgtcgatctcttctttttttttctttttgccccattattttattttgttcttcttgtccgagagaccccaagccaaaaggatgagcttggtgggtggcgcatcaatctacaaagcgcatgcatatacgcggatgtgtgtgcggctttggttctgtaagacgacgactagtagctaggtcttttttagcagcagcacagaagctaaggagatgcatgctgatgacgagcggttgtttcggcttagctctccgtatgctgtgtttgtacaaaccaaacaatacagttatcttcaccgtcgttgatccctt

SEQ ID NO: 2115 - DNA, 765 bp, Zea mays
  Clone ID: 700203758_FLI
cgcctcagccaccgcaaaatccccaaatccgcggcggagaggggagagccggagacaggggcgcagccagagagatcggagaaggggaagaagatggtgcgggtggcgacctacttcgcgatgaccttcggggcgttcctcttctggcagtccatggacagggtccacgtctggatcgcccttcaccaggacgagaagaaagaaaggatggaaagggagctggagataaagagaatgcaggcagagttactggcccaagctaaagagaacgaatcatgattgtcatttgtccaatggtttcaggcagttcctttatcgtatttcctctgctgtattttccatgcaatatcttgactgatgtatgctcatgctcaacacctccaataaagcgagacatgctatagcattgttgaatgcaagtgggtatgcagtaatgctcatgttgaattgatgtaacttagccgaactgaaagagcctgccccagcttgcttggaacagaggaatttgctgctgtttttgttctttttacggaacaacacaagtcaactctcaaaaaaaattgttttttagtctggttataaggtggtgttttgtactgatatttcattgttcacttgaagaaacctctgtcggaggagcagaatgcttggtgctgtttaagttggctcgtgttatattgctcatgttcggagcatacatatccaacatgttggacgcttttctgttgtgccattctaagttaatatatgtaatgctgtttctgc

SEQ ID NO: 2116 - DNA, 1295 bp, Zea mays
  Clone ID: 700203861_FLI
cgatctgtccccattatcttctgctcgatcctttattttcttcctcctcccggagcctcaattcactctcctgtcgggctcatgagtgccgcgccgtgcgccgacgacagagctacagatactagccgcctcgagtcgagaggcgggccggctcctcctgcggcgacgacgatgaggatcatggcgcgtacgctccgcggggaccgggtggcgctggacgtcgacggcgccaacacggtggcgcagctcaagtccatgatcatggcccgcgagggcgtagccgccggcgaccagcggctcttcttcgccggccgacacctcgacgacgacggcatgcccgtcgcgcactacggcgtgcgccacggctccgtcgtcttcgtcagcctccgcctccgcgccgacgacgcctcgcagtcgcagcaggagcaggagatgcgtaacgtgcaaacgcagccagtcaggaccgttagccaactactgatgattgaccagcagccgatgatgcgcttcgaagacggcgacggccacggccacgaggaggccgtggtcaaggccacgacgacgaggccgccggtgtcgcggcggtcgctccgcaagatcctgtcgcggctgcacgtggacgtgtggacggcccagcacgacgccaagttcctggacctgctgcagcggcgcacgcgcggctgcggcgtgggcgtgggcgacctcaccgcggacgactggtctgccatccgcgccgagctcaacgcggccacggggtccgcattccccgtcgaggatctgcagcggcggctgggcgagctccggcgcgagttcgacgccgtcagccggatcaaggaccacccccgcttcacctacgacgcgcgccgccatgtcgtcgtcgccaaggagaccgagtggaagcgctatgtgctggttcgtgcggacagctgctgcccgttgatcacacgcgccgcgcggatcaccaattcacccggatatggtcttcttctcttagtaacgatcttgatttccgcggcggtttcaggagaacccggatgcggtggcgtacgaggggagaagcacgcacttcggtcgcctccgggcgatcttctccggcagcggcgcagagacgcgcgggcgcggcgggcccatacgccgcgagtcacgggccaagagatgcctgagcaagctgctgcgcagctttgggctccggtgcaagctgtgagaacggtgacactgatacttgtatgctaatgttgctagctagtgggtgggtgacatgcgagcgacacgattggtcaaagctccgttgttgc

SEQ ID NO: 2117 - DNA, 976 bp, Zea mays
  Clone ID: 700204124_FLI
gaggatagttgtaggacagagagatgatggacagcaataccagcataactttctgggaccaagtgctgaatcaagagtttttgcaagacccactcaatcttttgcacatactcctgattatagtgttctcagttatccatctcaacctgccatgccttttaccccagcgttctttgccccagggggcagtccatacttggtcgatgcaaagggtgcaccagtcataccaccgctgtcaggtctaagcctcggcatttctcatccatctttcaacaccagagcaacacagccctcatctaatgaactgagttacttccatcctagcatggatttcagttatggagtgtcatctgaaggcgcacgtagggaagcagggagctactggcccatgtcctaccagggtcagacaatgtttgtggatgaacgcatgaggaatgtatcacaggatggtacttctgggttggtgctgaagcgaaaagagccagagtcgggttgggatttgtacccacgtcgttgagcctgagcctgaaggtttgttgcagtcgcaatcgattttgtcccactctcttaaaaaggttatgttcaatgctccgtttatggcggcaccttggacattgtattctagggtatttctttggcacgggcccagttctactaggtctgaagacatacacggagaactgaataagagatcagctacaggtagatttgacagatgttgacatggcaaggacattgttagctgctggaaaccacctcgtgtagatctggttctttgtgaatgtattagctttgttttagttgacataatatagccaaattgctctctagggagctaaaattatgtaaatcatcatcgtataactcatagatgaaatgcatccctttttatctatatttttccagtgttggtgcaagttgtactgtgatcaactatattgtatatatgtcattgtttgaaaaaatttttaaaagg

SEQ ID NO: 2118 - DNA, 606 bp, Zea mays
  Clone ID: 700204155_FLI
ttctgtttcttggcgtccatcccctctttctctcgtggcgacgacggcgaccgtcacaccccccctatgtgctaggtgccagggtccgtcgggtccttcgctggcgacgagcaactaccaggcgacccagtggtgtgttcgggaacgtttccgcgggcgggcggcggcccccagtggcgaagatgatctgactaccgacgtacgcagcacgaggcgttcgttgccatcttcttctcctttgagtatatgatactagcaacatccacggtatcaacattcgtgaagtatatattctatgttagtgacatgctaatggaaggtcaatgggagaaaaaggcagtgtatacattttacttggagctcataagtgaccttgtgcacttgtcattatacatgctcttcttcatagttatcttcctgtaagatctcttattatggtagtttgatactataatgtaaagttgtaaactatggttattgattcgttatgtgataccaggaactatggtgatcggcgaccgtgatcttccatgttattatgttctgatacttgagacttttattatgactatgtatgagatattgtctccttattaggactggttg

SEQ ID NO: 2119 - DNA, 578 bp, Zea mays
  Clone ID: 700204157_FLI
gctgaagaaggccagcggtgacaccattgagtaccaaaggctcgtgagggaagaagtgcggcctgcgctgaaggatatggtctgggcttggcagagcgaccggcaccagcagcagcagcagcggtgcgagcagtctgtgcaaggagaggaccagcagcagccgttgtcgtctttgccgacgcagcagtagtcactgcaccaccagttgcgaccgccataaccagatcacgtcaaaactgcaccaagccgcacaggactagtaactcccacttgcatcgacgcttatgtgattgcggaattgtgtttcaggttacctgcctgctgcggtaggacctaaaacgcctacctgcctaccatttggcatttttttgtatactgtacgtacattagagtaataaacaaacatgcttaacttttcagctttcgattggaatgtgcttttcgatgtaactctgtaaccagtgtaggtacgaagtcgattagccacagggtctggccatgttgacctcacgtagccctggttcattggtgtaacagtttgttggctgcggctttacattattttgtctctatggatt

SEQ ID NO: 2120 - DNA, 849 bp, Zea mays
  Clone ID: 700204162_FLI
cagaagcggcggcggcggacgaaaagcaggcgaaggcgagggtgcgagggaaggtgcaccagccatggtgcacgtcaacttctaccgcaactatggtaagacgttcaagaaaccaaggcgtccttatgagaaggagcgtcttgatgctgaactgaagctggtcggtgagtatgggctgaggtgcaagcgtgagctttggagggtccagtatgcactgagcaggatccgtaatgctgcaaggcacttgctcacccttgacgagaagaacccccgtcgtatctttgagggtgaggcgcttcttcgccgcatgaaccgctatgggctgcttgctgagggtcagaacaagcttgattatgttcttgccctcaccgctgagaacttcctcgcaaggcggcttcaaacacttgtcttcaaggctggcatggccaagtccattcaccatgctcgtgtcttgatcaagcagcgtcacatcagggttggcaggcaaattgtcaacgtcccatcattcatggtgagggtggagtctgagaagcacattgacttttcactgtcaagcccattcggtggaggccccgcaggaagggtgaagagaaagaatcagaagaaggcaagcggtggcggcgatgctggcgatgaggatgaggagtgaggatggacaagtagcgttacccaatataataatattatctagttttcttgaacttgttcgaatgatgagtgcttagctgtgtgatctgacgcagagttccctgtgctgactctgtgtcatggatggtccattttatcttgtggtattatcagcctttacataactgctatgtttggatatgttcaattctgttgcaattt

SEQ ID NO: 2121 - DNA, 792 bp, Zea mays
  Clone ID: 700204175_FLI
ccgtgcttcaactaagaacaagggcagaatggctcgttacctggcaaacaaatgctcgattgcttcacgcattgactgctactcggaggctagcacctctgtctttgggcaaaagttgcgtgagcaagtcgaggagagactggaattctatgacaagggtgttgcgcctcgtaaaaaccttgatgtgatgaaagccgctattgacagcatggtcaatggcacctcaatggatgatgatgatatcgagaagaccgatgcatctcccaagaaaagcaagaaaaagaagaccaaaaccaaggctgatggtgatgcaatggacgtggataaaccctccaacgttgctggtggagaagctgagcctggaactgagaagaagaagaagaaaaagaagcataagctggaggaggaggcacaggaggagaacggtgcagcagatactacccctaagaaaaagaaaaagaagagccgtgaagcttccgaagaagctgaacctaagaccgccaccgatggtaagaagaagaagaaaaagaaggctaaggccgaggatgatgagtagccaagttatttgttgtatggcgtatgaatccgagagtatttgttgaaaaacagagatgaacgcctgcctagctcaactagcttgtagttcatgaggcgtttgatgcaaacccaactcaaagtacgaagttttcctatcgtctttagctttcttgtatttttattttttggttggatatgctagtgaactatagtgacttcgtatgctaacgatgcagaatagcagatccaatcagc

SEQ ID NO: 2122 - DNA, 806 bp, Zea mays
  Clone ID: 700204208_FLI
ggcctgcggaggagcggcaagagctgccggctgcggtggctgaactacctgcgcccggacctcaagaaggagcccatctccaagcgcgaggaggagaccatcatctccctgcagcagtcgctcggcaaccggtggtcgacgatcgcggcgaggatgccaggcaggacggacaacgagatcaagaactactggaactcccgcatcaggaagcgcctcaacgccgccgcctccagagctgcaggctgcgacggcggtgacagcgcggccgagccatcgggggccgtggcagcgggaggaaaggaggattcggccaacgctgcgacggcggtgacagcacagcctacgcccatcccggcgcggttcccggtcttcgggtgccagctgcccgacggagccggcggcggcatttcgtctcccggcagcggcagcggcaagagtccccagtcgtcgactactgcgagtatgccgcagaacgagggtgacgagagcgaggcgagcgacggtggcggtggcgacagcgacatggtccatttcctctcgttcgatgatctggattatcccggggatttgctcattgatgtgccgggagccatggacgcgtgggagagccaactgtgctatgcgaatccgatgatgagctcgctctgttgatccacactaccaataattgcatagcacagccattgtcttgttcccgctaatcatatataggctgtctgaattatttatgtgaaatttcactgggttttttggacaaggaatgcatgatgacgtgtgggtattcctattaaaaagaaattttgatc

SEQ ID NO: 2123 - DNA, 237 bp, Zea mays
  Clone ID: 700204228_FLI
gtcagcatgttccgacccaagcccaacaagcagtattagggcccggcccgtttccagcctcgtattagtgatgcgtacatatgggctcgctccgacgacatggcgggcgtctgtaggacacgttcagtcccggtgaaattagattaagaaattccgtagtttctattgttcctaattttttttcttctgtttatgttccttcgttgtatgagtaaaaaaagatgcttattcatgtcc

SEQ ID NO: 2124 - DNA, 1448 bp, Zea mays
  Clone ID: 700204248_FLI
cccaaaacccctcgcctttctctctctcccaccgccgtccgccaccaacaacttctcttcagatcccaatcccatccaacgtttggatcctctcctccagtgctcccctcacttctcgccgccgcccactgccgctccccccaccaatccacagcgagacacgcccgagcgagtgatccccgacccagccgccgccatgaggccgtcgctgctgaagtccacggccgagctcctccgccgcagccgcggctacgcgtcctcggccaatccggagcggaaggtggccatcctgggcgcggcgggtggcatcgggcagccgctctcgctcctcatgaagctcaacccgctcgtttcctccctctccctctacgatatcgccggcacccccggcgtcgcggccgacgtctcccacatcaactcccccgccctggtgaaggggttcatgggggacgaccagctcggggaggcgctggagggctccgacatcgtcatcatccccgcaggagtgcccaggaagcccggcatgaccagggacgacctcttcaacatcaacgccggcatcgttaaggcgctgtgcactgccatcgccaagcactgccccaacgctcttgtcaatatgatcagtaaccctgtcaactctactgtcccgattgctgcggaggttttcaagaaggctggtacttatgatgagaagaagctgtttggtgtgactactcttgatgttgttcgtgctaaaacgttttatgctggaaaggctggcgtgccagttactgaggtgaatgttcctgttgtcgggggccatgcgggtattactattctgccactcttctcacaggccactcctgcaagcaattcgttgtcccaagaagacattgaggctctcaccaagaggacacaagatggtgggacagaggttgttgaagcaaaggctggaaagggctctgcaacattgtccatggcatatgctggtgctgtttttgcagatgcatgcttgaagggtctgaatggagttccggacattgtagagtgctcttttgtgcaatcaactgtgacagagttgccgttctttgcctccaaggttcggctcggcaagaatggagtggaggaagtgcttggtctgggtgagctcaacgacttcgagaagaaggggctggaaagcctcaaggtcgagctcaagtcttccattgacaagggtatcaagttcgcccacgggagctaggcaactcgcccggcttctaacagttgatatcccttgcaaaatttttttttgactgccttttcccccccgccccgttatggttggcgcaacgaggctttgtggtccataataaaacacagcggagtgtagaaaatgtgcaccaggagcagtttacaaacagcggttcttttttgtgctgaaccaccagtagttgagccgtgaaggaatggaaaaactttccacttgctca

SEQ ID NO: 2125 - DNA, 1207 bp, Zea mays
  Clone ID: 700204267_FLI
ggcgagtgacacacgcggcagtgcggcacgcctactatcttgcgcgcgtgcggccggccggccatggatccgttctacttcggcccggaccagctggatgccgccgccgccgtcgacgaggactacctgacgagcctcggcctggtggtcctctcgccggagccagtggcgccgttgcctggcggcgcatttgaggcgtaccagcggcgtgcgccggcgttgctggagcactccctgcagacgatgagccggcggtacagtggagagcagaacatgcaccggaggatgttcagttacctgagacgcgtagctcatgacgccggcgccgccgtggtggcggccccagcgttcccggcgcccgcgcgcgagagcgttcccggcttcggggttggcacgtcgcaggcgccgcgaagctcgcggttccggaacatcatgcgcgagcggctgcggcgggagcgcctcagccagggattcgccgacctccacgctcttctgccccacggcgcgtcgtcaaaaggtggcaagaacgacatcgtcggcgcggcggccggctacgtcagggagctggtggccaggaaggagcagctcagcgccaggaaccaggagctcctagagaaggccgcgagccgctggaagcagcagggaggcacgaggagtggtgtcgggcggggcatggtggtgaaggtgcaagccgagagccaagaccattcgatggcgcttggtgcgtttgtgagggtgctccagcggctcaaggccatggaggccgggctgcaggtgacggcgatccggacgcgcttctccgcgggaggcgtgtggatgaacatcggagtggaaggccaggtatccgcttgtgatgtggacaagtcaataacaaacgccttgatagagctggaggggaacgatccaagaagcagcaagcccagattcagctgtcaagtcgaaactgtccagatggattgatcttgtttagttgtcgatcaaaatatagtagcagctagagatgataatctatctgctgccgctttaaaccaattattcagaatgctgcagctataatttataggaacaaaatactatagaaaagtaaaggctggtggattaaagccacaacgaagaggctggatctttttccaacatctgctgaaacacaagcggaagaattcaatttataccattcttaaacatggtggatctaagaaacaccact

SEQ ID NO: 2126 - DNA, 652 bp, Zea mays
  Clone ID: 700204274_FLI
ttgcgcatgttgtaggagtagttctccagcgagttcttggcctccaccttgcgcaacacgatcaaggacgagaagattgcgtccaagctgccggccgatgacaagaagaagatcgaggacgccatcgacgcggccatcagctggctggacgccaaccagctcgccgaggcggacgagttcgaggacaagatgaaggagctggagagcctctgcaaccccatcatcgccaagatgtaccagggcgcgggtgaagacatgggcggcgctggcggcatggacgaggacgcccccgctggcagcggcggccctggccccaagatcgaggaggtggactaagcggtttgttgtcagtcttgagcgtgctgcagttgctggctggcccagtcgctgccgcgagttatcgtcgtcggtcggtgcggtgtgtccgcttaaactttatttgtggtgggctggtacttttgtggtggttattttttttggacctcgtgatagtcggtcggttccatgttatcgcggctactggcaaaccttaagtgatacggtaattcttcttttcggtatttgtttctgcatactgctggctcgtattttgttttttgagcttgcgattctttgttaatttcaaccttttgccagttaggaggccattctc

SEQ ID NO: 2127 - DNA, 1275 bp, Zea mays
  Clone ID: 700204307_FLI
gccagcgcttcatcgcgctctccaagatcgtcccgggcctcaagaagatggacaaggcatccgtgctcggcgacgcgatcaagtacgtgaagcagctgcaggaccaggtgaaggggctggaggatgacgcccggaggcgcccggtggaggcggcggtgctggtcaagaagtcgcagctgtccgccgacgacgacgagggctcctcctgcgacgacaactccgtgggcgccgaggcctccgccacgcttctgccggagatcgaggcccggctgtcgggccgcacggtgctggtgagggtccactgcgacaaccgcaagggggtgctcatcgccgccctctccgaggtggagcgcctcggcctctccgtcatgaacaccaatgtgctccccttcaccgcctcctccctcgacatcaccatcatggccatggctggtgacgacttctgcttgtctgcaaaggatattgtcaagaagctaaatcaagcattcaaatcacccttctgatgggattagcttaatctatgtcaacttttttcccattagccttaaggatttgaggctaatggttaggttatcaggtccttccttgcctttgcttccgaagagagttgcttgcagtccccaagagtccccccacacaaagatagccatttccactggttttttgctacatgggtgcagagattgatcacctagctagttacctacttaccatcccattttatctgtctctccagttttttacatggtttgatgttgtcactccatgtttttgggagagagcagattgtaaaaaaaaaacagcctttttttctagggctttgctatataggcctggggagtttgacttttacaaacctaatttttctttctccccttcgcccgtatgttgccctttaattcaccttgttttttccatgagaggatggtgtttttcaaacaccagcacctaccttcgccgtcctctcaaccttgatcacactgctcccagaaaaagcttcagttgtggagaaaatggcgccgtctttttttttaatcagctctgagggggactttgcaagccttgatttggaagtactgtagggatgcctcacttctattgtttctgttttttttgagggtcctacaagttggccgccacttgaaacttgatggagcctttgcctatagttttcacatgtgagttttgttgtcacaggacaggatgaaggtgtagttgttgtcatctcttgtttactctcatagaagcataaataaataaatgtgctcgtttggt

SEQ ID NO: 2128 - DNA, 1027 bp, Zea mays
  Clone ID: 700204330_FLI
ctgaggcacaggagactgttgatcctgctgaaaatcatgtgcagcaccaagattatttggaatataaggctggcaatgtgattgatgatgaaactcatttggaagagcatattcccccattccccagttcaacggatgttaaaagggattcacctcttgctcttccccaccctccatcacctaccctcgaagaacctgtggaagaagcacccaagacatatgcttcagtgttgcgaacgaaatcaaaggcaacgctggcgattacagagtcacagcaggctcaacagctggcccagcagccacagtctgcctcagtgcatgaaaagtctaacctggacaaccaccgggatgttagcgtccctgaggatgaagagtttctttcggtttatgttgggaatctttcgccatctacttcggtctttgatcttgagaaagtgttccaggcttttggaagaattaaacctgatggagttgctatccgaagccgcaaggaggctggagtattctttggctttgttgagttcgaagacatgtctggtattcagaatgctttaagtgcatctccagtagagttaaatggccgttttgttcatgttgaagagaggaggcctaactgcggattccctcgtggaagaagaggccgtggaagagctgatttctcaagggaccaagctggtgggagatacgacggggagtatgctactcgatcgaaaggaattgggcaccagaaaaaaactggacgccagtatgactactagttatgtaccgctctgctggtaaatggccgtgtaccattggtgttctctacttggtgctgttctggccataattttgctaaaagtcacaatgatgtcgggactagtatttctgctttgttgacattcggcggagtcttttttgggggatgggcatctgttaccattttgttgcgtcacagtagtttttggttctcagttaccgtgaccacttacaaatggatcatgctaccgtcggtgtcaaactttttaagcaatacctaggttgtact

SEQ ID NO: 2129 - DNA, 426 bp, Zea mays
  Clone ID: 700204331_FLI
gacctcagtcgcggaagcggctgtatacgctggtccaattgttcctcgcagccgccatactaccccagcctggacgccgccaagacgtttctagcggattactgggttcagcttcagcagatggcggaggctctgctccgtcaagacaaagctgaaacggcgaaatggcacggctgagccaccgaatcgcgcagttttgcagggactgaagatactatgcatgcatttcgttggggccttttgcccttgtggcgatagagtgattcatttctatagcgatcatgtgctattgcactacatgtcgcactagattctcttactatcgttgtgcacagcgttgtacgtgttgtgttctacctagatagattgattcagttagatgtcacttgtattgccaagtaggtcaattggatatggaacttttgt

SEQ ID NO: 2130 - DNA, 623 bp, Zea mays
  Clone ID: 700204362_FLI
gggagaagccgccgccgcagcaatcacagcagcccggagaaagcccaggtccgacaagatgcagatcttcgtgaagacgctgacagggaagaccatcaccctcgaggtcgagagcagcgacaccatcgacaatgtcaaggccaagatccaggacaaggaagggatcccgccggaccagcagcggctgatctttgccgggaagcagctggaggatggccgcacccttgcggactataacatccaaaaggagtctacgcttcacctcgtgcttaggctccgcggtggcatcattgagccctcgctgcaggcgctcgctcgcaagtacaaccaggacaagatgatctgccgcaaatgctatgcacgactgcaccctagggctgtcaactgccgcaagaagaagtgtggtcacagcaaccagctgagggccaagaagaagatcaagaactgaggtgctgctcctagtcagtttcatggacaatgttgggctgtattgctgtgtggttgttgaaccgtgtttgtttacccaacatttgggccttctgttatgttttaccttgttgtcgatgacacaatactatatgacaatagcaactctgttattgtagttttggtcactgttcacc

SEQ ID NO: 2131 - DNA, 995 bp, Zea mays
  Clone ID: 700204365_FLI
tcctcttcctccatctcacccgtccctcagcctcgttaatttttcgcccccatctttgaacgcagcggctcaacctccatcgttctctccctcctcctccccccgatcccgtccctataaattgcgcccccgccgccacagcggaccgcaagcacgcaatcacacagctcgctgctgctgccgtctccccgtgtcctgtcgttctcccgtcgccgggggcggaagagttcggcgggcggttggggattgctcgggagccccgtgatggcgaagctgtacgtgcaagcgttcccgcccgcggatctgaacaagaacaccgagtggtttatgtacccgggcgtctggacgacctacatcatcatcgtcttcttctcctggctcctcgtcctctccgtctttggctgcacccctggcaccgcgtggaccgtcgtcaacctcttccacttcgcgatcacataccactttttccattggaagaaaggaacaccttttgctgatgaccagggaatgtacaacacattgacttggtgggaacaaatggacaatggcaaacagcttactcgtaataggaagttcctcattgttgttcctgttgtcctgtatctgatagctttgcacaccacagactaccaacaacctatgctcttcctcaatacccttgccgtcagcgtgcttgtggtcgccaaactaccgaatatgcacaaggtcaggatttttggaataaatgctgagagctaaacagcgtcatccttcaccagacattttacctatatgctttttcagaacggtctgtatgttccccttctagtgctttagttgggctcattcatcagagtaccatagtttaaaagttgttagcagatgggccttggtcgttgtatagagagatgctcagaggctggactggacatgtcgctgctgtacatctgatgtgcacagattctgtacacccttaatgttgctatatggtttgttgcgagcatctgtcagttgct

SEQ ID NO: 2132 - DNA, 230 bp, Zea mays
  Clone ID: 700204372_FLI
ccgaacaggagatcgtcaccaggaacgagcagaccggggctgctcgcgcggccggacacggcgtggaccggtgtccggactccgaagatcgtcacgccgacgacgtaacatgcggaacgctactagtacaagaaacaacatccaagtgtacaatcccctgtactttgtagtcttgtttaggcaaactgttcatccgatcgatcaaacgagatcgttacaatttttttttt

SEQ ID NO: 2133 - DNA, 1019 bp, Zea mays
  Clone ID: 700204395_FLI
aaaccttccttctgggcctcgtccggtcgtccgtcccttcgcgcccctgaaattgtccgaccgcgtggcgactcgggtcggacggatgccggtcgacgtcgaggcggcgatggccccgccccaggcggcatcggcctgcagctcgtcgtcgataggcagggacagcgacgagtgctcgccgccggggaaggaggaggaaggggagggggaggtgcagagcgcgtacgagggaggaggagggggcagcctcgctgggttggaggcattggaggaggcgctgcctattcggcgcagcatatccaaattctacaatggtaaatccaaatcatttgtgtgcctgaaagaagctataacattttcaggctctgcaaaagacattactaagtcagagaatgcatactccagaaaacggaagaatctctttgcctacatcatcatgtatggaaattcacatgaaccacgggcagctcaagtttatgaaactgccgcccctaagaggcatgctagtttgagtagaaactctttggtgactttggctagcagcagttccaggagcagcagcagtatcagcattgaagagcatgaactgcccgagcatcttgattctccgcgttcacctgatggttttatatccgcaccacgatctggctcttgcgtgcctgatgcatctgtgcctaggtcattgtcaatgatggacttgcatcgtctgaataggtcaagttcctcagttcgtctcaaagatgggaaataggaaatacgactggacttggatccagaggattttctatttctttttgtcatcttttgctcgaggtttctagcaccatcttctctaatagaactaaggatggcatggaggtttctggataaataagtgatcacttagtttggcgaggggtatatatgtgtttgtaaaatagttcttcactccattgtaattagcatataatgtactaatatgaatgcctctactcatgtgaccatcttcagctgtaaattaacaaatacctttttatgcc

SEQ ID NO: 2134 - DNA, 514 bp, Zea mays
  Clone ID: 700204437_FLI
agcagaaaaccctcctgatctggacggacataatgaaggagtaactatggctggatatggttatgggatccctattagtcgcctttatgctcgatatttcggtggggacttgcagatcatctctatggaaggatatggaactgatgcttacctccacctttcacggctgggagattcggaggaacccttgccgtaatttattcaaaagaaccattcctgtaattaggatattgcttctgtgctggtatgcaagtatagttctgaaggccagccacctgttcagctgttcgtgtccctacttgttgtctttattgttcattcatcatcttaatggattgtgatcgtaattcctaatcgttttatgactgatttgtactgtcattataattgtcgaacctccaaaaaaaaaagttgccgtcgagcatccgaggtatttattagtttgagtgagtaatgggattcaccataacactgtaagcctgttactccaatgcctctaaagcatgtttttttc

SEQ ID NO: 2135 - DNA, 1484 bp, Zea mays
  Clone ID: 700204456_FLI
gcccaaggagggtcttgcgatggtgaacggcacggccgtgggctctggccttgcctccactgtgctcttcgaggctaatatctttgccatcctcgccgaggtcctgtccgccgtgttctgcgaggtcatgaacggcaagccggagtacaccgaccacctgacccacaagctcaagcaccacccgggacagatcgaggctgctgctatcatggagcacatcttggagggcagctccttcatgaagcttgccaagaagctcggcgagctcgaccccttgatgaagcccaagcaggaccggtacgcgctccgcacgtcgccgcagtggcttggcccgcagattgaggttatccgcgccgccaccaagtccattgagcgcgagatcaactccgtcaacgacaacccgctcatcgatgtcgcccgaagcaaggctcttcacggtggcaacttccagggcacgcccatcggggtgtccatggacaacacccgtctcgccatcgcagccatcggcaagctcatgtttgcgcagttctctgagctcgtcaacgactactacaacaacggcttgccctccaacctgtccggtgggcgcaaccccagcttggactatggctttaagggtgccgagatcgccatggcgtcctactgctccgagctgcagttcctggggaacccggtcaccaaccacgtgcagagcgcggagcagcacaaccaggacgtcaactcgctgggactcatctcctccaggaagactgctgaggccatcgagatcctgaagctcatgtcctcgacgttcatgatcgccctgtgccaggccgtggacctgcgccacatcgaggagaacgtcaagagcgctgtcaagagctgtgtgatgacggtggcgaagaagaccctgagcaccaactccaccggtggtctccacgtcgcccgcttctgcgagaaggacctgctccaggagattgagcgcgaggcggtgttcgcgtatgccgacgacccctgcagcgctaactacccgctgatgaagaagcttcgcaacgtgctcgtggagcgcgccctcgccaacggcgctgccgagttcaacgcggagacatccgtgttcgccaaggtcgcccagttcgaggacgacctgcgtgcggcgctgcccaaggcggtggaggctgcacgggcggctgtcgagaacggcacggcagggataccgaacagaatcgccgactgccgctcctacccgctctaccgcttcgtgcgcgaggagctcggagccgtgtacctcaccggcgagaagacgcgctctcccggcgaggagctgaacaaggtgctcgttgccatcaaccagggcaagcacatcgatccgttgctcgagtgcctcaaggagtggaacggcgagccactgcccatctgctgaacagagaaaatacaaggagcagaagactgtatttttagctaataatgctttttattcccaatttatttattgtcgttgatatgct

SEQ ID NO: 2136 - DNA, 707 bp, Zea mays
  Clone ID: 700204496_FLI
gatccggagcagccgcagtcccaccgaccccgccgccggtcgccctccatctcctcgccgctgcctctcgtttctcttttcaataatcaagatgagccgtggtggtagtgccggtggtggtcaaagttctctgggttatctctttggaagcggtgagccccccaaaccagcagtggcaccagctgcaagtgctccacctgttgagaaaccatctgctgcaaagactgatgcggccaagcaggttgctgctggggttaccagccaaaccaataactaccacagggctgatggtcagaacactggcaacttccttacggaccgtccttcaaccaaggtccacgctgctcctggcggtggctcttccctgggctacctgttcggtggcaactgatgcccgtgctggtgcgctcaccaaagttatcctcccctgcctgctgcgtgctatgtctgaatcgtgaacaaccgttgttgtcatttcatgtgtgtaccccgtgcaatgctttgtgcgcatggttgatttctctgtggcaaacttcccgtcctgcatggggttgtaagctgtctctaaatttcacggcaagtcgtgtgcctgaaccttcatcttaagttgttgtcgtatcccttcgtcttgtttcggttgcaccccgtgatggtatggattggttgctgaccacttgatctatctattctgcattttcctttgaaaa

SEQ ID NO: 2137 - DNA, 494 bp, Zea mays
  Clone ID: 700204510_FLI
ctagagagatagagagagagaggaaagctagctagctagcatggagagtgccagcaagaaggtcgcagcctgtgcgttggcgctgctgcttctccagctgatggtagctccgacgacggcgacagcccgcctcctgcaggcggatacctcccccgtgtttggcctggacatcattgcgagggagtttggccatccagatggagccatctactgtggtgaatcctgtgtcctcataccatgcatttcgtcagtcattggttgccgatgcgaaaacaaagtctgcgtgcacgactgaagaaaccttcttcatctctgatctctctctctcgtcatttgcgtgccataagttgctgtttccatgacgacccgttatgtgtgaagaaccagctccatcttttgtaacaaatttgtgttgggagaaacagaaagacggtgtgttcaacttattgtgaaaggtgatttaataataatatataataaacgggatacgttgg

SEQ ID NO: 2138 - DNA, 678 bp, Zea mays
  Clone ID: 700204545_FLI
aaaaactaaaatgatagtattgattcatccattcccttgtcctgttgtcaccctggcatgaatcttcgctagcaagtagtagtcgcacattgcaatccatcagcttgggaatttgcatcgcattattgctgcctttgtgcaaaagaagggaaaaaaatctggttgagtggcagatagctggtgccttggtggccgcttgtcatgctagttggtggctgccatgtgcctgacttgattgagatacgctgtgtgcaaaatggctgaggatttgctctagtacgggagtgggagagaatatgcgtgtttgcttgtcccaatgctaggttggtaaactacttaatttgttcaacaactagtggcgctcacgaatttcagataggtggtgatgagattcttgcttgacaaatgttccacttttattaatcattttttactaaaaacaatagtaaaaagccagaacaagttcgcgctgacctgcaatcatgaattattactttcccctattctttttgggctaaagtagtgcttttccagtttcactgtaattcactgtaatgtaatgtagtgcattccttctttgtttcacatcacaactcccgcaccttatcgtgtgcttgcagttgatgctccttattgatggatacctttgttccaccacgttctaatatttgatttctt

SEQ ID NO: 2139 - DNA, 1219 bp, Zea mays
  Clone ID: 700204547_FLI
ctcgtctcggctttctcgcctcctcggcggcagcggtgttccactcccatcgcgtcgggacatagaaagggggagcgcgggcgacacgcgagcgttagttgccatggacgcgcccttcttccacgagctcaggcggcaggcctcctcctacctcaccggcaagatccgctccgcgcggctggcgctcaccgacgtcaccccgacgcagctcatgacggaggaggcgacgaacggggacgcgtcgccgccgaacgtcaagacgatgggcctcatagcccggcaggcgttcgaggtcgacgagtacgtcaggatcacggacatcctgcacaggcgcttcgcgagcttcgaccccaggcaggggcaggggcagtggcagtggcgggaggcgtacaaggcgctgctcctcctggaccacctcctcacgcacgggccccgcagcgtcgcggtcgagttccagaaggacagggaggccatcgagcggatggccaccttccaacacatcgacgagagaggcttcaactggggacggacggtgacgagcaagtcggagcgcgtgctcaagctgctggagcgcggcccgttcctggaggaggagcgcgagcgggcacgcaagatcgcgcgcgagatcaagggcttcggcagcttcaacctcagcagcgcctcccacgccgcgccacagccaccaccaggtgacgagggaagccgcggctacggccggagcaactcgcagttcgagcagcggtggaggcacaaggacggcgacgacagcgacaaggagaatctgatccagagcccggagccagcacgggtcgcgcgggaagtcgaggccgagccggaggagccgcaccaccacccgttccacgggctcgggcaaaaacagcggccggaggcgatgctgctcctgagccagtgacgggatcagtcggttcgtgtcatggtgatatgaaaaagaaccgtgtgctctgctcgactcaactagcttttctccattcctcaaggctgcaggggtcggaggcagtgatgggatcagtcagtactttactgacactgcttggtgcaccatgcatgagaactttgatgtctcatgtagtagtcatgtctgcttcgccttgtaaataattctatgcttcagttcggatgccaggatgtaatacgagtctacgactctacgagacaacataaggctgtctccaacaatagcccgtaaattgttctgtcc

SEQ ID NO: 2140 - DNA, 872 bp, Zea mays
  Clone ID: 700204550_FLI
gggagagagtggtggggattcggcatggacatcatcacgcagctgcaggaccagctcgacgagatggccgtgctggccgtcaacaccttcggcacgctgcagagggacgcgccgccggaccgcctctccagcagctaccctgacccgctcaaccccaaccctaagcccgaggacgactccaaaccccaggtccaggcccagcccggcgcgccgccgccgccaccggcgcaggcgcaggcgcaggcgcagccgcccgcgcctgacctcaccgagcaacccaaggctatgagccgcgccctcgtcctcgcggccaagaagtttgatgcacttgttgcagcagtgccactatcatcagaagaggatcaagtgaaaagaatccaagagctacaggcagagaatgaagtcgtgggactggagctccagaagcaacttgaagctgccggtaacacgatccccactgtttctagagttcttactattatatgtctaattactgatgtcattgcgttacagaaagggagttgaagcaggttgaggtgctgtttaatgaagcaacagacaattgcataaattttaagaagctagattaattacgttaatgtttgctgaaaagaaactgttcctgtggatggagtgtggaggatgaatgccagtaagaactttatattccgtcttttcagattctctactagtgaacaataattgcacttagcttttgtgtactggcattctgatctgccggattaggattgacctttggttgtaaggtgcaatgtttttagtatgaactgacgcttgaactgtggtggtctttttaatggatctggcacctggcttcctctgggatttcttctatattttggtatttgttc

SEQ ID NO: 2141 - DNA, 1696 bp, Zea mays
  Clone ID: 700204574_FLI
ccaccacagcacagggacagcagcagtgccaccgccaccaccaacaccaaccatggcctccacagcgtccctgcagcgcttcctgcccgcctccccgcacgcgtcgtcccggcgccgcgccggccgcgcccgagcggccgtctccatcccgtcgtcgtccccgccggcgacacgggataatgaggtccccgcggagcggctggagccgagggtcgaggcgcgggagggagggtactggtccctcaaggagaggtaccggaccgggctgaacccgcacgagaaggtgaagctggagaaggagcccatggcgctgttcatggacggcggcgtcagggacctcgccaagatccccatggacgtgatcgacgccgccaagctcaccaaggacgacgtcgacgtccgcctcaagtggctcggcctcttccaccgccgcaagcaccagtacgggcgcttcatgatgcggctgaagctgcccaacggcgtgacgacgagcgagcagacgcggtacctggcgagcgtcatcgaggcgtacggcgccgacgggtgcgcggacgtgacgacccggcagaactggcagatccgcggggtgacgctcccggacgtcccggccatcttggacggcctccgcgccgtcggcctcaccagcctgcagagcggcatggacaacgtgcgcaaccccgtcggcaacccgctcgccggcgtcgacccccacgagatcgtcgacacgcgcccctacaccaacctgctctcctcctacatcacaagcaactcccaggggaaccccgccatcaccaacctgccgaggaaatggaacgtgtgcgtgatcggctcgcacgacctgtacgagcacccgcacatcaacgacctcgcctacatgccggccgtcaaggacggcaagttcggcttcaaccttctggtgggcgggttcatcagccccaagcggtgggccgaggccctgccgctcgacgcctgggtcgccggagacgacgtcgtccccgcgtgcaaggccatcctcgaggcgtacagggacctcgggttcaggggcaaccggcagaagacgcgcatgatgtggctcatcgacgaactcgggatggaggtgttccggtcggaggtggagaagcggatgcccaacggggtgctggagcgcgccgcggcggaggacctcgtcgacaagaagtgggagcggcgggactacctcggcgtgcacccgcagaagcaggaaggcctgtcgtacgtgggcctgcacgtgcccgtgggtcggctgcaggccgcggacatgttcgagctggcgcgcctcgccgacgagtacggcacgggcgagctccggctcacggtggagcagaacgtcgtgctccccaacgtgagcaaccggaggctggacgcgctgctcgcggagccgctgctgcagcggcagcgcctctcgccgcagccgtcgctgctgctccggggcctggtggcgtgcacgggcaaccagttctgcgggcaggccatcatcgagaccaaggcgcgggcgctgcaggtggcgcgggaggtggagaagcgcgtggccgtgccgcggccggtgcgcatgcactggaccggatgccccaacagctgcgcccaggtgcaggtggcggacatcggcttcatgggctgcctcaccaaggaccgcgacggcaaggtcgtcgaggccgcggacatcttcgtgggcggccgc

SEQ ID NO: 2142 - DNA, 2125 bp, Zea mays
  Clone ID: 700204616_FLI
ctaatccacagctcatcgattggatccatcactgttcgtcaacaatttctatctgattccatctgcacacagatttgtttatatattttaattaaaaacagtttaaattagatttttgttcgttggccaatcattttacacttgtattttttaaacatggcttcttctggtatgaatgtagtcaaatatgtttttggcttgttcaacttggctttcatgattggagccggtgttttgatctatttcggtgttcaagtgttcatcggagaaatcacagttgaacacgaaatcattagtcgtcatgctcaagctcaaacggtggccattgttctgatcacttctggagcaatcgtctttgttatctcatttttaggctgttggggtgcttttcgggaaaacacttgcatgctgctcacatttggctccattttgggtgcaatcgttttcactcaaattctcttatgtactcttatttttgtattccgagaagaggtacatgaaaaagcgactggtgaactgctgcccgaaatcattcgcagctacaatttcacagactcagctgatcgtttgaccaaagtggtagatgatatgcaatctcgattccactgctgtggagtgaatggttcggatgattggaaaactggcattccattctcatgctgttcagattacactccttctcttctggacggaactgtccaaacagtgcgctattgcccgaatgatctgcgacagccagcttattctcaaggctgtttcagcaaagttgtgaatgcagtcaacgctcactactggtatctggcctccaccgtcgtctcttttgctctcattcaaattatggcggtagttcttgcttgttgcgttgcttattcagttaaaaagcattatcaaacgatttagattcaatttcttcttcagcacaatttgtttattcttttttacgattttttttctctttcatttgtcgaccatttacattttgtttgcttatacaaataaacgcactttaattttcatcgttttactgtttgtttgcccaccgactcggtttcgaatctttcaccgcagacgattcggcgttcgactcgcaattcaagcctcaatctcaatgtaatttggctttcagttggattgaggcggctcaagtccaatcattttgtgttcactcaccagtacaagtacaatatttatgccaatttgcgcctgtttcttcgcatttaaacgcattgttttatcctgctttcaaccagtttaaacctattaacggtttgattgtgcaatcgtctttcggttgcaagtcctgtagctagagcagcaaccttttgcttgctttttgattaactctctaatcaatgtcttgctcagcaagctcaaactgattgattttcatttcggtgctgttcggtttgtttccgaagtgcttcgaattcacggttttgcatccaccattactacacctttaatgttttctctacacaaatggtcttttcattaaaaccaaaacaattcagagttccggctccaagctgtatcttatttgtactcattcaactcatttgtcatgtttcacttcttaagcagcctggctcgctttgcacttgacattgtttttcgtattcacaattatgtcacatacacacaaacaagtacacgcacacatgatcatctttaatttgctttttgtttttacatttacattacttcaaaagccaattgtttaccggccaaatccatttcgattatgattttcaaacatttaacttattaatcaaattttgtactaaattataagcaatcgaatatcgtttttataattacattttaaataatttaaaccggattcactctaatttttgctcattttacgctttaactcttaataaaaatgtcaattaaattaaaattaatcttttttaaatatttttaattgtaaatcgagcaattagattaaaataatataaatcatttttcgcaccctttttcaaatttaaatgtaatttaattaaaattctaaacaaaattgtattttcatgtctccaaaatcatagttgatgttacaattatttttccaaacgtacttataaattcagcgttttgctaattaataaaataaaactttttaact

SEQ ID NO: 2143 - DNA, 1033 bp, Zea mays
  Clone ID: 700204669_FLI
gtcctcgtcctcgtgcccatctctgtcccaatcaaactgattgatccgtcgcccgcagggccacagcagccgcggcgaggtcgtccgtcggattcggaggctcaggcggaactgcaccccatggaaatggaatcgagcgaacttacacgctgcttcgcaaccgtattatgcagttattactgaaaagataatacagtacctatggcttctctggacgccgtgcgaggagacctcgccctgctgattctgtacctgaacaaggccgaggcgcgggacaagatctgccgagcgatccagtacgggtccaagttcatcagcaacggcgagccagggcctgcgcagaacgtcgacaagtccaccagcctggcccggaaagtgttccggctctgtaagccctcctgccaaggggactccgctcccgctgatcctactcgggaagtccaagaacgcgatgctgtcgactttcctcttcctggaccagatcgtgtgggcggggaggacaggaatatacaagaacaaggagcgggcggagttcctcgggaggatagcgttctactgcttcctcggctccaacaccttcacggccatcatcgagctagccgagctgcaacggctgtccacgtcgatgaagaagctggagaaggagctgaagcaccaagagctgtacaagaacgagcagtaccgcatgaagctgcacaaatcgaacgagcggctgctggcgctcgtcaagtcgagcctggacatcgtggtggccgtggggctcctgcagctggccccgaagaaggtgaccccccgcgtcacgggcgcgtttggtttcgccagctccctcatcgcttgctaccagctgcttccaagcccaccagcaaagcagagcaagtgaggactccgactccaagcactgtttaccaggaaaataatccccccggataggtttgatttggttgccacatccccttgtatggcagactagactaatatatgtaatcatcatcataataattgataaaccatcccactatggataggtttggtc

SEQ ID NO: 2144 - DNA, 673 bp, Zea mays
  Clone ID: 700204680_FLI
gtcctcgtcggaggacccgtcactttcccccgggtatccggcggcgtcggcgacctcccctgggcggagccgttcaacgcggtgtccggccagctcgcggcgctcggcgacggcgaggtggcatcgttagacgaggccgtccggaggctcgcgtcggcgctggacgcctccggcgagggtgctgccgacgacgaggcggccgtgcgcgctgcggcgcaggaggcggagaggcgcgccgaggaggtcgcgccgctgctggaccacctgtctgacgccgtcggcggcgtgttccgcgccgcgctgggcctccgcaacgccgaggtggactccttcatggtgggacccgcgggtaagccgtgtagcacataaccgtcgcttcgtgtggactactcgtagctgtctgtctgtatagtgtatacagtagtgtactgtgataggggtactgctacagctcagtggagagttgagtcgtgcagtggatcagtggaaatcatgtatgttagtgtcaacgacgaggatgaggccacagatcatacatgcactagttgcatcatcttgggtacgtggcatcctgtgctgtacgggaaggggagaacgttgcaatctggccgtgcagtttcgcggcacgtaacaacaacagtatgtgtgtataatttgtggagaagtgagttgc

SEQ ID NO: 2145 - DNA, 519 bp, Zea mays
  Clone ID: 700204732_FLI
cttcggtgctgcattggggaaggggagacaggctgcaaagactgagatagaaaagttgaaactttcggagcttacctgccgggaaggcattgttgaagttgcaaagataatttatggagtgcatgacgaagcgaaggacaaagcttttgagttggagttgagctggatctgtgatgaatcgaaccgtcagcatcagaaggttccaaatgaactgttggagcaggccaaagctgctgctcaggcagctcttgaggagatggatgctgactaagaaacaggacgatttgcccagacttggtgtttttggtgctgttgaaatctccgatccctttggggtgacccactggacatggccaatttgtcacaatttattattttgacccatgtcatgtcaaactcctttagttgaagtctggtatctagattgacttgtatcagagctgtggtttacgcagactggattctggagtactggactgtgtgtgtttttcggaattgtgcatctgacttttagctgtt

SEQ ID NO: 2146 - DNA, 1014 bp, Zea mays
  Clone ID: 700204742_FLI
accgcgccatatatagccgcagtaagcaggcgagaacgacgaagaggtcacgcaccacaccgatcaatccagctcgagcgaccgatcacgtgcagcacagcacagcacagcggtgctcgatcggcgaagagagatgacggggttcgggtcaccgtgcggggcgtgcaagttcctgcgccgcaagtgcgtgcgcggctgcgtcttcgcgccctacttctgccacgagcagggcgcggcgcacttcgccgccatccacaaggtgttcggcgccagcaacgtgtccaagctgctcgcgcacctgccgctcgccgaccgcgccgaggccgccgtcaccatctcctacgaggcgcaggcgaggctacgcgaccccatctatggctgcgtcgcccacatcttcgcgctacagcagcaggtgatgaccctgcaggcgcagctggcgtcgctcaaggcgcaggcggcgcaggggcagcagggcgtgcacgaggacgccaagggctacgtgggcagcgccgccgcggagcagctaggttacggctacccctggtgcagcggcaatggaggcgccgcagcagcagcaggcgccgtgggcgcgcccgccgcgcagccgggcgcgtacggcaatggcgcgcacgagtccctgaccgcgctgctggggtcgtcggactacatgcagcagtcgctgtaccacgcgttcgagcaggccggcgcggacgacgacgacggccggcaggggtacggcttcgaggcagcggcggagtcctcgtcgctcggggcggaggagagcgggtggaggtcgtcgtcggggtaccaagactgcgaggacctgcagagcgtggcttacgcttacctgaaccatcgctcgtaagaactgagaactactactactacaagagagagagagagagagatagatatatagacatatctgtcctcaattcctgatcatgttttggactttagcctggggaaatatatgcgcgattttcgatcgatcagtcgatcggtctccgctac

SEQ ID NO: 2147 - DNA, 1403 bp, Zea mays
  Clone ID: 700204754_FLI
cgtggaccaaggccaagcacccgctgcactcggcggcgctgacggggatgtgggagtgccccgacttcttcccggtgtccgggccggggatgcaggccggcctcgacacctccgcgcccggaaggaagtacgtgctcaagagcagcctcgacctcacccgctacgactactacaccatcgggtcgtacgacggcggcaaggaccggtactaccccgacgaccccgccggcgactaccaccaccgccgccgctacgactacggcaactactacgcgtccaagacgttctacgaccccgtggagcgccgccgcgtgctgctcgggtgggccaacgagtccgacagcgtccccgacgacaaggccaagggctgggccggcatccatgcgatcccaaggaagatctggctggaccccaccgggaagcagctgctgcagtggcccatccacgaggtcgagaagctcagggggaaggccgtcagtgtggacgccaagctggtcaagcccggcgaccattttgaggtcacaggcatcgcaacttatcaggctgacgtggaggtgagcttcgagctggaggcggggacaagcctgctggacaaggcggaggcgttcgacccggcgtacgacgacgacgcgcagaagctgtgcggcgtcaagggcgcggacgccaggggcggcgtggggccattcggcctctgggtgctggcctccgccgacctgcaggagcggacggccgtcttcttcagggtcttcagggacggacacggcaagcccaaggtgctcatgtgcaccgaccccaccaagtcgtctcttagtccggatctgtacaagccgaccttcgcgggcttcgtcgacgccgacatctccagcggcaagattgcccttagaagcttgatcgatcggtccgtggtcgagagcttcggcgcgggaggcaagacgtgcatcctgtcacgggtgtacccgtccatcgccgtcgggaaggacgctcacctctacgttttcaacaacggcgaggtggacgtcacggtgtccggcctgaccgcctgggagatgaagaaaccgctgatgaacggcgcctgaaattgaagggaggaaaaaaaaagtcttatccggccgccacgtgactttctttattttcgttcttcttcttcttcgtcaacacacgtctctgccgccaaaggagaagaaattgattgatttcaacgtacgtatgtgtacgtctgctgccgatcgaaagagaattggattattataaaattgtttgaggccggtccttccattttctcgtcctaatttcctctggcatgcaggatcagtgaccgacgacttgtagtttgcttgagcatgttgtttacgctgctagcttcttgttgtacgatacacatacaacaatatgacacgatgaat

SEQ ID NO: 2148 - DNA, 1778 bp, Zea mays
  Clone ID: 700204782_FLI
ggcagctgggcttctctcccgactcccgagcagccgagctctcctgctcggcctcgcctccgccgccgcctgctcgagcgggcggcacccagctccctgcatcttcgctgcggcgagggggtacacgatggagggagctggaagagatgccaaccctttgggcggttaccgaattggcaaaaccctaggaattgggtcgttcggtaaagtgaagatcgcggaacatatattgactggccataaggtggcaatcaagatcctcaatcgccgtaagatcagaagcatggaaatggaagagaaagtgaagagagaaatcaagatactgagattatttatgcatcctcatatcatacgcctttatgaggtgatagatacacctgctgatatttatgttgttatggagtatgttaaatctggagagttgtttgattacattgttgagaagggaagactacatgaagaagaagcccggcgcttttttcagcagatcatatctggtgttgaatattgccataggaacatggttgctcaccgtgatttaaagccagagaatcttcttttggattcgaaatgcaacattaagattgctgattttggcttaagtaatgttatgcgtgatggtcactttcttaagacgagttgtggtagcccgaattatgcagcacctgaggtcatatctggtaaactatatgctggtcctgaagttgatgtctggagctgcggcgttattctttatgctcttctttgtggcactcttccatttgacgatgagaatattctaaacctttttaagaaaataaagggtggaatatatacccttcctagtcatttgtcaccttcagcgagggacttgattcctagaatgctggttgttgatccgatgaaaaggattacaatacgtgaaatccgtgaacatgtgtggttcaaaattcaacttccgcgctatttagctgtaccgcctccggacactgcacaacaagttaagaagctggacgaggaaacccttaatgatgttattaagatgggttttgacaagaatcagctaattgaatctctgcacaacagattgcagaatgaggcaacagttgcctattatttactcatggacaataggcttcgtacaaccagtggttatcttggatctgagtttcaagaatctatggacccatctttctctcaagtacatgctgaaacaccaacttcagcaactgaacatcgacagcatgtgtttacagaatctccggggtctggtttgaggcagcattttgcatctgaaaggaaatgggcccttggtcttcagtctcgagcacatccacgagaaataataagtgaagtgcttaaagcactgcaagaactgaatgtttactggaaaaagattggacactacaacatgaaatgcagatggagtcctggctgccttgagagtatgatgcataactgtgatggctttagtgcagagtctgctataattgaaactgatgatctcatagcgaaatcaacccgtatagtgaagtttgagattcagctttacaaaacgagggatgagaagtaccttcttgacctgcaaagggtcagtggaccacaactcctctttctggacttgtgttccgcctttctaacgcagctgagagttctttgagcctgatgacatgattggcttcccaagcacaatccttgatgcacccaatggactttcaaattacattcgtgctgtacataatggccatatataatcctccagtagattatattttctggagcatgtggaccttacaggt

SEQ ID NO: 2149 - DNA, 461 bp, Zea mays
  Clone ID: 700204790_FLI
agcccggatgagaaaatgtggagggaactgcagggtttcttcttagtcccatgaatggtatcagggtactgggaagaaatgttgtttggtcaaaacagctggactctgagagctcagacgggcgtaacctaaccatcaagcgcaagcggcagtacggtcacgtctccagacgggcgttacctaaccatcaactgcaagctggtagcctggtagtaatactggttcacggctgcctgcatgcaagttcttttttcccctgttgaacaagtttatttatctcattacccgctgaagaactcaacgcacagcaagctaagccgtttggttaatcatcgaaacaatggatacctctaatcttcttcaaagtaagccatgtacaaaagggacttaggtccttccctgggagatgtctgtaccgatggactagcttgactttagtgatgtagctgttacctggtctt

SEQ ID NO: 2150 - DNA, 249 bp, Zea mays
  Clone ID: 700204825_FLI
ccgaaggccaagggccccatcctcaagccatgcggagtcgagtgctgagctcacctagctaccttcttgttgcatgtacggacgccgccgtgcgtttggacatacaggcacttttgggccaggctactcatgttcgactttttttttaattttgtacaagatttgtgatcgagtgactgagtgagacagagtgttgggtgtaagaactgtgatggaattcactcaaattaatggacattttttttcttc

SEQ ID NO: 2151 - DNA, 2248 bp, Zea mays
  Clone ID: 700204848_FLI
gttgttctactgcagattgctgtgccaacaagaactgacgtccctgaatatcaaaagctaacgagccaagtgcatgaaattgttgggcgcataaacggtcgatttggaacgttgactgctgtccctattcatcatctggaccgatctcttgatttccatgccttgtgtgctctttatgcagtcactgatgttgctcttgtaacatcactgagagatgggatgaaccttgtgagctatgaatatgttgcatgccaagggtctaagaaaggagttctgatacttagcgagtttgctggggcagcacaatcacttggagctggtgccattctagtaaacccttggaatattacagaagttgcagactcaatacggcatgctttaacgatgccatccgatgagagagagaaacgacacagacacaactacgcacatgtcacaactcacacggctcaagattgggctgaaacttttgtatttgagctaaatgacacggttgctgaagcactactgaggacaagacaagttcctcctggtcttcctagtcaaatggcaattcagcaatatttgcgctctaaaaatcgtctgctcatattggtattactatatttcttattgcatacttgatagtcatggacattttttttccatcataataactgggtgttctagtcagaaaatgactcacttgtatccggtagcaactctgttctatgtagagtcacttcgaacagttgcttcttttgctcttctgcagctactgtcttcattctggttgttgccttacattttctggtagactagatcatcatggcacatttgtggcatatcaagtctccagtaaatctttcactttcgaatttccacaagaaggctttctggacccatgaactctcaactactctatgagtcacattcgctgttatttgacagtaacaatttcaacaattcctgttatctatacatgaccggatgtagggtttcaattcgacattgactgagccagtcgaatcctctgggagaaggggtggtgaccaaatcaaggaaatggaactcaagttgcatcctgacttaaagggtcctctgagagccctctgtgaggatgagcgcactacagttattgttcttagcggcagtgacaggagtgttcttgatgaaaattttggagaatttaaaatgtggttggcggcagagcatgggatgtttttacgcccgacttacggagaatggatgacaacaatgcctgagcatctgaacatggattgggttgacagcgtaaagcatgtttttgaatactttacagaaagaaccccaagatcccatttcgaacatcgtgaaacatcatttgtgtggaactataagtatgctgatgttgagttcggaaggctacaagcaagagatatgctgcagcacttgtggacaggtccgatctcaaatgcagctgttgatgttgttcaagggagtcgatcagttgaagttcggtctgttggagttaccaagggtgctgcaattgatcgtattttaggggagatagttcacagcgaaaacatgattactccaattgactatgtcctgtgcatagggcatttccttgggaaggatgaggacatctacgtcttctttgatcccgagtacccttctgaatccaaagtaaagccagagggcggctcagcatcacttgaccggaggccgaacgggaggccaccatcgaatggcaggagtaactccaggaacccacagtccaggacacagaaggcgcagcaggctgcatccgagaggtcatcctcatcaagtcacagcagcacgagcagcaaccacgactggcgcgaagggtcctcggtccttgatctcaagggcgagaactacttctcctgcgccgtcgggaggaagcggtccaacgcccgctacctgctgagctcgtcggaggaggttgtctccttcctcaaagagttggcgacagcgacagctggcttccaggccacctgtgctgactacatgcatgttcttggataggcagtaaatagactgaagttgaagcctccgtgctttaccagagacagagagaagaagaatattcattcctcgtatgcgcgacagagctacacccgtagctagtcagcgtgctgtacaatcatgtacaaaatttatgctcgtgataaaactgcgagaggggagctagcaaatgggaaaggataaaggagtttagttgcttctggtacgagacacaatcgcctgattttgagttctcttc

SEQ ID NO: 2152 - DNA, 1143 bp, Zea mays
  Clone ID: 700204871_FLI
agttgctaaagagacagaatttaatctatggggatttatgtttattatgcttgctgctgttatggctggtttccgctggtccatgactcagattcttctccagaaagaggaatatgcattaaagaatccttttaccttgatgagtcatgttgccccggtgatggcaatagtaacagcaattatttccatcgtgatggatccatggcatgacttcagagcaagtcacttttttgatagttctactcacataataagaagcagtgtgttgctgcttctaggtggggctttggcctttttcatggttttgacagaatatgtccttgtttctgtgactagcgctgtcacagtgactgtagcaggaattgtgaaggaagctgtcactattctggttgctgtgctattctttaatgatccatttacatggttaaaggcgcttgggctggcaataataatatttggtgtcagtctattcaatatttacaagtataaaaggttcaaaaaagggcatcacagtgaagatgctgggacaaatatccaatcttccaatgggacttcaaagtacgttatccttgatgatgatactgaagatcaggatgatacagggtgacctgaatatggtagaatgcagactactatatgcactggcgtttccagagaagcaagatcttctggtgcctgcatagacttacttccacaggctaactgatttcatactattttttgagttgatcaaccgctgtggccaggccaaccatgcacgagcgtgacgcttgcagccgtgtgacaagttgagaagactacacgctcgtacatggaacatacaagatacagcctgataatcagtacagatgttttctcctttcgttcaaaacaaagaacggtgcatatatctgaacggtgcatacaagattctgcagtatgtccacgaagaaaatgttgcatcaattacaattagaaacacagctaacacacttaactttatggatgaggatagggttcggttttgtagtgcattctgattggttgaagggagattcagcatcggaacatagctttcttttctttagttctttctcttttttttgttgagatgaaaataaatactactaacaatcttatatgtaataatgttgtatttacggg

SEQ ID NO: 2153 - DNA, 736 bp, Zea mays
  Clone ID: 700204883_FLI
cgcgcgccgcggcgggacccgggaggagcgccggtggtggtggccggcccgatggagtgggggtcagcggcgtacacggccgcgacgctggtgtgcgctgcggcggcgagcgtggtcgcgctcacgcacatctaccgccacctcctccactacgccgagcccatctaccagcggttcatcgtccgcatcatattcttggtcccggtaacgctctccgcccgccgctcacacccacaacaaaccctcgtggccaagggcgccctcgcgccagatctgtcgcctgccttcgctgtagcttttccgtatcggatgagctcgaggggtacggcccggtctgggttagtttcctggagaggttcccatgaatgttaggttgcgactgcgatggaattgaagtacaagtactcggtggaaagctttgctggtgcatgtgattctgactagaaggcgaatatagagccaccaccgtgcgctttgatgcgtgcaactgaattcactgatgttctgcggaggcgcatctgatcagtgtggatttctgcaacttgtagttttatcccgagtgttatgtttgggtcataggatatgtattaacgtgtatacattcgctctatcgttatggtccacaagtgaatctatctgctgcagctgtaagatggcttgcagtttgggaaatgtaagaccaagagtaatcatttggtacaacttctgcaacactaatgccaaacttccagcttgg

SEQ ID NO: 2154 - DNA, 954 bp, Zea mays
  Clone ID: 700204926_FLI
gctgattgttttgccacattagagattatccatcacctatggcctagaattcctggcaagttcaaagattatatcaacagccccaaacccaacaggtatcagtccctgcacacggttgttctcactgaacaaacgctgccactcgagatccaaattcgtacgagggacatgcatttgcaggcggagttcggaattgctgctcattggagatataaggaaggtgaacggagttgctgcacctctgtttctgaaattgttgagtgggtcagatgggttacatggcactgtcaaactctgaacacaggctatccttcatcacttgcatgtgatgcttcatcgaaggaaacgcacactatcccatctcactctgaagcctgtctgttgtcctactcaaaacaatgtgatcacaaagggcccgtactagtaatacttctggagaatgaaaagatgtcagtgcaagaaatcccccaaaattggacgatactggacctactgaaaaggtcttcaaactatgggatgccgttgaggctgaggctgaactgccatgccgtccacaactggaaccaggagctaaaaatgggcgacgtgcttgaactgatcccttcgaccccatgcaaatccagaggtcgcacgagggagctccaccagaagtttgatcaccgtctcgccgtttcccagtcctgacagccttagaacaccgtaccttgtaaatacatgacgtgaacccatataaatcatctgaagtttagatttcccctgtgcagacaaaatagagatgaggagtcatcaaaactctgtaaccgtcgtatactcattcaagccaaaacaagacagcatgtaatgtaaatcagtatatacatgatacacagggttttagctcaggaaatgacaatgtataccgacgacggtgcgcttacggtttttagtagcaaaaggaccttttgtcttgtgctt

SEQ ID NO: 2155 - DNA, 639 bp, Zea mays
  Clone ID: 700205025_FLI
agcgagggcggctccggcggcacaatcatcgactccggcaccacgctgagctacttcgtggagccggcgtaccaggtgatccgccgcgcgttcatcgaccggatgagcggctcgtaccctccggtcccggacttcccggtgctcagcccgtgctacaacgtgtccggcgtggagcgacccgaggtgccggagctgtcgctgctgttcgccgacggtgccgtctgggacttccccgcggagaactacttcatccggctggacccggacggcatcatgtgcctggcggtcctgggcaccccgcgcaccggcatgtccatcatcggtaacttccagcagcagaacttccacgtcgcctacgacctgcacaacaaccgcctgggcttcgcgccgcgccggtgcgccgaggtgtagccgccgccgagagcctgcccgagaggaccaacaattccaactcggtcctcggcttgattgaatgcattgggtgtagatactttttggtcaaagtataaagttttgttttttttttctctttgcacttttcaacgaggagagaagataggaacgttgtagtgctagagcctagaggtcgttgcaacgggaaacacgggatttgaataaatggctaaaattgaggattgc

SEQ ID NO: 2156 - DNA, 667 bp, Zea mays
  Clone ID: 700205038_FLI
aaatatctccgtgctgtcgtgcagggcatcagcaaaggcgtggtagtggacagcctcctgtcgtcgatggtgaggacggggaagccgccggacttcgtgctgtgcatcggcgacgaccggtcggacgaggacatgttcgagagcatcgtgtgcccggcctccaacagcggcgtgaagctgccggccagcagcgaggtgttcgcgtgcacggtgggcaagaagccgagcatggccaggtactacctggacgacacggtggacgtggtcaagatgctggacggcctggccagcgcgccgtcgcagcagcggcccaggccggcggtgcagctgcgggtctcgttcgaaggctcgctctgagggggaagaggagaacacacagcgctagtagcagcagtaaacagcaaacatcgagcaaggataaccagtggtgatgaacacaacgagattcagcagacggcgtggtgtaggattgattagctgcagtttacaggatcgacattttttttgctttcttctacattactaccccaaatctttcgtgcctgtatatgcccgcatggtaatatgcaaagaataacgtttcgaccaccaaccaccattgtacatgtagttgacgatgacgacgagatcagaaaaggagaagtggggaaaatgattctttcactct

SEQ ID NO: 2157 - DNA, 512 bp, Zea mays
  Clone ID: 700205048_FLI
gcgagacgcacccgtggcacctgcacggccacgacttctgggtgctgggctacggcatcggccgcttcgacccggcggtgcacccggcgtcctacaacctcagggaccccattctcaagaacaccgtcgcggtgcacccctacggctggacggcgctgcggttcagggccgacaaccccggcgtctgggcgttccattgccacatcgagtcccatttcttcatggggatgggcatcgccttcgaggaaggcgtcgaccgcgtcgctccgctcccgccacagatcatggggtgcgggaaaaccaggggtggccactaactgatgttgttcagaatctgaactcaaccaccgttgatccatttcgttcttttgtttcttattattacagtccatctaataagatttgtatgggcattttttttatcacaatcctatacgattcgggaacaatgccatgtgcatctttttacaggcactgcacggtactcgaccggtgatctttatcggggttag

SEQ ID NO: 2158 - DNA, 762 bp, Zea mays
  Clone ID: 700205079_FLI
gtgccgtccaccgaccaccggtgacacggcgccgatagcaagagttcaggaggagcgcggagccgtttctggtggtagcggtgtccgtgaggcgcggcgagatgtctgtgcggataaaggcggtggtggacaggttcgtgatggagctcaaggaggcactggacgcggacatccaggaccgcgtcatgaaggagcgggagatgcagagctacatcgcggagcgcgagcgcgaggttgccgagagggaggccgcgtggaaggccgagctctcccgccgcgaggctgagatcgcgaggcaggaggcgaggctgaaggtggagagggagaacctggagaaagagaagagcgtcctcatggggacggcttcgagccaggacagccaagacggagcgctggagatcaccgtcagcggcgagaagtacaggtgcctccggttctcgaaggcgaagaagtgagaggttgaaccaggacgacacagtcactcagggtcaggggggggtagtggtacaccgaaatctcagtttggaggctagtgtaagagtatctgtcaatctggcacacaggctgtcgctgtacgtgctggtttgatgctcactgcgtcgtgcgtcctcattgatgattgaacgatggcgggtcattgaaccagcgcacaacctgagaaaatggttgcgctgtccgtcctggggtcacggtattatgaacctcagaactgataacctctgtttcggatacaatcgggttgaatgggagcgtttcgtgtgc

SEQ ID NO: 2159 - DNA, 911 bp, Zea mays
  Clone ID: 700205091_FLI
atttgatcctggagactgtaatattttgattacgtcgggcagtgatcggagtctgacactctatgacttgcgtatgtcatctccagctagaaagctaataatgaagacaaggtgcaattcagtatgctggaaccctagagagcctatgaacttcactgctgcaaatgaagacacaaactgttactcctttgatgctagaaaattagatgaagcaaaaattgttcacaaaggccatgtttcagcagtgatggatattgactactcaccaacagggcgtgaatttgtcactggttcatatgatagaacagtaaggatttttaattatcttggagaccacagcagagagatttaccacaccaagaggatgcaaagggtgttttgtgtgaagtacacctatgatgggacctatttagtctctggcagtgatgatacaaatcttcgtctgtggaagtccaaagcttcagaacaacttggagttcttcttccacgggagcgcaaaaagcaagagtaccaggatgctttgaaggagcggtacaagcatctcccagaagtcaagcggattgtaaggcatagacatctaccgaagccaatctacaaggcagccaacctacggcgtacgatgatcgaagctgaaagccgtaaagaggaaaggaggcgaaagcacagcgctcccgggagcatgcctgtgcagcccttcaggaagcggagaatcatcagagaagttgagtagacatgcggtttgcattgcatggtcgtggtgtttgtgtttctgaggcgacacatgatgtttcctttgggagttgagctccagttttgcccttcgtactacatatatgtgctgcatcaatcactttgtttgactagttattattgtgtatttgaaataccacacaaaatattcatatcgtgcc

SEQ ID NO: 2160 - DNA, 551 bp, Zea mays
  Clone ID: 700205154_FLI
gtccggtcgggccgcgtacctggttcgaccagaccagaactcaaccggtcgcgcttccttcttcaccctcagtcctcttccgtcctcctcctgtccaccgccccgtgcagttcggcggcgacatggcggcggccggcgacctgtccgacgatgagaagcgggcgatgaggggcagcaagttcgcgccgcttcctccgcctcctccctcttcccgcccccagccgaggatggcccatcctggaggagcactaaccacaaacaaggctgctgctttagcaaaattcctcgagagaaaacttcagcaacctgatggcttggactccctggaccctgaccttgtaaaactggctgtgaaaaatgcaaaggaaaccataaaagctagcaatggtgagccttcaacttcaggaagagtagtacgacatgtttcctcatttgtggatggaactgaggattctgaagatgaagcagaggttaaggggatcaaaagaaaaaggaaaaataagaaggttaaaactcatcaaggtgacaaacaacagagcaagaaaaagaag

SEQ ID NO: 2161 - DNA, 807 bp, Zea mays
  Clone ID: 700205181_FLI
cctcgcgtacgcgacaaactaggccgaccgccgccgccctacgctcagctgcccacctgccctggtcttcgactcttcgtcgtgcgctttgccggcggcgagcacccatcacaccaggtgctttattgggtccgtccatacggcaggatggcgctaaggggggtctggcagctgcagaagctcgtggtaaactactgcgactggggagggagcagcaggggcatcagggccttcatggaggcacatcttccagcctttaaggaaaagaatccacacttagaggtggtgacagagcttgtccgcggtcaacatcctaacttgaagggaatttacaaaaaccataacgagcgagtggtatgcgtgagaaatttaccgccagaggaaatactcctgcaagccaccaggctaaggaactctctgggcaggaaagtggtgaagctgcggaccagacatgtaacgaaacgccccagtgttcaggggacgtggacgacggaactgaagatgtgaagcaacaagccaaggtgtttcattgttctttggtggtctgattgcagaaaatgtcagctgtgtcgataactttggtagagctgccgttaggcttgcctgtttgaatagctaaaccgtttactccatttgttccggagtacaatctggtaataacataggagtacacttgactttcttagaccaggccgtcacatttgatatttcagtctggtgatatctgtctcctatattagaccagtacaatgtttcaactcgcgagatactgcgaacacagaattttgctatgctatggccattacc

SEQ ID NO: 2162 - DNA, 738 bp, Zea mays
  Clone ID: 700205315_FLI
gcgagagaggctggtgggtttcacctttgccgcggtcgtgaaacggacagcgtgtctgttcaacggcacctccaccgcaaattgctggttccctgtcggcgtcgcccagatggattcttgggtatccatgaactacgaaaaggtgcacggtcagctgcagtcgatcagatcgaagatcaaagagctaggaagcaggatcgacggatactccgacgtagaaagctgcccctactgctcttcgccggtccgtttcgagtcgcctgacgtggccatctgcggagaaaggcacacgctgtcgcggtgcaggacatccatgaccctgtgctccgtcgcgcagccagtgtggcactgctcgtgctgcgggggcacggtcgacaagctgctgccggagtcgttcttcaccatgcctttggacgccgtccgtgacgacaaaggatcgctcgatctgtcggcagcctccgccccgctttgccccttctgcggcgtcctgctgcagaggtcgatgccggcgttcctgctctccacctcgccggtatagtcttcggatgcccccaggtgttacatgcagtagcaatgcaatgggaatatcgtagtggagccaactaccaagtttgttgtagctgatgctgtatggctgcagagtggcagtgccgtcattggggctcgaaatgtttgtgataggttttgtgacttctttctgcttagcccctctaatatatctcgagatacctatttttt

SEQ ID NO: 2163 - DNA, 1396 bp, Zea mays
  Clone ID: 700205368_FLI
gctctctctcccgctccttcaccctcgcacgtcgtctctttcctcgcgagcgacgcgcgcttctcacccgcctcgccgatggagacgccgctgtccaccaggaggatcacccgctcgctggccgccgcatccgcccagaagatcgtcgccgcagggatggactccgccgccatcttctccctgtccaagaacgccgccgcgggggagacacacgcacagacgcgcgcggcccttcacgacatcaccaacgactcccccgtcgtcggcctcgccacgggcagcctccacgccaccgacaccacccccgccaagacccgccgcagggccccgcgctgcacgccaggctccggggaggcgctcctgcgcggccaggtcaaggcgctcctgcacaaggtcgacgaggagcagggctgcgccgccgccggcgccctcgtcaggcccaagcgcatccaggcgctgctcggggtctccaggtccccggcccagcttcttgcgcccacgccggccaacacgccgcagatcggccccgtctccgcgcccagggaaggcgtcgggctgcatgacggcgccaccgtcgtgccctgcgtcatcgacgaagaggaactgctgattcctaagcttcaggtcattgcaggttccctccctccacctcagccagaggagaagctgggcgagtgccagctgaaccgtgcgctggtgttcgacgactcccccgacaattccgacgagtccagcggatcagccgtcccgtcatccgtctccctccaggagggcagcgccgggaagacatcgtcacctgaggagggtgacagctcctcagcctggtccactcaggtccatgccagctccgagaagggcgatcaagaagagctggacgtggaggagctggcggcagattacactgaagaagaggaggatttcgaggaggaggatgactgggaagaagacagcgatgacggctgctacgatgatctgtgcgatgtgatgagcaggatgaccgtgttggatgaaggggagaagaagaccgggctgccgcagttcgaggggaagcacaccaggttcatctacaacagtgacgacgagatcgagcgggaggaagtggccgatgcggctgaagctagggcggagctcggcgcactgatgctcagggggctgccggttccggaggggaggcacctacgcttccacgacgacgaggatgacgaggaataagaatgttcagattgggtatcggcagtggttgtctttccctgacaccagccagccaaaattcttcttttgagggggctttgtttctacaatcgggttcagagagcaaatagctcttttgcccattcacaactcaactctttacgaaacatagtactatttcctggttactcagttaggttatttc

SEQ ID NO: 2164 - DNA, 783 bp, Zea mays
  Clone ID: 700205405_FLI
cgcagagctcattgctcctagcgccgatgaggttgtcgctgtttgcctccccgttggttgctctgcacgcacgccaccgctcccgatgttgcttcagttggtgaaacagcttgctcctaagattgttgtggctattgaccacggcagtgaccggggtgacctcccgttttcgcagcacttcatgaattgcttccagtcctgtatgttccttctcgactcactcgatgctgctggcaccaatgcggatgctgccagtaagatcgagaggtttctgatccaaccgagagtagaggatgcagtgcttggccgtcggaaggtgaaaaggcaatggcttggcgggcagtttttacatcggctgggtttgctccagtgccactcagcaaccttgcagaggcacaagctgactgcctcttgaagcgggtgcaggtccgaggattccatgtggagaagtgtggaatgggtctagcactgtactggcagcggggcgagctcgtgtctgtctcggcgtggcggtgctgatcatagcaacctcatccgtcaaccatcgtcgtcgtcgcgcctacactattcgcaggcatgtttaactccggtaatatgcgttttatcttgcaaacattgcaaagaaactattgtcatggttgttccacgcctctgattgctttactgctgtttttggagtattagctaggcctaatgaatgttgcaatcttggtgtgggtgtccccctacaatgtaacatgttggtactagggtctcaacgctgttcgtgctctcttcttggtt

SEQ ID NO: 2165 - DNA, 745 bp, Zea mays
  Clone ID: 700205411_FLI
gccgtcgcagccctccccacccgcgccttcgccgcccgcccccgcggctccgccgcctccgacgccgagtcccagtgcgtcatttgtctcgaagaatacgaagagagggacgtgctacgcgtcctccctcactgcggccatgacttccacatggcatgtatacatgtatggctggagcagaactcgacctgccccgtctgtagaatctcgttgctcgataatcccaacagcgagcacaatgcccctccgccgccgccgccgccgctacccggtgtagcagtgacgatgagctctccaggctctcctgagccgccaggctccgacccgtgccgctgcctgttcgccggtgccgggcactcgtcgagggcgtcatcagaggctcctcctaggcacgagcccgaccaggagaatcaggtggcgtctgggccatcggtggacgggggtgctaacagtaacggcatgccgctgtccgaagttaaccccactccacccgagagcaacagccagacagtgaggaagcagcagccagggccctgcaaatagcagctgcctggagtcggcgaggcgagatcgctgttctgcagcggtctgctgcaggacgagcaaacacctgtacagtggcagatggctgtctggctgctgtaggttggggtttgatgagggtatggtgtaaatatgagaaatcattcagatttgttgttggaaaccaaacacacttcatctgttcagttcagtattgatgctg

SEQ ID NO: 2166 - DNA, 586 bp, Zea mays
  Clone ID: 700205424_FLI
ccggggaagagtggatgcttacagaaatacatgagctctctttggcaagcaactcagtctgagttcagggtggccaaaccggggaagagtggatgcttacagaaatacatgagctctctttggcaagcaactcagtctgagttcaggaatggttcttagtcatgctccttgcaaactaattgcggcttcttatgcgacctgaagcttgattgccttcaccttcagagtatcatctggcagctacatggctttacttgggagatgaaatggttttcactggtttgctcgctttatgtaggcagagggtagcgatatgttcatttttattgccgtttgcttggccttctttttaccagataattacagttcataagctactattgtggaatgagtaccagattttatatgtattctcagatgtttccgacttgcaatatgttaggaaaacaaaggactaccttgtacatagtttaagcttttgttgtacggtacatggagaccttgatgctgctgtcttgcggcacaggcgcacaactgctgagatggcgtgatgtaaggtgatcaccgatcgaccatgtttttgtgc

SEQ ID NO: 2167 - DNA, 1692 bp, Zea mays
  Clone ID: 700205430_FLI
gtctcgctctcgtctcgcatcagccaacaacgcttcccggcaaaatccttccacaggcgggggagtcgcctcacttcaccccgttaatccccagcgaagaagcaaaatacttagcacaccagcgatggcggctacttaccaaactggccttgtggccgagccacagttgctgaacactgaaattatcactcggagggccaccaactgtgttgctgacactaacagaaaagacaaatgcgtcggctacttggatgtgtttgtacaccaggcacgcgacatccacaatgtttgtatctatcacaagcaggatgtgtatgcaaagctgtgcctcacgagcagccctgatgtttcgtgctcaaccaaggtgatcaacagtgctgggcgcaacccagtatttgaggaaagcctacgccttgatgtgcaaactgtggatgcttctctcaagtgcgagatatggatgttaagcagagtgaggaactacctggaggatcagctccttggctttgcccttgttcctctggtagacattttaattggtaatggaaagctggtccaggagttctccttgacatctactgacctgttccacacaccagctggatttgtgcacttgtccttgtcatatgctggttgttccccagatgttgtcctcatctcatcacccaataattccccatcaacagtgtatgattctggaattgatcatgtggttccttctcagcttgagaagattgtgttcccagacctaaatgtggagaaggaagacgagattatggtctcaaagtatctcgagatgacttcagactctgaaacccctataaaagttgagaacggcgtgtcactgcattctgcaaatgatgatgatgttccttctaaacttgaaaagatcaagttcatagattctgagagccgtgcgaaagctgaaaatggcaagatgctactatttggtgtagctgtgcctagtactgcaatttgtgcagataaggttgaggaacaccacgatgaaagccctctaagttgtgtctcaaccacaggctcttccactaccctttctgcaacaacacaatcagtttctgagccttcggagaccagtgtcgaggcatcccctagacaatgccatagggagaaaagccaagatgttacaggtggtgaggctaattcttctgaaacaccaccaaaggatgaagttatcaagcctgtgatcagcgttaaccttcagccagagcagtcagttgtccaacaggacatagttgacatgtacatgaagagcatgcaacagttcacagaatctcttgcaaaaatgaaacttccattggacgttgagaatagtagtccctcaaacgaagattcatactccagtacagttgagaagacatccccatccccatcttcatctgcagcaaagggttctagggtcttttatggaagcagggccttcttttaagtttctaatgcaaagtagtacgctagctcagtagctcgttactatctcctacatacatatacatggttccaggtttatcatatatctgctggcatgtaatcacatactttctgtctccataatatgcttctaggactcactcctggtattgctattagtgttatgctttgctagaagataataatttcatctcatagttgtagattaatcccatgtactaatagatacccatgaaatataatgtcatg

SEQ ID NO: 2168 - DNA, 1365 bp, Zea mays
  Clone ID: 700205471_FLI
ggacgagactcgcagctagctgacacggccgagaagcagcttgcattgcaggcgtagtacgtacccagcagcagctagcactagcagtccatcggagcgacgatggtgagaaggacggtgctggcggcgctgctggtggccgccgccctcgccggcggcgcgcgggcgcagctcaaggaggggttctacgactactcctgcccacaggcggagaagatcgtcaaggactacgtgaaggcgcacatcccccacgcgcccgacgtcgcctccaccctgctccgcacccacttccacgactgcttcgtcaggggctgcgacgcgtcagtgctgctcaacgcgacgggcggcagcgaggcggagaaggacgcggcgcccaacctgacgctgcgcggcttcggcttcatcgaccgcatcaaggcgctgctcgagaaggagtgccccggcgtggtgtcctgcgccgacatcgtcgcgctcgccgcccgcgactccgtcggcgtcatcggcggtccgttctggagcgtgccgacggggaggcgcgacggcaccgtgtccatcaagcaggaggcgctggaccagatccccgcgcccaccatgaacttcacccaactcctccagtccttccagaacaagagcctcaacctcgccgacctcgtctggctctcaggggctcacacgatcggcatctcccaatgcaactccttcagcgagcgcctgtacaacttcacggggcgcggcgggcccgacgacgcggacccgtcgctggacccgctgtacgccgcgaagttgcggctcaagtgcaagacgctgacggacaacacgacgatcgtggagatggaccccggcagcttccgcaccttcgacctgagctactaccgcggcgtgctcaagcggcggggcctgttccagtccgacgccgcgctcatcaccgacgccgcctccaaggccgacatcctcagcgtgatcaacgcgccgcccgaggtgttcttccaggtcttcgcgggctccatggtcaagatgggcgccatcgaggtcaagaccggctccgagggcgagatcaggaagcactgcgccctcgtcaacaagcactaggcggcggaattcatgcgggagatggctccattgctcgcaaaaaatccttgtgagacacacaacatgctctgcatctgcaggcgttgtcgtcaccttggtggacgtagtacatcggtgcatggattatctgttgtttaatttgtacgttcagttcattctgtttcttgtattcttttggttcctttcctcttgtttattcatggatgatgaggtgtttctgttttattctctggttcagctgtaaccatgtaacatgtaaggtgcgcgttttgtcct

SEQ ID NO: 2169 - DNA, 314 bp, Zea mays
  Clone ID: 700205474_FLI
caacaggaacacactgcaaagggtagtacaaaactcataaccatgtatgccttacattcgatgttccataaaaaaattaagtcttaatagcatcacggtttcaacgaaagtaataatacttcatgaccaggcaaacattgccatcatagattacttgttcacgcgacaactgcaaggatgtcaacaagacgagatattttaagcttccacgaggtaaccaacaagcaagcacagcaccagacagatagatcatttcttcttggcagcagccttcgtcaccttggctccagttgggtccttcttctccacactct

SEQ ID NO: 2170 - DNA, 644 bp, Zea mays
  Clone ID: 700205503_FLI
cccaagacctcctcagacccgagaagcgcagctgcggccatggacgccaccggcactggagctggagggaaggcgaagaagggagcggccggtcgcaaggccggcgggccgaggaagaagtcggtgacgaggtccgtgaaggccgggctccagttccccgtcggccgcatcgggcgctacctcaagaagggccgctacgcgcagcgcgtcggcagcggtgcccccgtctacctcgcggccgtcctggagtacctcgccgctgaggtcctggagctcgccggcaacgctgccaaggacaacaagaagacgcgcatcgtcccgcgccacgtgctgctggcgatccgcaacgacgaggagctcgggaagctgctgaccggcgtgaccatcgcccacggcggcgtgttgcccaacatcaacccggtcctgctgcccaagaagacggcggagaaggcgtccagcggcgggagcaaggaggccaagtcgcccaagaaggccgccaagccccccaagaaggcatagggtttggaggcggatccgatgttgtcatgtgtaggttgtaagcgggcaatgtgattggctgtgtatatgcttcgctcaagttgctttatgtcattcctaatggaataggaaatgccgtgtttctt

SEQ ID NO: 2171 - DNA, 852 bp, Zea mays
  Clone ID: 700205526_FLI
accgccgtaacatccacggcatgctgaacgcgatcgcctggggcgtcctgatccccgtcggcgccatcatcgcgcggtacctgcgcgtgttcgagtccgcggacccggcgtggttctacctgcacatcgcgtgccagtgctccggctacatcctgggcgtggccggctggggcctggggctgaagctcggcagcgagtcggccggcgtcacctaccagccgcaccgcagcatcggcatcgccatcttctgcctggccacgctgcaggtgttcgcgctgctgctccggcccgacaagaagaacaggtacaggctgtactggaacatctaccaccactccgtcggctactccgtcatcgtcctcggtgccgtcaacatcttcaaggggctcgacatcctcaagccggacagcggctacaagaccgcctacattgtcgtcctggccacgctcggcggcgtcgcgctctgcctcgaggccatcacgtggcccatcgccatccggaagcgcaggcgtaacgccgccgacaaggcgtccaacggcaacggctggcagcagggtgcgtagggggccaggtcgatcgccgggctttgtgcgcgtgtgtcgttgtgctatagttttgatgcgagagagaggtctgatatcgatgtgctgatgccgttgttcagagagagagatcgttgctgatgtgtttctttcctgttactactgcctctgtagtctgtactcctacctagaagagtagctcctttgattttttttcttctgttttgttgttgaattttattagggttctatagtgccatttgtacacattttttcccttcttattgatgtacgtacgactgctttgatt

SEQ ID NO: 2172 - DNA, 1474 bp, Zea mays
  Clone ID: 700205542_FLI
agcagtccggctcgtcactcgcagcaggtcgccagtggctgccctgcctgcctggcctacaactacaagagcgagcggacaagcgccagcgccacgggcatgccaagccagttcacgagcccggccaagaacccaagcacggccaagccaaaccgcccttctcctcctcctggctcctcgtgcctcgcttgactcctcgcgccaatttcgggaaacaggccatgccgggagacgggggagcagctggaagcgcgaggtgggtttgcgcggtcctttcggtgttcccgccgccgtccaaggccaagaacgccagcttcgagcagggcgccaacttcgccatcaccggcgccaccgcgctcgacaccgacttcttccggaagcgagggctcggcagcaccgtctggaactccggctccctccgcacgcaaatccagtggctgcgagacctcaagccatcgctctgcagctccgcgcaaggcacacgatgcaaggagttcttcgccgagtgcctgttcgtcgtaggcgaattcggtgggaacgactacaacgccccgctgttcgccggcaaggacctcagggaggcatacaagctgatgccccacgtgatccgagccatctccgatggagtcgaacaactgatcgccgagggggcaaaggatttgatcgtgcccggagtgatgccatcagggtgctttccggtctacctgaccatgtacgctgaccccaaggaagggcatggctcgcgcaccggctgcctcaagcggttcaacactttctcttgggtgcacaatgcgatgctgaagcgcgcgctcgtgaagctccgagcgaagcaccctggcgcgaggatcatctatggcgattacttcacgccaatcatccagttcatactccagcccaagaaattcgggttctacaaacaaccaccaagggcatgttgtggcgcgcctgggaggggcccttacaacttcaacctgacagcgaagtgcggtgagcctggtgcctcggcttgcgctgatcctaagacgcactggagctgggatggtattcacttgacagaagccgcgtatctgcacattgccagaggctggcttcatggaccgttcgcagaccagcctgttgtccaagcatcttgagttgagtacagtacaccccagccgctcctccctgctgttcttgcacctctagagtgagtgtaccacaatagcacacaccgtgcgtgacaccaaactggatccgataaggtaaggtagtagtagttccagtgcagtcgggtaaagagctgagataggtctattaattaaagcttgattcctttcattcaggatggtggtataagtacaatgtaatgcacaaaacaattcatatgagtaccagttagaaatcactatggtggttagcttgctccaacttctgtatctaacttttgtatctatttatatattttttatatatataggacatatcatgtacaacc

SEQ ID NO: 2173 - DNA, 2161 bp, Zea mays
  Clone ID: 700205596_FLI
ggggcgcgcgcgtgtagggtcgcaagccgagccaaagcagctgcagaccgaccaccacgcgacgctcctgctggctgctgccgcggaacccgggacaagcgacctcctccacctccccagctagctatagcttcctgcttgcagctgcaggtgccagccgagccgcctaccggtaccgggtacagccgcacaggcaggcggcggcatgcgctccagcctccagcagtgagggagggaggccctctgcccgcgcgtgctgtcccgctcccgccccttctacttctacccctccccccaccgcgggccgagagggagtccgcccgccggcgccgcgcgactcaccgatgcccagccatgaggcctgctgcggcaccatgttctgggtgtacctcatgtcctgcgtcggcctcgtcgtcttcgccggcctcatgtcgggcctcaccctcggcctcatgtccctcagcctcgtcgacctcgaggtgctcgccaaggccggcacgcccaaggacaagctcaacgccgccaggatcctccccgtcatgaagaaccagcacctgctcctctgcacgctcctcatcggaaactcgctcgccatggaggcgctgcccatattcctcgacacgctcgtgccgccctacgtcgccatcctcatctccgtcacgctcatcctcgcgttcggggagatcatgccgcaagccatctgcacgcgctacgggcttagcgtgggggccaaggcggcgcccgtcgtccgcctactgctcatcctcttcttccccgtcgcctacccgatcagtaagttgttggactgcctactgggaaagggacattttgcactaatgagaagagctgagctgaaaacgttagttgatatgcacggcaatgaggctggaaaaggtggagagctcactcgtgatgaaacaactatcattacaggagctttggagctgactcaaaagattgcaaaagatgccatgactcctatatctgaaaccttctcacttgacataaatgctaagctggacttacacacaatgggtatgataatgactagagggcatagtcgtgttccaatatactctgggattccaagcaatattattggccttatattggtaaaaaacttgattacttgccgagctgaggatgaagtgcccattcgtaatgttactatcagaaaaattccaagggtagctgatgatcttcctctctatgacattctaaatgagttccagaaaggtcacagccatatggctgtggtagttaaacgaacaaaggaagcaggagtatccactgaaaaccaaaagagcacaactgcagattataaaataaaccccaaagatgctcatgctgatggctcatccccttcttatgctaacaacactgctggaagtcgtagatttaacatagagaagcatggagacgggcgctcatgtaataagaaatcagaaaagaagcgggaaaatattcttgattttaacacagatccacttccaagctattcaatggatgaggcggcagtcggaataatcacgatggaagatgtaatggaagaacttctacaggaagaaatctatgatgaaacagatgagtatgttgatgtacataacaagatcaggataaacatgttacctcaaggcaaatcactgtcacctaccatatctcctggtggtggacccttatctcaggggctccgaaagactcctatggcatctccgttctcaccatactaccattgtaattcagtgttacgttccccagcttccaaccattgtcagtcacctgggactctaccgacaatactttcccctggaagatcacctactgcacaaacacctgggcaaagttcaccaaatggaagtcaggtttcaataaattccaacggtcaacataaaaaggacggtgagaactaacataccagaagattgttttccagacggtctcgtctcaagacgggatgcatgattaaatcatgaaattgctagcgtaggattaagctgcgaatataagtagcacagctctcttgaatggttagtggcccatgtatttattgattgtttgcttgtacatatatgctccggcatccggaccttagtatggcctaatcctcactatgtatcatacataggaagtgaatgggagccaatataattttgctctagac

SEQ ID NO: 2174 - DNA, 749 bp, Zea mays
  Clone ID: 700205612_FLI
gcatctcccaagtggtgccaagccacagcccacaggtaactaaccaagtactagcgcgagcaacgatgttcaggtgccccagcaatggctacggccaaccgcaccccaccgcgaactaccaccgcacccactccggcgagcacgtcaccaccaaggtcgcccagaaaccctgccatgccggcggcgccgtgcagcagcaccacgttgtccacaaggagtcgtcgttcaaggaggtggacgggggtaataaggccccagcggccaaccgccgctgcttcgacaactatcccatgaacgctgctaacaacgcgaaccaccaccgctacgaggcttacgaggaaacctacgaggagaccaactgcgaggaggagacgtacgcgtacggcgccggccgtcaccatggtcacggcagcggcggcggcgggcgccgcttccagtaccagacccacgaggagacctacgagctcgaggaggaggaagaggaggtcgtcatgggcgggggcgccggcgccggctgggcccagctcaggcgcccatcctgccgcgcatgagcagcaggcacctgctcgtacgtggaatgtgtggatgcgatgcgagtccggattggtagacgccacgcgttggttcaggggtacaattgcaaattctaataataacctgcaggtgacaacctagctaatctcgtacgtaaataaattgtactcctagtcccaatccccattaatccatcgatgctctgcatccaccgt

SEQ ID NO: 2175 - DNA, 1073 bp, Zea mays
  Clone ID: 700205625_FLI
gtcaagcgacgcaagggaaggatgtggttagctagcagcctgaaattctccgcccatcaactcagtcagcaggaagcaacccgcctagcgccctcgatccaaggacctcagagattcggccgtcgccactccggggccaagaaatgctcctcctgctcttcttctctgtcctcgccgccgttgccgccttcctcctcttcaagttcgccaccgtcgtcgatggggacttgacgctcgtatcccgcggtccgccgctgcgggagagggtcgacggcaaggtcgtgtggattactggagctagccgcgggattggggaggttcttgcaatgcacttcgcaaatttaggagcaaagctgatactatctgcacgtaacaaggacgcgcttgcgagagtgaaaaaaaacatcctcagcaagaatccagatagcagagttgaaatgttacccatggatttatcagctggtgaagaatctctgaaagaagtcgtacatgtggcagaatcatttttttctaatgcaggcgttgactatatggtccataatgcagccttcgaacgtcctaaacggagggctctagaagaaagtgaggaaggtcttaaggctacattgaatgtcaatgtcttcggaactattactttaactcgccttctagcaccttacatgcttgatagagggatgggccattttgttgtgatgagtagtgctgctggaaaggttcctgctcctggtcaggccatttactctgcctccaaacatgctcttaatggttactttgcttctctgcgatctgagttgtgtacaaaaggcattaaggtcactgttatctgccctggaccgattgaaacactacaatcttctgctgcagcttcttcatcgcaaacacattctgctgagaaacgtgagaaacgtgtttcggtggaacggtgtgttgaactgacaattgttgctgctactcatggactgaaagaagcatggatatcatatcagcctgtgctgactgttatgtacttggtgcaatacatgccaacaattggttattggctaatggacaaggttggtgcaaaacggctggat

SEQ ID NO: 2176 - DNA, 1028 bp, Zea mays
  Clone ID: 700205630_FLI
gtttgttggattagtcaagatctctcactgattcgcagcatccccctctgtttctccatgatctgttccttctcctggctgttctccagttgacttgctccatcgcctctccacgactagaggagggaggaggggagctctgatcgattcacccaagatgtctgaggtggtggcgatggcggggcaggcctacatgaagcagctgcaggcccacccgctgcgcaccaaggctatcacctccggcgtcctggccggctgcagcgacgccgtcgctcagaagatctccggtgtttccaagctccaactcaggaggctcctcctcatcgcgctatatggatttgcatacgcgggaccgtttggacatttcctccacaagctcatggataggtttttcaagggaaagaaaggaaaagaaactacagccaagaaggtcttagtagagcagctgaccgcatctccatggaacaacatgatgtttatgatgtattttggtctggtggttgaagggagaccatttggacaagtaaagaacaaggtgaagaaggattatgcatctgtccaactcacagcttggaggttctggccaattgtaagttggatcaactatgagtacatgccactccagctccgagttcttttccacagctttgtcgcctcctgctgggcggtgtttttgaacctcaaggcagcaagatcgatcgcaaatactaagaaggcatagaggcagctatctataccaggagcggaagtcatgatttgagttgaaaaccagtatatattctagacttccgttgtaacacctgaattcttttccagcaggagaggaaccgagtcgtattgtttgccatgaaaagtttgctccttttcatttccatagctgctgttctctcttcatttcgaaaaaaaatgttgtttgctcgcctcgtcgaagtgatcacgtgtacttctagttctagtggaacttagtttgtgcagaaagaatatgtactcgctaacttgtatctaaagcatatatgtttttcacatcg

SEQ ID NO: 2177 - DNA, 900 bp, Zea mays
  Clone ID: 700205641_FLI
gacccaacaaagagaagtaactctccaagaagaaaatgcagcctatgagaaagctatatcagagtgtaaacagaaaattcaggaaaagcagattgaggccactcagtttctgagtaatctggaggaaatggaagtaacagagcataatttaaagacacagcttgaaaatgctctgaaggagctagaggctgctcaacataaagcatcaacagcaacctctggaacagctgaaaatgctctactggaagctaagtcagtgactgatcttaaatctaaagatttggaggagaagaaaagggagcttgaactattggataacaaggtgcaaacattagagaaagagtggtctgtggttgaagaagaatctttaaagaaacccactcctgcacaaagggagaaggtcctggagaggcaactgcatagcctcatcgagcagttgacagctaagcaagctcaagctgaaattctggccactgatgtgcattccaaagaaaaggagctggaacggctgaaccatctgcatagaaacctctacggcggtgccaacgaaactggcgcaccccggagccgcctcagcagaggcctcttgagcggccctgaagattactattacgaccctaaagcgggccggaaaccgtaccaggctggcgttagaacagaaggccagaaccggctgatgatccttaggtccgcaattgtactgtatgttctgctgctccatgtcatcgttttcataaagatatcagtctgaaagcagttgagctagcgcttcataagttcgtatagggaaacagatacttgcttttgtgttccaaaccatgcaaacgtttcttgttgtaaataactttgtatgtgagtatgtatctcgtttgatggatctataggagagttatattaaat

SEQ ID NO: 2178 - DNA, 2285 bp, Zea mays
  Clone ID: 700205787_FLI
tgcactgctacttcgctgctctgggccgtttgccgttgatgctgcggacaagtatgggatagtgctgctgtgctgtgcagttcttgcttcttacaactggtagtggtggtggtggtctggtctccgtgtgagcatttggtctagaagagcgtgaagctgcgcggctcttctttcttgttcaagatgaagttcatgaagcttggatcgaatccggatacctttcaggacgatgggaatgaagtcagtattgcggcatctgaattggtgagcgacatcactgttcgtatagggactacaaagttttaccttcacaagtttccgctcctctccaagtgtgctcgctttcagaagttgattccaaccactggtgatgaaaatattgagatccacatccatgatattcctggtggcgcaaaggcttttggggtctgtgccaagttttgctacggcatgattgtcacactcaatgcctacaatgtgattgcagcccgctgtgctgcagagtacttggagatgaatgagactgttgacaagggcaatctgatctacaagattgatgtcttcctcagctcaagcatattccggagctggaaagactctattattgttcttggtacaacaaaggctcatctaccttgggcagaggatcttaagctggttagccaatgcattgactctgttgcttcaaaagcctctatcgacgtttcaaaagttgaatggtcatacacatacaatcggaagaagctcccaactgagaatggtcatgattcgccgtggaatggagtcaaccagcggcaggttgttccgaaggattggtgggtagaagatctgacggatctcgacattgatgcctacaagcaagtcataacagcagtcaaaaccaagggtatggtggccaaggacgtgatcggtgaggcaattaaagcctacacttacaagaagctgccgtcactaagcaaggtctcaatgatccatggcgacgcaaaagttcgggcgatgctagttacaatcacatgcctgttgccatctgagaaaggctcagtttcatgcagcttcctcttgaagctactgaaggcaaccaatttgctgaagtgcggcgatatgtgcaggaaagagcttatgaagcgcattgcacggcaattggaagaagcatcagtgtcagatcttctgatccctgcagtggatgaggacaccagtgtttacgacattgacctgattcttagcattgttgaagaatttatcagacaggatagtaagaatgcccagagacataatggtggcgaagtgaatgaccatgtatcagctcctagtgcatcaatgattacagtggcaaagattgttgatgggtatctggcagaggttgcgaaggacccaaatataccggtctacaagtttttcagtctcgctgagacagtctcggccaattcaaggccagtccatgacgggctctatcgcgccattgatatgtatctgaaggagcacccaagcttgggcaagagcgacaagaagaggctctgtgccctcatggactgcaggaagttgtcgcccgatgcatgcgctcacgctgtgcagaacgagcgcctgcctctgagggttgtggtgcaggtgctgtaccacgagcagacgagggcttctgcagcagccaccgtccgagctgacagcatcggcatcggctcctacgagagctcaaggtcaggggccacaacaaacacagaagacgagtgggacggcgtcatggccgtggaagacctcagtctgtcgtccaagacgacgaagctagagaaatgtgacgcagctagcaccgtctcggagaagaaccacggcggcaacaagggtgccaacggcagggcgaaaggtggcgtgatgccgaagaaggcggtcgggaggacgacgatgtcaggcaacaaagggcaggctggggagcgcagcagctcggactcatccgacagcgccattttgccttgccagctggagcatcccaagagggccgcagcaaggagcaccaccaagtcagccgctgtgtagtagtagctgcccggccctttgctcagtgagatgctcaaggggccctaggttttagcagtcgtcgtccgttcttttctttgcgttatgaatgttgcatagaagcaaggaccatgttcttaaacgtcttgtaggccgggagcccgggatggtacgcgtacgttgttaggtgatgttgttagcatgtaggcttgccatgaaacctatgagaccttgggttgtgctgtgagggtttatgtcataagaagcctactttgttagag

SEQ ID NO: 2179 - DNA, 981 bp, Zea mays
  Clone ID: 700205796_FLI
ctctcccctcctcacacaggcacacacgcactttctgtcagcttcctcccctgcgccgataagcaagcccgtgagccaacagtggtgccagcggcccgagcggcgaggatgcacagcggagcgaggaagctcatgtgggggaccagcccggacaggcccgacgaccacgacgtggtcatcgtgctcgcctcgctgctgtgcgcgctcatcaccgtcctcggcatcggcctcgtggcgcggtgcgcgtgcgcgcgcgggcccagcgcgcaggcggcggcgaggaggtgggggagtgggcggagcagtcgtcgcggtcggcgctgtcgctgttcaaggagaaggaggaggagatcgagcgcaagaaggtggaggtgcgggacaaggtgttctccatgctgggccgggtggaggaggagaccaaacgcctggccttcatccgccaggagctggagctcatggcggaccccacgcgccgggaggtcgacgccatccgcaagcgcatcgacaaggtcaacaggcagctcaagccgctcggcaagacgtgcctcaaaaaggagaaggagtacaagatgtgcctcgaggcctacaacgagaagagcaacgagaaagccacgctggtcaacaggctgttggagctcgtaagcgagagcgagaggctgcggatgaagaagctggaggagctcaacaagacgatagaatccctctactagatctgatctcatggaagacgaggacgatgatgatgatggtaacgtagtcgtggtattacggcccataagagaaatcgagctagcaatgactgaagctcaacgtgcaaatttttttttctgcgacgtacttgatgattggatttgtgtatttgtacacgtgatttgtaaccgatggctcactatccttggattgtaatcgttgctctgcggcaccattggtcctaaacgtatttgaaataccaatatcagataccaaatggttcttagattt

SEQ ID NO: 2180 - DNA, 2126 bp, Zea mays
  Clone ID: 700205810_FLI
gtccccccatttttagctcctaagccagttggtgattacaacaaagggatggctgaagctgatcaaaagattctatcagcggaggtaaaacttgaatcccaatactatttctacatggagacacaagtggcgctagctattcctgatgaagataactgtataaccatctattcttcgacacaaattcccgaggtcacacaaaatgtggttgcaaagtgccttggcattccatttcacaatgtccgcctcatcagcagaagagtcggaggaggctttggtggaaaggcaatgaaagcaatacatgttgcatgtgcatgtgcggttgctgcattcaagctgcggcgtccagttcggatgtacctggatcgcaagacagacatgataatggcaggcggtcggcatcctatgaaggtgaagtactctgttgggttcaagtcagatggcaagatcacagccttgcacattgatcttgggatcaatgctggaatatcaccggatgtgagcccaatgttgccacctgctatcataggtgctctcaaaaagtacaactggggcaatcttgcatttgataccaaggtctgcaagacaaatgtctcatcaaaatcagcaatgaggggtcctggagatgttcagggctctttcatcgctgaagccatcattgagcatgttgcctcagcactttcagtcgacactaacaccataaggaggaagaaccttcatgactttgagagccttgtggtgttcttcgaagatgctgcaggtgaagcttctacctacagcttagttacgatgttcgataagctggcctcctctccagaataccagcgccgaactgcaatggtggagcacttcaacagaagcaacaagtggaagaagcgtggcatttcttgtgtgccaattacatatgaggtcaatcttcggccaactccaggcaaggtgtctatcatgaatgatggttccatcgttgttgaggtcggaggggttgagataggccaagggttgtggacaaaagtgaagcagatgacggcattcggattgggacagctgtgccctgacggcggcgaaagcctcctggacaaggtccgggtcatccaggccgatacattgagcatgatccagggagggttcaccggtgggagcaccacttctgaaactagctgcgaagctgttcgacagtcgtgtgttgcgctggttgagagactgaagcccatcaaggagaatctggaagctgaggcaggcacagtggaatggagttccttgattgctcaggcaagtatggcgagtgtgaacttatcggcacatgcatactggaccccagatccaactttcagaagctatttaaactacggagctggcattagtgaggtggaaattgatgtgctgacaggagcaacaacaattctaaggagtgaccttgtctacgattgcgggcaaagcttgaaccctgctgtcgacttgggccaggtggaaggcgcattcatccaaggagtaggcttcttcacaaacgaggagtacacaacaaactctgaggggttggtcatccacgatggcacatggacgtacaagatccccacggtcgacaccatcccaaagcagttgaacgttgagctgatcaacagcgcccgtgaccagaagcgtgtcctctcttccaaagcatccggcgagcctccgcttcttctagctgcctcggtgcactgcgcaatgagggaggccatcagagccgccaggaaggaattctcggtctgcactggtccagcaaactctgccatcacgttcgagatggacgtgccggcgacgatgcccatcgtcaaggagctctgcggcctggatgttgtggagaggtacctggagagcatgtccactgccggaccaacaaccactgccaaagcatagatccagcaggtgcaccgcccatggtgagagagcttaataggtctgtgtaaaacactgaacagcatgacatgccaagcttacatgtgttagctctgatgtacagaagacgaggtagcaatgggagctgtggtcttttgaatcaggatccatgaacattagaggaaaaaaataaagtaaataagtgtcgggcaggcaaatgtgtggatgaaatcatgtggttttgattggatttt

SEQ ID NO: 2181 - DNA, 589 bp, Zea mays
  Clone ID: 700205903_FLI
tcgcagagttctgctacatcaacgagatcgacgggccgagcaagaactactgcgaccggaacaacacgcagtggccgtgccaggcggggaaggggtactacggccgcggcccgctgcagatctcctggaacttcaactacgggcccgcggggcagagcatcggcttcgacgggctgggcgaccccgacgcggtggcgcgcagcgccgtgctcgcgttccgctccgcgctctggtactggatgaacaacgtgcacggggccatcgtctccggccagggcttcggcgccaccatccgggccatcaacggcgcgctcgagtgcgacggcaagaaccccaactccgtcaacaaccgcgtcgcctactacaagcagttctgccaggatttcggcgtcgacccgggcaacaacctcacctgctgaatgatctctctctcattgggttgttgtcctgtacttacacatgtgttggttgatggatagatggcgattgcgtggtgcggatgtttcggtttggcggtgtcaattctgatatgcgcgtcggtgctgttctgatactgactatatacggaaataaaaatctgatttgcatt

SEQ ID NO: 2182 - DNA, 811 bp, Zea mays
  Clone ID: 700205938_FLI
gaaaaaaaaaacaggcaaggaaaatggctccgaccgccgccaaggacagtggctccgccgatcgctggcgcgaggtgcaggcgttcgaggacagcaagctgggtgtgaagggcctggtcgactccggcgtcaagtccatcccggccatgttccaccacccgccggagtccctcaaggatgtcatttctccaccagctctgccctcctccgacgatgcgccggccatcccagtggtggacctgtccgtggcgcggcgcgaggatctggtggcccaggtgaagcacgcggccgggacggtgggcttcttctgggtggtgaaccacggcgtgccggaggagctgatggccagcatgctcagcggggtgcgccagttcaacgagggctctctggaggccaagcaggcgctctactcacgggaccccgctcgcaacgtgcgcttcgcttccaacttcgacctcttcgagtccgcggcggccgactggcgcgacacgctctactgcaagattgcgccggatccggcgccgcgggagctcgtgccggagcctctccggaacgtgatgatggaatacggcgaggaactgacgaagctggcgcggtccatgttcgagctgctgtcggagtccctcggcatgcccagcgaccacctgcacaagatggagtgcatgcagcagctccacatcgtgtgccagtactacccgccatgcccggagccgcacctcaccatgggcgtcaggaagcactcggacaccggtttcttcaccatcctcctgcaggacggcatgggcggcctgcaggtgctagtcgatcgcgg

SEQ ID NO: 2183 - DNA, 1318 bp, Zea mays
  Clone ID: 700205957_FLI
gcgtttcaaacggtaaggaagccaccccgctgtgaggttacttaaggcacggtgacccgacgcgagcaaagctccaagacccgcacgcgaacgccctccctgccgctccgccgtttcgcgtgggagtcgtttcgaaaaagttcgtttcgcgagcggtgaggactgaggagtgtggaggcctaaaaccatggcggcgagcatcgggatcatggacggcgcctacttcgtcggcaggggcgagatcctgcactggatcaatgcgaccctccagctctccctcgccaaggtcgaggaggcagcgtctggcgcagtgcagtgccagctcatggatatggttcaccctggagtggtgcccatgcataaggtcaatttcgatgcgaagacagaatatgacatgatccagaactacaaggttcttcaggatgtgttcaacaagctgcggattggcaagaatattgaggtcaacaagcttgttaaaggacggccattggacaacttggagttccttcagtggttgaaaagatattgtgattctgtgaatggtggaattatgaacgaaaattacaaccctgtagaaaggaggtcaaagggatgcaaagaacgtgtctcaaagggttccaataagccatctaaatcattgcaagccaataggctttctggtgctgatccaacagatggaggccatggagttgggaaagtatgtaacactttttctgaagagcattacatagaacagattcagaagttgtctgaaaagattgcagacctgaaagtttctgtcgatagtactgaaaaagaaagagacttctacttctcgaagttgcgtgatattgagatactgtgtcaacggcctgagttagagcatctaccgatgactaaggcggtccggaagatactttatgcagctgatgcaaaggattcaccgctacctgaggcgaatgatataatcacaaagtcaccaagcttgttctcaaatgaaaccgagtgagatgtgcggctacatgagctaattttccatgattgatcgtcttagttctgagtctgtaaatgcgtaaaataacatttgacacaagtctttttgctgtcaaaaacagttttcctgtaagaacttgagtggggttaagtagttattacgcattcatgcttgatgtgactgtccctgtatggttcctctggagaatatagggtctgttcacttgactaatctgtaccggcttctactacttttacattgtttttgtctcaatggattgtagttgcaacagtctaaatagccggctttaatgcgcagcgaacaggtaacgtggccttcatgcct

SEQ ID NO: 2184 - DNA, 1369 bp, Zea mays
  Clone ID: 700205986_FLI
ctgaagctgggtagctcctgctcctatcccggctgctggcgcgccgtggttttgtgctcttgtggacacactggcctccacccatccctctcacgtctctggccatccgcagccaaggcgcgcggcccatcgtcgatttatagccacaccatggccaggaagtgctcccactgtggcaactacggccacaactccaggacctgcggactaggactaggactaggacacagagaaataatgctctgcgaaggtggcgacgacaataatggccgcagcggcctaaggctcttcggagtgcaggtccgtatcggcggcggcggtggcgcagggtcggcgtccatgaagaagagctacagcatggactgcctgcagctcgcggctcctcatgcttgttcgtccctcgtctcgtccccgtcgtcgtcgtcgttgtgctcgtcctcgtccccgtcgtcgctgctgctgtcgattgatgatgggttgcagagaggggcggccgatggatacctgtctgatggacctcatggcagagctgtgcaggagaggaagaaagcagctgagactgagagatactagtgcttcccttgctttgactaaatcaactcgcagcctgtgagttccatggagcgaggaggagcacaggcagttccttgccggcctggacaagctgggcaagggcgactggcgaggcatcgccaggagctacgtgccgacgaggaccccgacgcaggtcgccagccacgcgcagaagttcttcctccggcagagcagcatggggaagaagaagcgccggtccagcctcttcgacatggtgccgatttgcgagaacagtgcgagcatctccgatccgctggacgtggcacgccatggcgtcgcctcggcagactccgagagggcggccgtggacctgatgaattcgacgacggagggtgacgacggcaggagcagggacgtcgtgtcgtcggcgtcaggtgcagggaccgcactgcggttcccggcagcgccagctcagacggagccactgcatccttcgtcgtcgcatggccatgggcgcggccaccactgctctccgttggacctggagctgggcatgtccttgcccgccccatccgtcggaacgtgatggagatgaggcgaggccgaggccgtacgtgactgctgtctccctcagctgtgtgtgtcagccagatggagatgatgcgctagccaatacagtactgttcgtctgttcgtgatcgtgaaaacggtgtgcaaacactagcacagcggcactaaactaggatgtcgctcctcgcaccattgggtactgtaaccgcgttgatccacgtcatctctatctcttcagcacgatcataggctgtcagtttcatct

SEQ ID NO: 2185 - DNA, 3067 bp, Zea mays
  Clone ID: 700205996_FLI
gatcgaacgacccccgcggccctgccccagaaacaaagctagggtttgcctcccaaccctcctcctgttctcccgcctcctcctgtgaaccgcgcgagccaaggaccgcccgtcgtctctcgccgctcgccgccatggggacggagcggaagcggaaggtgagcctgttcgacgtggtcgacgagacgtccgtctccgccaagctgcgcgccgcctccaacggtgccgccgccaccgcgactgggggcaacccgtctgtcaaccggtggaacgggcggccctacacggcacggtacttcgatatcctcgagaagcgccgtacgctccccgtgtggcagcagaaggaggagttcctccgctccctccgcgacaaccagaccctcatcctcgtcggcgaaactggaagcgggaagacaactcagatcccccaatttgttcttgagacggaaggcttgggtaaccgttccatggttgcctgcactcagcctcggagggtcgcagcaatgtcagtctccaggcgtgtggcggaggagatggatgttactattggggaagaagtgggttatagcattcgatttgaggattgcagcagccacaaaactgttctcaaatatttgacagatggtatgcttctgagagaagcaatggcagacccacttttagagaagtacaaggtgattgttcttgatgaggctcatgagaggactttagcaacagatgttctgtttgggcttctgaaggaagttctaaaaaatagaccagatttgaagcttgttgttatgagtgctaccctcgaagcagagaaattccagggttacttcaatggtgcacccttgatgaaggtgcctgggagacttcatccagttgagatattttacacccaagaaccagagagggactacctagaggctgctatcaggacggttatgcaaatacatatgtgtgaacctgctggtgatatccttgtattccttacaggagaagaggagattgaggatgcatgccggaaaatcaacaaggaaactaataatatgggagatcaggttggcccagttaaagtcgtgcctttgtactccacactgcccccagccatgcagcagaagatttttgaacctgctcctgccccattgaaagaaggaggtcctcctggaaggaaaattgttgtgtccaccaacattgctgaaacatccttaactatagatggcatagtttatgtgatagacccggggttttccaaacagaaagtttacaacccaagaataagggtggaatcccttctggtgtcacccatttctaaggcaagtgctcatcagagagctggtcgtgctggacgaacacaacccgggaagtgttttaggctatacacggagaagagttttaatgaggatttgcaaccacagacatacccagaaattcttcggtcgaacctggcaaatacagttcttaccttgaagaaacttggaattgatgatttagtgcattttgactttatggatcctccagcaccagaaactctaatgagggccttagaagttttgaactatttgggtgcactagatgatgaaggtaatctgacacagttaggtgagatgatgagcgagtttcccctggatccacaaatgtcgaagatgctcgtcatcagtccaaaatacaactgttcgaatgaaatcttatcagtatctgccatgctgtcaggtatgttagttgtcacagaaggttaactgattgcatttctacaaattatcttatctatatgtttatctgaactactttgcttgtcagttctgttcaagtgaagtgccaggtttctattatactccctccgttcttttttaatttgtcgcggtttagttcaaaaactaactagcaggcgacaaattttcgagaacggaggtagtagcatgtgagcttgcatgcatgctactgcatgtgcacgtagcatcattttcttgtgcatttctttaatgtgctgtcatcagcaactgtcattcacctggcttcatgagctattggtcgaaatgatcatacagtttaggctgatgcagataattgctgtttgttgaattattctgacaaagcaaacggtatcgtctcgcccctttgcatctgctgaccaccgtggacctcgtctgttattaccatattctttctctagcacccaattgcttcctccggcctagggatgctcaaaaggctgctgatgaggcgaaggctcgatttggccacattgacggggaccatctgacgcttctgaatgtataccatgcatacaaacaaaacaatgaagatccccagtggtgttacgagaactttgtcaattcaagagcacttaagtctgcagacaatgtcagacaacagcttgttcgcatcatgactagattcaacctcaagatgtgcagcacggatttcaatagccgtgagtactatgtcaatatcaggaaagccatgcttgcggggtatttcatgcaggtcgctcacctggaacgaactggacattacctgactgtaaaagataaccaggtcgtccatcttcatccctccaattgtatggaccataaaccagagtgggtcatctataatgaatatgtcttgaccaccaggaatttcattcgcacagtcaccgatatccgtggggactggctaattgatattgcgccacattactatgatctgagcaatttcccgtcatgtgaggccaagcgtgttcttgagaggctgtataacaagcgagagagggaaagagctgcaaatagaggctgaggttgatacttccacaaacctggtgctcagtaattccaccgcaggtctatccagagcccgtatacgagctttggttatcacagatagctgtcccatttgtcttaggcaaatgcgttagcatgatgtctcctacacaccctaatatctattgtctcatcagcatgatcattatgtacacaacctcgagaaattctttagcatctcaattagttgtgattcagattaattgtgtgacagtctgtttttgtatgcatcagacgtttatgttttgtgtttctatgtggttaattggttaccctttggaatg

SEQ ID NO: 2186 - DNA, 501 bp, Zea mays
  Clone ID: 700206071_FLI
ccctcggcaccatcgcgcccatcgccatcggcttcatcgtcggcgccaacatcctcgccgcggggcccttcagcggcggctccatgaaccccgcccgctccttcggccccgccgtcgccgcggccgacttcgccggcaactgggtctactgggtcggcccgctcatcggcggcggactcgctggcctcgtctacggcgacgtcttcatcggcggctcctaccagcaggtcgccgaccaggactacgcctaagtagtgctccgttcgtctggattcagctcatccaacgcaggcggccgtttcgatcggcgtcgtcatttgctttgctcttcatttcatcacgttatgtaacgtgccaatgatgtgtgtcgtcctggtctgttccattccgtccttgtattcatttcccttcttttttcggggtaaaatcgatgtaaagatctcatccgatctgccgttttcgatcgccttggagtggaaaaaaaacaggtgattttcgttt

SEQ ID NO: 2187 - DNA, 576 bp, Zea mays
  Clone ID: 700206319_FLI
gaaggatggtgctggggacgacggaggcgaggagaagggcaaagaaaagaaagataagaaggacaagggtgagaagaatgacaaggagaagaaagagaagaagaaagacaagggcgccaaggagaagacgaccgatcccgtgaagctcagagcaaagctggagaaggtggacaccaaactgcaagacctacatgccaagagagaagatatcctgaggcagctgaaagagctggaactggaaggaggcggcaaggggaaggccaacgaagaggagcctgcgcatgtacagactatggaacagggtggagagagcgtggtcaaggaacagagtcctcttgccgcagcctgatccggttacacatgcacatgcatcactataaatgaaggaacatacatcagctgagttgtgaaaaatggtacgcgtgcagtgtcaggatctccgtctctcgctatccagtgagaagaacggaacatataggtatagctgctgagtggagtgcgtccttctcctgatacgtgacaatgtaatacttggctggcttttgtgaataaaaggagtgtgcctgctgttgtcat

SEQ ID NO: 2188 - DNA, 927 bp, Zea mays
  Clone ID: 700206406_FLI
gcctcagcgtggtcttgtacaatggcggaggattctggcgccatcctccgccacatctcctccgtcaaggatatggtcgacaaggttaatgaagagattgaacaaaacatacagaagaccagggaaatagaatcagagatagtgcaacattctgaaaccgaaaagcactatctcaacaaggagtctgagttgacaaaagaagtatcagttactgagtttgaactcaatggtcttatccaagtggctgtggcagagggaaatttggagttccagaaagttgctcacgatgtgattcggaaaagagtttctgataagatggaaaaattcatcaatgaatctatggggtttcaagccaatatgctcaaaagttcaaatgaggatttagttctcttactgaatgaaaaaagttcactggaggatgaaagtgcgaaattgaaagtgaagataaacagtatacatagttcatccaaggaatacattgcagagattcttgaggaagtgaatacagaaaattcagttctggagtctgagctacggtacatgatttcggaatataaggatgtccaaaaggatataaacaacctgaagattctgtttagttcaagcaattcataggacaggttcctcgcgtcactgcaggattgccactgacatcaagacgacaggaataaataccaaattcttcagtaacttgataggaatggcttgtacaggcttaatttatggggactttgcttgatatgttcgaatctcccttaaatatcttctttaggatgtcgcttcctcactaccttagtttaggtcacttttataaacgtaaacactagcaaactcattagttcacagattatattaatcagcaaatattaaaatcatttagtcaaatggactgagttctattttcttgcaaaatactatatccattct

SEQ ID NO: 2189 - DNA, 1692 bp, Zea mays
  Clone ID: 700206507_FLI
cttgattttagactcagctagtgcttttggcaaaccaaccccctcagccaaacagctgcatgtctagaggtagaggagtagactcctcacaccgggtaagtctagctgagtattagtatactcagccttgcttgtggcacaatttttgcaggtactccttaggatgatttgttgctggtgtgacttggcctccatccctgccaccgggatagatggtcgagtgggttactgcttccgcaggagaggaccaggaggagtagcgtggccaggcttcgccatgttgctcggttcttctccgttagtgatgtccatggccagtactctgatctcctgaggctatttgattatggtggctatccgcctcaggccaactaccttttcttgggtgattatatggatcgtggaaagcaaagcctagaaacaatgtcttcttttggcttacaaggtcaagtacccggagaacttctttcttctaaggggcaaccatgaatgcgcatcagtaaatcgcatctatggtttttatgatgagtgcaaacgcagattcagtgtaaagctgtggaaaacattcacagactgttttaactgcttgctagtgtcagcattgatagatgaaaagattctctgtatgcatggtggtctatctctggagttgaacaagcttgagcaaatactcaacctgaatcgccccacagacatgcctgatactggattgctctgtgatcttctttggtctcatccttccaatgaagcaacgggccgggccatcaatgatcgaggtgtttcattcacatttggtcctgataaagtttcagaatttcttgagaagcatgatttggaccttatctgccgagcacatcaggggaccaagttatggttatcgaggcagagtgatgcttgcttttgaagataatggatcctcaaaaatttgagtccgatttgacaagcagatccctgatggtaatgatcttggtggtttgtgcgaggaagatcatggcttcttctgctctgctgaatcacttcgcccagacttttctgctggtgaagaagttgagaggctagctatgaccgagctaatagaggtcatttcagaagagaacaaatctggacctctgattgtgttacttaaggatgtagagaaatcattcattggagttaccgagtcactttcatctttgcggagcaaatttaatcgcttccatctggtgttcttattataggatcccacactcagatctaaataattaaatttacaggatgaagctctacttacagattggaagcagcagttggatcgtggtgttgaaacccttaaagccaaatcaaacattggtagcattcgcacggactgagattgatggatattgtgaaggtgaactaatcaaggtacctttgagagaggtaggaacaacaatggtcgttgttgctgcacaaacaaaggctattgctggattccggctctcatcaagtgactcctccccctcacgttgactttgcggacagatgtctcaattccagtggtggagctacgaacaacaatccgatgtcctgatcgagagcgatggagctaatgtttgaacttgtatgtttgaacttgtgtgtttgaacttgtgaactatggatgtgaacctgtgtgaatttgtgaacttatgtatttggacttatgtgaatttgcgaacttatatatttggactt

SEQ ID NO: 2190 - DNA, 1186 bp, Zea mays
  Clone ID: 700206523_FLI
atcacaagcaagcgccaaccatcgagcagaaagaagatcgtcgagatcgagcataagccatggcggcctctgtttctgcctcttgccttattggcctgtcgtcgttggcggtggtgctggtggcgctggcgtcggcggcgtcggcgcagctgtcgtcgacgttctacgacaggtcatgccccaacgcgctgtccaccatcaggagcggcgtgaactccgcggtgaggcaggagcctcgcgtgggggcgtcgctgctcaggctccatttccacgactgctttgtccggggctgcgacgcgtcccttctgctgaacgacacgtcaggggagcagaggcagggcccgaatctaactctgaacccgaggggcttcgttgtcgtgaacagcatcaaggcgcaggtggagtccgtgtgcccggggatcgtctcctgcgccgacatcctcgccgtggccgccagggacggagtcgtatcgctcggcgggccttcgtggacagttctgctagggcgaagggactctaccgcttcattcccaggccagacaagcgacctcccacctccgacgtctagcctccgacagcttttgtctgcgtataacaagaagaacctcaacccaaccgacatggttgcactctcaggagctcacacgatcggacaggcgcagtgctcgagcttcaacgaccacatctacaacgacaccaacatcaactccgccttcgcggcgtcgctcagggccaactgccccagggcaggcagcaccgcccttgcgccgctggacaccacgacgcccaacgcgttcgacaacgcctactacaccaacctgctgtcccagaaggggctcctgcactcggaccaggagctcttcaacagcggcagcaccgacagcacggtcaggagcttcgcgtccagtacgtcggccttcaacagcgccttcgccacggccatggtcaagatgggcaacctcagcccccagaccggaacccaggggcagatcaggcgcagctgctggaaggtcaactcgtaaactactagctacgtactacgcccaatgcaatgcgttatggcaggcagatcagagccaattagtaataaggcctcagctcgctctctacctgtacgtgtgtgtgtgactggtgttggtcgagtaagtgtacgtactacatggatggagcagagagagagagagat

SEQ ID NO: 2191 - DNA, 589 bp, Zea mays
  Clone ID: 700206545_FLI
gggcggttctcagcgacctcattccaggtcctgggccacatgaagaccgtgtgcgtgctgatcctgggctggatcctgtttgactcggccctcaccgtgaagaacatcctcgggatgctgctcgccgtgatgggcatggtggtctacagctgggccgtggaagcggagaagaaggcggcagccccgatcccccggaacaagggcggcatgctcgacggcgaggacgtgcccctcaaggccagggtgagcggcgtgcccgcggtcgacctcgaggacggcgacgtgaagggctagccgctgatccgttcattcttctcgttcttttgtaactgtgcgcgcgcggtcgctcgatgcaaagttgcttgttcgtcggttctcagctatcgacactacactgttaattttgttggccccttgttggggggagtctgctcgtaggtgaccccccctcccccgggttcgacgtagatgaaacacacgcgggcaaattgttaggatttttcaggcggggaggtggcgacatgctgttatagatggtgacaagactttatataatggaaatgcaggtgtttttgaggtttcgctgttc

SEQ ID NO: 2192 - DNA, 896 bp, Zea mays
  Clone ID: 700206564_FLI
tgaggatgcagctaaagttgttgatggtctagctctaaaggcagcggataggcagtcttctatagaacagattaagaagctgtatgaacttttctgcaagtgtgattgcacattgctggagataaatcctctggcggagacagctgacaacaagcttgttgctgctgatgcaaaattgaactttgatgataatgctgcatttagacagaaagaaatatttgcactgcgtgatacaactcaggaagaccccagggaggtcgctgctgccaaagcagatttgaactatattggtcttgatggagagattggttgcatggtgaatggagcaggattggccatggcgaccatggatattataaagttgcatggtggtacgcccgccaattttcttgatgtcggtggaagtgcatcagaggggcaggttgtggaagcttttaagatactgacttcagatgatagagtgaaggcaattctagtgaacatttttggtggcattatgaaatgtgatgtgatagcaagtggaattgttaatgctgccaaacaggttgacctgaaagttcctgttgttgttcggttggaaggcaccaatgtagaccaaggaaagaggattcttaaggaaagtggaatgactttgatcactgcagaagatcttgatgatgcggcagagaaagctgtaaaagcatccgtcaaataactagtgtatcaatctgaagtttctttttttttcactggtacaagatgagcagtgctcttttacggatttcgatttggagcagaagtcgtgaactgcaacgtttttgaagtagggttattttggccttgttttgctgttaaatgttgccagtgccgaaattgtggtctcgttttaataaacaaatcaatcggtcccattggtc

SEQ ID NO: 2193 - DNA, 1026 bp, Zea mays
  Clone ID: 700206584_FLI
cgggcatcgcgggcatcgcacacaaacgcaacctgcagccatggcacagaagctcgcgccaccgacggcggcggtcgtcgtcgtcctgctggcgctcgccttgtcggccgccgcgcagaactgcgggtgcgcgtcgggcctgtgctgcagccggttcgggtactgcgggacgggcgaggactactgcggcgccgggtgccagtcgggcccctgcgacgtgccggagaccaacaacgcgtccgtggccagcatcgtgacgccggccttcttcgacgcgctcctcgcgcaggccgccgcctcgtgcgaggccaacggcttctacacccgcgacgccttcctcgccgccgccggctactacccggcgttcggccgcaccggcaccgtcgacgactccaagcgcgagatcgccgccttcttcggcaacgccaaccacgagaccataaagttctgctacatcaacgagatcgacgggccgagcaagaactactgcgaccggaacaacacgcagtggccgtgccaggcggggaaggggtactacggccgcggcccgctgcagatctcctggaacttcaactacgggcccgcggggcagagcatcggcttcgacgggctgggcgaccccgacgcggtggcgcgcagcgccgtgctcgcgttccgctccgcgctctggtactggatgaacaacgtgcacggggccatcgtctccggccagggcttcggcgccaccatccgggccatcaacggcgcgctcgagtgcgacggcaagaaccccaactccgtcaacaaccgcgtcgcctactacaagcagttctgccaggatttcggcgtcgacccgggcaacaacctcacctgctgaatgatctctctctcattgggttgttgtcctgtacttacacatgtgttggttgatggatagatggcgattgcgtggtgcggatgtttcggtttggcggtgtcaattctgatatgcgcgtcggtgctgttctgatactgactatatacggaaataaaaatctgatttgcatt

SEQ ID NO: 2194 - DNA, 1188 bp, Zea mays
  Clone ID: 700206628_FLI
gtagccattagcagctggaacttgttggaggagatctagagcttagctttgagagagataaaaatgggcgtgggaaaagttctgaacgacgtgaagccgtacctggccatggtcctgctgcaggtaggcttcgccgggatgtacatcgtggccgtggcctcgctcaagcgcgggatgagccacttcgtcctcgtcgtgtaccgtaacctctgcgccaccgccgtcatggcgccattcgcgctctggttcgagaggaacgcgaggccaaggatgaccatcaccatcttcctcaagataatggggctcgccatgctcgaaccggtgctggaccagaacctctactacatgggggcgaacctgacctcggccggcttcgcgtcggcgctcataaacatcctcccggccgtcacgttcgtcatggccctggtcctgcgcatggagaaggtgcggctgcggagcgtgcacagccaggccaagatcgcgggcacggtcctcacggtcgccggcgcggtgctcatggtcctgtaccacggccccgtggtgcagttcccatggtccaaggggcagcaccaccacgacagcgccggcggccagggagccaacagtgccgccggcggcggcggcttcctcacgggaatcatcaccatcgtaatcgcctgcgtctgctggtccgccttcttcgtgctccaggccaacacgctcaagagctaccccgcggagctgtcgctgacggcgctcatctgcctcatggggtcgctcatgagcggctccgtcgcgctcgtcgccgagcgccgcaacacccaggcctgggtcatcggcttcgacacgcgcctcttcaccgccgtctacgccggcatagtgtgctccggcgtggcatactacgtgcaaggcatcgtgtccaggcaacgaggcccggtgttcgtcacggccttcaaccctctctgcatgatcatcaccgccgtcatgggctccatcatactcaaagaagagatcactctcggaagcgtgattggcgctgcgatcatcgtgttaggtctgtacgcgctcatctggggcaagagcaaggacagcgtggccgatgtctcagcatcaggcggctccaagggcgcagcagcggctgccgccatcgagctgcccatcaccttggcgcagcccaacggcaacggcaactgcaagcacgaggtcggc

SEQ ID NO: 2195 - DNA, 1669 bp, Zea mays
  Clone ID: 700206644_FLI
ccggcgacgagcggaagccttcctccatcttcaggctgctagtactcagtagtcagtacagtacagtggtgccgacgacatgacgaagatctcccgctcgttgctcgtcgtcatcgcgctggtcctcctcggccctcacctcccgccatccgaggcgctgacgcccaagcagggcgtcaggtccaagaccttcctgtccccgcccatcctgcttcgcccgggcgacgtggccgacaagttctactacgacatccccttcccccggggccacctggcgctcaagagcttcaacggcgaggtggtggacgagcgcggcgcccccgtgccgctccacgagacgtacctccaccactgggtcgtgcagccctactacgccctggtagtatcggcggagggcggcagcagccggccgcggaccatcccggcgcgcaacgccggcgtgtgcagcggccacacgctgggccagtactacgggctggggtccgagacccggcgcacggccacgtgggtgcccgacccgtacggcatcgagatcggcgacccggccgcggcgcccgccgagggctacgagcagcgctggctgctcaacgtgcacgccatcgacacgcgcggcgccgccgaccggacgatggcgtgcaccgagtgccgctgcgacgtgtacaacgtgacggcggactggcgcgggcacgccatcgagcccgggtacgccggcggcctgcgctgctgctacgacggcacgcggtgcggcgccgcggcggagggggctgaggggaaggccaggactgtgttcctgcgctacacggtgatgtggcgcgactggagccccgcggcggtgctgcccgtgcggatctacatcttcgacgtggccggctgcggcgtggagtacgacgtggaggagcagtgcagcggcggcgcgggcggggagtgcgtgcacgtgaagacggccacgcaggcgctgccgcggggcggcgacgtggtgttcggcgtggcgcaccagcacgcgggcggcgccggcgcgtcgctgcacggcgccgacggccgcctgctgtgcgagtccgcggccacgtacgggggcgggcgggaggccggggacgaggcgggctacatcgtcggcatgtccacgtgctacccgcgcccgggcgccgtcacggtgcgcgacggcgagccgctcaccgtcgtgtccaggtacagcagcgaccggcgccacacgggcgtcatgggcctcttctacatcctcgtggccgaccacgcccggcagctgccgccgcaggagggcctgtgcttcagcttcccggtcccatggtgcctaccgtcatggctgtcgagcaacctgtgagatcttttggtgttgaaagctggtgctatgttctaattagctgcttggttagggttcggttcggggctggtgatggtagggcaaagcaaggaaggccgcgtgggtccttgcgttactcatacagtagtagtaatgtaaaaatatagaagcagcggtcagtctactctgctgttgctgtattatacaataaccacgtcgctccctccgtttgacttctccacgtgctgccgttgttgctcaggagtcaggagtctggacatgttcggttacatcggaactattctgaaactattctaaatgatcaattattatataaactaaattatcattctg

SEQ ID NO: 2196 - DNA, 658 bp, Zea mays
  Clone ID: 700206653_FLI
aaggatcccaaggcatcgtggactgaatccaaaccaaaacttgaaaaagatccacaaggtcgtgctcgaaatcctgacttaggccaaggtgatgcagaaaagttgtttcgtgaccatgtcaaggacctatatgagcggtgtgtacgtgatttccgggcacttctatctgaggttatcactccagaggtagcagcacggacaacagctgaggggaagacggcaatcaactcctggagtgaggcaaaaggtcatctaagatctgatctaaggtacaataagctaccgagtaaagacaaagagtctatttggcggcgctatgctgatgacttgacgaggaaactcagacaatcagacacgaaggagaaggacaaatcggatacagatgggaaacaacctaggtcctctgatccacctaggcggaggtagcttgtagtaacagtcacttgtacttcctaggtgctgctccttatatttcttactgttgatagttaagggtctgctcgcactcgtctgcaacatttgaatagtcactggctcactgccacttttgatactgagagtttgtgttgtaggaggttttgccttgcaaatgtttttcccgttctggatcagatgatatatttttgcagtattgagtctgacattgcagtaccgtgcc

SEQ ID NO: 2197 - DNA, 1135 bp, Zea mays
  Clone ID: 700206702_FLI
gccgccgcacgagcacggcgtcatcgacaaccatcgacgattgctccatccccgccagccgccgaccagctgctacatcctgcaacacgaggacaagtgctgcatcctacagtccgttcgagatgccagaaattgattggaaccttgagaatacacagattgtttgtaagttgtttgtcgaacaagttggcaaagggaatcgaccaaacacttacctcaattcagttgggtacgctgaggtggagaaaggattcaaagataggacaggtattgatgttacaaagtcacaactcaagaataaatgggacaaattgaaagaagatttcaaggcatggaggaaacttaagttgcggcaaacaggaacggttggaaccgtgaaaagggcactattgatatggatgatgattggtggaaaagagctagagcggatataccaggatgtggaaagttcaggaagcttggccttcaaaatgaagatgagatggctaggtgctttggagacatcacaaatattggttgtgatcactggtctcctcgtgttgcaaatgattctattgcaactaatgttgagcaaccggacgttgtaccaatgtttgaaacacaggatgaggaattcattcctgcaactcaagataatgaagacaatgctagcactccatctccaggtagtgggaaaaggttggctaggccagttcaaggaaaaggaaagaaagctaagacaggaaatgcactcctcatccaagaagcagtctcaagcatggctagctcggccaatgaatttgttgccaagaaagatggaaaatattctattgatcaagtgatggaaattgttattgcttgtggtgctggctatgagacaaatgagcattacattgcttctgagttgtttgtgaagaaagagcagagggagatgtttatgacattacctactaatgagataaggttcaattggttgaggaggaaatataatgacaagcatgcaaaatagaagtggtcctcaatgactattatcacttgtatcccgtgtttttttattttccagttggtactgccaatgtaattttttgcttaaacttgagtttcggcatgtggaaccaatgtaattttgtcgttaatgcaaaactgaattggaacc

SEQ ID NO: 2198 - DNA, 2508 bp, Zea mays
  Clone ID: 700206722_FLI
atcggttttctccttggaaatctgctggcgagtcccaggacccgaatgccccactcttattacctgctaattttgaatttcctaatcgggttgcagctgcttatataagctcactaaccccgcattcgcttttccgactcccacctccagccaaatcgggctatagatcaaacgctgcactgtagggagcgtgaagccagcggcgaatggaatccctagccgccacctccgtgttcgcgccctcccgcgtcgccgtcccggcggcgcgggccctggttagggcggggacggtggtaccaaccaggcggacgagcagccggagcggaaccagcggggtgaaatgctctgctgccgtgacgccgcaggcgagcccagtgattagcaggagcgctgcggcggcgaaggcggcggaggaggacaagaggcggttcttcgaggcggcggcgcgggggagcgggaaggggaacctggtgcccatgtgggagtgcatcgtgtcggaccatctcacccccgtgctcgcctaccgctgcctcgtccccgaggacaacgtcgacgcccccagcttcctcttcgagtccgtcgagcaggggccccagggcaccaccaacgtcggccgctacagcatggtgggagcccacccagtgatggagattgtggccaaagaccacaaggttacgatcatggaccacgagaagagccaagtgacagagcaggtagtggacgacccgatgcagatcccgaggaccatgatggagggatggcacccacagcagatcgacgagctccctgaatccttctccggtggatgggttgggttcttttcctatgatacggttaggtatgttgagaagaagaagctaccgttctccagtgctcctcaggacgataggaaccttcctgatgtgcacttgggactctatgatgatgttctagtcttcgataatgttgagaaggtactattcaagaatttctgttctcgttcgtaactaactcatgatgttctctgtgtttcagagtattgtcctacagttgcagttatgattaagtattaatcactttgccttggagcaccaattttttggaggctgaataagatagctagtagtttgatataggaagttaactatactaattctaaagattatgcatgtagtttgtcagtgtttcatcctatttttttttcacatctacaacagacagaaactacaccggttggtgcatttagaaagtatatgttatccattgggtcaatgtggaccggcatgcatctgttgaggaagcataccaagatggcaggtcccgactaaacatgttgctatctaaagtgcacaattccaatgtccccacactctctcctggatttgtgaagctgcacacacgcaagtttggtacacctttgaacaagtcgaccatgacaagtgatgagtataagaatgctgttctgcaggctaaggaacatattatggctggggatatcttccagattgttttaagccagaggttcgagagacgaacatatgccaacccatttgaggtttatcgagcattacggattgtgaatcctagcccatacatggcgtatgtacaggcaagaggctgtgtattggttgcgtctagtcctgaaattcttacacgagtcagtaaggggaagattattaatcgaccacttgctggaactgttcgaaggggcaagacagagaaggaagatcaaatgcaagagcaacaactgttaagtgatgaaaaacagtgtgccgagcacataatgcttgtggacttgggaaggaatgatgttggcaaggtatccaaaccaggatcagtgaaggtggagaagttgatgaacattgagagatactcccatgttatgcacatcagctcaacggttagtggacagttggatgatcatctccagagttgggatgccttgagagctgccttgcccgttggaacagtcagtggtgcaccaaaggtgaaggccatggagttgattgataagttggaagttacgaggcgaggaccatatagtggtggtctaggaggaatatcgtttgatggtgacatgcaaattgcactttctctccgcaccatcgtattctcaacagcgccgagccacaacacgatgtactcatacaaagacgcagataggcgtcgggagtgggtcgctcatcttcaggctggtgcaggcattgttgccgacagtagcccagatgacgaacaacgtgaatgcgagaataaggctgctgcactagctcgggccatcgatcttgcagagtcagcttttgtagacaaagaatagtgtgctatggttatcgtttagttcttgttcatgtttcttttacccactttccgttaaaaaaagatgtcattagtgggtggagaaaagcaataagactgttctctagagaaccgaagaaatatggaaattgaggttatggcttatgactgtcgtttgttcagtatgaaactagatttccaactgtgccttagaagtttgcaaatgtcttgttatat

SEQ ID NO: 2199 - DNA, 2411 bp, Zea mays
  Clone ID: 700206727_FLI
caccattagagcgcgcgcgccaagctcgtggtgaggttttcgagatgaaggttatcgagaagatcctggaggcggcgggggatggccggacggcgttctcgttcgagtacttccctcccaagacggaggagggggtcgagaacctgttcgagcggatggaccgcatggtggcgcacggcccctcgaaatcgccaaccgtatgcagaacatggtgtgtgtggaaaccatgatgcacctgacatgtacaaacatgccagtagagaagattgaccatgccttggaaaccatcaaatccaatgggattcaaaatgttttggccctcagaggggatcctccacatgggcaagacaaatttgtgcaagttgaaggcggatttgcttgtgctcttgatttggtgcagcatattagagccaagtacggtgattattttggcataactgtagctggttatccagaggcacaccctgatgcgatacaaggcgagggaggtgctacattggaagcatatagcaatgatcttgcgtacttgaagagaaaggttgatgctggtgctgaccttattgttacacaacttttctatgataccgacatctttctcaagtttgtgaatgactgccgccaaattggtattacttgtcccattgttcctggcataatgccaataaataactacaaaggtttcctgcgcatgactgggttctgcaaaactaagataccttctgagatcactgctgcactagatcctatcaaagacaatgaggaggctgttagacaatatggaatccaccttggaactgagatgtgcaagaaaattcttgctactggcattaagactttgcacctttacacactaaacatggacaagtctgctataggaattttgatgaatcttggattaattgaggagtccaaggtttcaaggccattaccttggaggccagcgactaatgttttccgtgttaaagaggatgttcgacctatattctgggccaacagaccaaagagctatcttaaaaggacattaggttgggatcagtatccccatggacggtggggtgattctcggaacccatcatatggagcacttactgaccaccagttcacaagaccacgaggccgtggtaagaagctccaagaggaatgggctgttccactgaaatctgtggaggacattagtgagcgcttcacaaacttctgtcaagggaaactcacaagcagcccatggtcagaattggacggtcttcaaccagagacaaagattatcgatgaccagttggtgaatattaaccagaagggtttccttacaattaacagccaacctgctgtaaatggagagaaatccgactcgcctactgttggttggggtggtcctggaggctacgtttatcagaaggcctacctcgaattcttctgcgcaaaggagaagttggaccaactaattgagaagatcaaagcattcccttctctcacttacattgctgtgaacaaggatggagaaacattctccaatatttcaccgaacgccgtgaatgctgtcacgtggggtgttttccctggcaaggagattatccagcctacggttgtggatcatgcaagttttatggtttggaaggacgaagcatttgaaatctggactcgggggtggggttgcatgttccctgagggtgattcatcgagggagctactagagaaggttcagaagacctactacctggtcagcctcgttgacaacgactacgtccagggggacctgtttgctgccttcaagatctgattatgctctcatggtctgtattgttgtatggttggacccaacaatattcttgcatccccgactacaggtctgatcgccatgaaagcttctgttcatttgagctcgggggagtccgctagtcttatttttcttgatttctcttggctttctggaaccatacgaatcaataagaaatgagctgtgttcgctttccagttcctccatgtgcaagtggcgcaactccaggttctagatgtaaaattcgtcctctaatacagaggttggtattgtatgttagtgtaggatgcgctgctcgcattgcactgtattgtgcttctgtttggtggaaataaagattggtcgaaatctgagggccagtttggaagccataaaactggatgtgattggaggggctaaatttcattttttgttcaattttgaataagaagaagaatctagcccctccggtttctcattcccaatctgtcctgaatgttcacaagcccccatttgaatttagccgggtaacccctttaattaggaggtctattgaggcgtttttatgggtatgtggaaagcttaggagactcgagacgactctatataaaggcaggcctcctttgggtcaaagaataattttctgaatcacttgtttttg

SEQ ID NO: 2200 - DNA, 509 bp, Zea mays
  Clone ID: 700206733_FLI
aacgcactctcctatatccgccgccatcgtctcgggctctcatctctaatcttcgggttcgcgtcgcagtgtcttccgcccgggctaccaccatgccgaagcagatccacgagatcaaggacttcctgctgactgcgcggcggaaggacgcacggtcggtgcggatcaagcgggccaaggacgccgtcaagttcaaggtgcgctgctccaggtacctctacaccctctgcgtccacgacgccgacaaggccaacaagctcaagcagtcgctcccgccaggtctgactgtccaggagatttaaggtatcaagccacaaactgtgctttttttgcggtgtcagggacgtttgctccagtgttactttagtttgtaggtgggctccattgctgtgtttgaatgaattatgaagtttgagtttgggatgcgaatgatgtgtcgaacctatgagcctgtgttgtaatggttaccccagaccgcaaaggatggcaatctatcataagttaaactg

SEQ ID NO: 2201 - DNA, 842 bp, Zea mays
  Clone ID: 700206770_FLI
ccgctgcagccatgagtaagttgcagtctgagtctgtcaaggatgccatctcccagattgttggggatgccaaggagaagaataggaagttcactgagactgtggaacttcagattggtctgaagaattatgatccacagaaggacaagcgtttcagtggctctgttaagttgccccatatccctcgtcccaagatgaaggtgtgcatgcttggtgatgcccagcatgttgaggaggccgagaagatgggacttgactacatggatgttgaggctctcaagaaaatgaacaagaacaagaagcttgttaagaggcttgccaagaagtaccatgctttcttggcatcagaggccatcatcaagcagattccccgtctccttggtcctggtctcaacaaggcaggcaagttcccgaccctggttactcaccaggaatccctcgagtccaaggtgaacgagactaaggcaacagtcaagttccagctcaagaaggtcctttgcatgggtgtcgccgtcggcaacttggcgatggaggagaagcagatccagcagaacatccagatgagcgtcaacttccttgtttcccttctgaagaagaactggcagaatgtgagatgcctgtacgtcaagagcaccatggggaagccatacagggtgttctaagtctgctcttttgtgaagtctgctaggttctggcaccgaggttttattgaattaaactcttgttaagagtatgtttttggacgatcctatatttcgtcctggcgctactatgtttcagaatggtggtactactataagtattgcttgaaaggatcaatataatttgcgtgtcataccccc

SEQ ID NO: 2202 - DNA, 1351 bp, Zea mays
  Clone ID: 700206831_FLI
ggctcactctggttgtattttacgctgtaaatcaaaagaaacgggctcagaggcttgtgtccatcaacaatccttttgcgtcttggggatcattgggagaagatattggtgcagcaccacaactgaagagtgctaaattcttctcattggaagaactcaagttatgcaccaatgatttccgagaaattaatgcgattggagctggaggctatggaacggtttaccgaggaaaacttccagatgggcagttagtggcaatcaagagatccaaggaagggtccatgcagggtggccttgagttcaagacagaaatagaactcctttccagggttcatcacaataacttggttggactggttggtttctgctttgagaagggcgaaaagatgttagtttacgagttcatacctaatggaacactaagcgaggctttatatggtatgaaaggaatacaattagactggagcaggaggctcaagatagctttggattcagctaaagggctagcatacctccatgaccatgccaatcctcctatcattcacagagatgtgaagtccactaacattctccttaatgagaagatgaccgcaaaggtttcagactttggcctgtcgttgctggtaacagacagtgaggaagggcaactatgcacaaacgtcaaggggacactgggctacctggacccagagtactacatgacccaacaactcacagcaaagagcgatgtctacagcttcggcgtagtgctcctagaactcatagtgggtaagccaccaatacacaacaacaagtacattgtccgtgaggtgaaaatggcactagacgaagacgatggcacgcactatgggctcaaggatgtgatggaccctgttcttcagaaaattgggggcctctttggcttcccacggtttctaaaactagcactgcaatgcgttgaagaggtggcaaccgcccggccctcgatgaacagcattgtgagggagattgaggcgatcatgctggacaatgggctcacaccgggctcaatgtctacgagctcttcattcagcattgaatcaagaacgatgaaggttggacctaagcacccatactccagttcatccatgtcaacctcgacgtttgatatggatagcagggcctttgagtacagtggggtgttcccttcttctcatggtagcttgaagccctgaagatcagaacttttggactccaacaatctgtacgagctgttatatatgtttcagtaggactgtacagaattgatgaactttgattcgttttgcctagagagacaaaagtatcttttggtttttttctttttaaagaagagatgtatataatattggcc

SEQ ID NO: 2203 - DNA, 612 bp, Zea mays
  Clone ID: 700206836_FLI
gtagtacaattcattcattcattcattaaaagcaaggaagaagacttggaactctgctagctagcagtagccagtagctagtgctaccttcccctgctccgacctctatctgtcgttctgtctatctcgtccgtcgccgtcgagccggctatggagatgcagccacagctcggcgactcttctccggaggacaaggtgcgtcggtcggccgctccagcacagctctcaattcgccaagatatattgacagttatatactaattaaaaacctgcaaagagagatccttgtttgattttttttgtttacaaagatctgactgtgcgcttaatttggggatgaccgatgaaatcgactcaactccctgcagctcgccagccgccctctgacacccggagggcgctggccggactcgcagtggcggcccgcagaggagaaggccatcgacgactggctccccatcaacgcgcggaggaacgccaagtggtggtactccgccttccacaatgtcaccgccatggtcggcgccggcgtgctcggcctcccctacgccatgtccgagctcggctggtgcgtacgctagcttgctagctgtgtgcctgtgtctgactgac

SEQ ID NO: 2204 - DNA, 868 bp, Zea mays
  Clone ID: 700206931_FLI
gacatcatggagaatgggctagtcgactactccccacacaatccgacgcagatcgaaaaactcgactctgcatctaatgtcattctcattgacaactatgattccttcacttggaatatctatcaatacctggccctcgaaggtgcttcagtaacggtctatcgcaatgaccagattacgctggaggggctgattgccgagaaacccacccagttggtgatcagtcctggccccggccatccggacaccgatggggggattagcaaagcagcaattagggaattcagtgggaaaatacctgttttcggggtttgcatgggtcatcaatgcatgatttctgtgtttggtggcaaggttgatgtggcgggtgagattctacatggtaaaacctcggtattgaagcacgatggaaagggtgtgtatcatgggcttccagcttcattagatgtcaccagataccactcccttgcaggtacacatcctgagcttcccgactcgctcgaggtgtcgtcttcgaccaatttagagcaaggcgcaaagcccattatcatgggatgcaggcacaaagagttcacaaccgagggagtgcagtttcacccagaaagcattcttaccaaacatggacggacgatgttccgtaattttcttaaactgcgcggtggcacctggaaagaacatgacagctgtaaaagtgagccactgtcaatttgatttgcttgattttatttgattatgtacgtattttcataagcacgttccgtcaggaatcatgccccgaagcaagccctgcacacatgggcttgctttcccgttgattagctcttctcttcagctcacgtctacttatttttctatgccatactttctg

SEQ ID NO: 2205 - DNA, 547 bp, Zea mays
  Clone ID: 700206973_FLI
cagggagaagtgtgtcggatgcagcaagacagtctatccaattgagagggttactgtgaacaacaccatgtaccacaagtgctgcttcaagtgctgccatggaggatgcaccatcagcccttctaactacatcgcgcacgaggggaagctctactgcaagcaccaccacgtccagctgatcaaggagaaagggaacttcagccagctcgagaatgaccacgagaagacatcgcaggctgggtcgctggaggacgacgaagaagaagagtattaattaatcgctgagcaaaaatacataccaccagaagaataattaatcttccttcttgcactatatatttctgtgccatttcagtcttaccaatggagatcatatgtgcgttcagagaacaatgatatcgttttcttgtatctgcatgtaaaccacgtctactacctgatttcaccatttgcattgatcaggtggtaatctagaccctgtttggaacttttccgtgttgctgtattttcaatgaaaatatcagtaccaaacagagcatacaagaag

SEQ ID NO: 2206 - DNA, 1760 bp, Zea mays
  Clone ID: 700207027_FLI
cgcccccggaccaccttttataagcaccaaccatctggccttgccgcgccgattcgccacgaagccgcactgtgagagagggacgcggcctgttgtcccggcttttagacgcaacttccatcgctgcgaagctatccattcgtgttcgtcatggccgccagcgtcaccgtggaaaacctcaaccccaaggtcttaaaatgtgagtatgcagtccgtggggagattgtcatccatgctcagcgcctgcagcaacaactacaaacacaaccagggtctcttccttttgatgagatcctctattgcaatattgggaatccccaatctcttggtcagcaacctgtgacattcttcagggaggttcttgctctttgtgatcatccgtgcctcttggaaaaagaggaaaccaaatcattgttcagtgctgatgcaatttctcgagcaaagcagattcttgcaactattcctggaagggcaacaggtgcatatagtcacagtcagggtatcaaaggactgcgtgatgcaattgctgctggaatcatgtcacgtgatggattccctgcaaatgcagatgacattttcattacagacggagcaagtcctggggtccacatgatgatgcaattactgattaggaatgagaaagatggcattctgtgcccaattcctcagtaccctttgtactcagcctccatagctcttcatggtggagctcttgtcccctattaccttaatgaaaaaactgggtggggtttggagatctctgatcttaagacgcaactggaaaatgctcggtcaaaaggcattgatgttagggccttggtggttatcaatccaggaaatccgactgggcaggttcttgctgaagacaaccaatatgatatagtgaaattctgcaaaaatgagggccttgttcttctagctgatgaggtatatcaagagaacatctatgtggacaacaagaaatttaactctttcaagaagattgtaagatccatggggtatggcgaggatgatctccctctagtatcgttacagtctgtttccaaaggatactatggagagtgtggtaaaagaggagggtacatggagattactggcttcagtgctccagtaagagagcagatctacaagatagcttcagtgaacttgtgctccaatatcactggtcaaatccttgcgagcctcgtcatgaatccaccaaaggctggggacgaatcatatgcttcctacaaggcagagaaggatggaatccttgagtctttagctcgtcgtgcaaaggcgttggaggatgcattcaacaagcttgagggattttcatgtaacaaggccgaaggagcaatgtatcttttccctcagattcatctgccacagaaggcaatcgaggctgctaaagctgctaagaaagcgcctgacgctttctacgctctccgtctccttgaatcaactggaatcgtcgtggtccctggatctggatttggtcaagttcctggaacatggcacatcagatgcacgatcctgccgcaggaagacaagatccccgcggtgatcagccgcttcagggctttccatgaggcgttcttggccgagtaccgcgactaaactgttacgctgtgtgtgagttaagttggaggttcagtagaactgtagaagagctcagtgacagcgcagaaagaggcagtgttagaaaggcttaggtccttcttcacaggagcaacagttgtcttgtctccatcaaggagaaataaaaattttagttttac

SEQ ID NO: 2207 - DNA, 1474 bp, Zea mays
  Clone ID: 700207068_FLI
gttaaatacatgcgttctcaagtaggacctgcttctcgtctttacacttctttcaaggagttgagctcaaaattggcttctattaaagatgttgttgttgttggtgttttcggttctgaatctgattcattggccaaagaattccacaaaacggctgatcgtttacgggaaaatgtcaactttgctcatatctacactaaagatgcttctgactctgttgaagaattagctaaacaagttggaaaatctttttcaggagaatccagtgtagttcttgtacgcccaccgcaattaagtaataaatttgaagataacgttgtatcttacgatagtgaatctgataacctcagcggttttgttgacgaaaattaccatggtttggttggtcatcgtacccaaagcaatatggctgattttaaaactccattggtcgttgcttactatgatgttgattatgttaaaaatgttaaaggaaccaactattggcgtaatcgtgtactcaaagttgcaaaagaattcccagaagtcaattttgcagtttcaaatgttcatttgtttgctggtgaacttgaagaatttggcgcttctgcaagcaaagataacagccctgtggttgccggtcgagatcaacaaggcaaaaagtatgttctccaaggaaaattcagcgttgaagctttgcataaatttgttgaagattttgctgctggtaaattggaagcttacttgaaatcggaagaagttccagtagacaataacggtccagttaaagtagcagttggcaaaaactttgaagatttggtcactaacagtcaaaaagatgttttcatcaagttttatgctccatggtgtggtcactgcaaaaaaatggctccagcttatgaagaattgggtacattgcttcaaaatgaaccaaatgttgaaattgtcaagttggatgctactgctaatgatgttccagaaccatttgtggtacatggtttcccaacattgttcttcttaccagctgacagtaaaactccacaaaaatacgagggtggtcgcgatgccaaagacatgctttcattcatcgcaaaacactcaactcaagaacttaaaggtttcaaccgcgacggaagtgctcgcaaagaggaattgtaaatcgatcaaatttttatcaatttgaacagcaataattcagttttgatttaaaaactatttaaaattaaatgctacaactgcatcgtgtttaatttattttttaatcaaatgttagcatttctttgcttatatttgattattagtccaattaattattccaccgcaatcaattattttttgattaaaatttttaattgtctcattctattttcacactgcggccccaagcgctactatttttcttaatcatttcacttttattcgtgtacattcgtttttatttgtgcatattttcatagcattcgatcgctttttaaataaacttaaattataaaac

SEQ ID NO: 2208 - DNA, 1954 bp, Zea mays
  Clone ID: 700207394_FLI
gggggttgtttgacgctatgaaggaagcggggatgcagcctaatcagtatacatacaatgtgctgatgagcggtcactgtcagagagatgatgtcaacagtgcagttgtgttgtaccaggaattgctgaagagtggcctgaatccaaatgctgttatctttacaaccctgattgacggtttctgtaaagcgaagaggttcagtgaagcaaaaggtatgtttcttgagatgcccaggtttggggttgctcctaccgttcctgtgtacaacagtttgatggatggagcttttcggtctggaaatgcacaagaagcattggcactttatcaggagatgactcgcttaggtttgtgcccagacgagttcacctgcagcattgttgtgagaggcctttgtgatggagggcaaatgcatgtagcggacaggtttcttcaaggtgtgcaggaagatggtgttaatctgaatgcagctgcttacaatgcactgattgatgagtactgcaggattgggaatttggaggaagcgctagcaacatgcactagaatgactgaggtcggaattgagcccaatgtggtgtcatactcctccttgatagatgggcattcaaaacgagggaagatgcaaatagcaatggctatatacactgagatggtggctaaagggattgagcctaatgtggtaacatacactgctcttattcatggccatgccaagaatggtggcatagatgctgcttttcgtttacacaaggaaatgatagagaatggtatttcacctaacgctatcacagtgtcagttcttgtcgatggtctgtgcagagagaatagggttcaggaagcggtcaggtttgtgatggagtactcagggttgaagtgcagtgacattcattctgtcttctcaaactttacaattgaggaagaatgtttaattccaaacagtgtgatatatatgaccttgatatatggcctgtacttagatggtcaacactgcgaagctggcaagcttttctcctacatgagaaaatcaggtatgatccctgatagctttacctatacactactgatacgagggcagtgcatgcttggctatgtcttgaatgccatgatgctctatgctgatatgatgaagattggtgttaaaccaacaaggtacaagatagaatgccctgagatctggtcatgggcaccactgaatgacctccaaactgttgtaagttaagaaatggattttgactacatacttcagatttctagagcaaaagccagttcacaggttgtggaacgttttagtcaaactcagtcatcaatatggtagaccaatctgttacatctgtgcgaccattgtaagatcgttatttggaaagccctctgcttattgaccttgttctcaaggcaaatgaaaatttgaagccattggatttgatttttaattgccgccattttgtggtacgggctctgaacaaaacgagtactgtaatatgatcagcaacaacgctgattaacaggaactggagcagatagatggctgtgatgagggttgaatgtaaaccattgcaaatgacatgtgcacaagcccatctgcaaacgcacctggaagaatgtacatgtggaagcaagtatgcaacatatgctgcacttgcagagatttactgtggcctttctggttctgatgtggattgagagggattgccagagaattgaactaaaaatatccctagccaacccatgcgcaataaaaaaggccttatagatattttacaggtttaagtctgttggcaattggcatatgcactagagaggacgtccaatctatagttaggtgaatgtcaatttaactgttcacctgatacgactatcagtgatgatcatgtattcttttaaatgtgggtgatgatttattttgcccatttttacctgctatgtgattatgtcacagaagtgtgcatgacatttacc

SEQ ID NO: 2209 - DNA, 1321 bp, Zea mays
  Clone ID: 700207426_FLI
aagggttgcagccatccgcatccaccggaccccaccgggaatggcggtttgagtaagttcccgtaccagggttcttcgatctgggaggccgaggggacaccgggtcggagtgaggggccgccatggcgagcgacgtgcccatgaccccggagctcgagcaaatcgacggagagatccacgatatcttccgcgccctccaaaatggattccaaaagatggataagattaaagattcaaataggcaagctaaacaattggaagatcttactgtgaaaatgaaggagtgcaagcgcttgatcaaagagtttgatcgcattctcaaagatgaggagtcaaataatccacctgagatcaacaagcagctaaatgacagaaaacagttcatgatcaaagagttgaattcctatgtcaccttgaggaaaacataccaaagtagccttggtaacaacaataagagggttgagctctttgatatgggtgctggaagtagtgagcctgctgctgaggacaatattcaaatggcatcagccatgacaaatcaacaactcattgatacgggaaggaaccaaatggaccaaacagatcaagctattgaacgttcaaaaatggtcgtagcacaaactgttgagactggagctcaaactgctgcgacattaacacagcaaacagagcaaatgaagagaattggtaatgagctagatactgtccacttctcactgaagaaagctagccaactagtgaaggagattggtcgccaggttgcgactgacaaatgtatcatggcattcctcttcctgatcgttttgggtgtgattgctatcattgttgtcaagatcgtccatccgaataacaaaaacattcgagacattccagggctggccccgcctgctcaaaactatcagattcacaacaggagattgttgtgggcagaagcttccataggcatgtgatggctctgaatgtaggcttcatgtggacgcactgcctgcgaagcagcagctatccatagggcgaaagatacatagtaacaattctttgtgcctgtatatctattttgtcttgttaactccgagccctaggtctgtattcctgcgtctggtgtttgtacaccgctggccgtttggctgtgtatatggtacagagatgagatcttaaaaccaaaccagtaattatgacaaatacttgaaagagctacagtaccgaaatactccagttggtactcgctgcacttcatgggcgaatatataaagggtgccggttgggccgtgtaacacattctgaattccgaagacccatgaaaagaatgtgaacgtttaaggct

SEQ ID NO: 2210 - DNA, 898 bp, Zea mays
  Clone ID: 700207429_FLI
gtcacagataggaaaagcaacgctgaagatcaaacggagccagcgatttccgcacctgatctcatcaaactgctggaggagtctatcctaactttccgccttttcctgaagaaggacaagagaaagagcggtgttcttatgagcgctagtcatggccacgctggtagctcgattcaacaagtgcagtcttcactcgataaggtaagccaagtcttatcctgtgggccaactgataatgaatctctccttcataacgtgtttacacgatcgttcatttctgtaccgtccgtatggtcccacccaccgaaacagctagtagcaaggacacgtctttcctagcatttgattctgttcacagttgttgctgagtctgcgtaagttgcaaatgtctttgctgagtagtaattacatcacccacccaggcagaccttttgtgctgtattatactctctttttttgaatcgcatcgaaaaccccgcagaaagaggcgaaggtgaaggagctgctgaagaagaggaaagggtggaagagcaaggcttggccaggcacgatggaggaggtccagctgctgttcgccctgatcgacatcaaggtcgtgtcgcgggtgctccggatggggaagctgagcaaggagcagctgctgtggtgcgaggagaagatgagcaaggtggacctcaccgagaaccggctacgccgcgacgggtcccccatccttttcccctgttagaccgacgcccccttcctgcctgcctccgggggcgtaaaccgagaacctcccttgttagttcggcatgccaggggttaccatcccttcggctaccttatcagactatatatgtacatgcctttaggttggatctgaattgaaaatgtccatactaaagtaggggcttaagca

SEQ ID NO: 2211 - DNA, 1174 bp, Zea mays
  Clone ID: 700207483_FLI
gccattgtgtaatcctcatcctccgtcgagatcaaggaagaaagaaagcaaccatggcggcaaccggaatgtccccctccccctcggccgcaataactcgccacatccatgctcgtcgttcctgtgctgctgcttccttgtccctccgccgttcgggcttcctggggcgcgtcgtgctggccgcggtgccagtggccgtggacgccacccggcgccgccgcgtctccgtgtcggtgcggatggcctgggacggtccgctctcgtcggtgcgcctcatcatgcagagcaggaacgcgaagctgagcgagaagctcaaggagcacatcgaggacaaggtgggtcgggcggtgtccaagcactgccacctggtccgggaggtggacgtgcgcctctccgcgcgcggcggcgagctcggccggggccccaagacgtcgcgctgcgagatcaccctcttcaccaagcgccatggcgtcctgcgcgccgaggaggacgccgagtccacctacgccagcatcgacctcgccgccgccatcgtcaagcgcaagctccgcaagatcaaggagaaggagacggaggtgcgccgcggcggagacgctgacggcgtctgggacgagatcccgccggccgacctgctgccccccgccgtggccgaggccgacgacctggaggcggccgtgggcgctgaggacgaggagacggtgctcgccaaggtggtgcgcaccaaggtgttcgagatgccgccgctcacggtggaggaggcgctggagcagctggagaacgtggaccacgacttctactgcttcagggacgaggccacggggcaggtgaacatcctctaccgcaggaaggaaggcggatacggcctcatcatccccaagaacgacggcaaagtggataccgttggcgttgtgccaccacccgccgtcgctgcggagccggagccgtcctacgcagtgcacgccgctgacaacaacaactcctgaactgagccactcgtcgacgtctcatccaaccaaaaccaaaacgagagagaatgcttgcttggtactgtaaaaataaaacaaacacacctcgtcgacgtctcatctgcatcagttgcatgcatgcattgctgtgatgaatgtgtctgtgtttgtgtcacccacacaaactgctcatgttagctctccatttc

SEQ ID NO: 2212 - DNA, 659 bp, Zea mays
  Clone ID: 700207524_FLI
ctagaacgaacagccgtctcgtatttcgttttgtcttctgactccggtccggtaagtaatcagagtccaggcggcagcacagcagcttcctttcctccggcgatggcgaagaatcccaaagatgccgctccggaggaggagatgcccgccgcggccgaggaacaggcagcgcctgccgcgacggtgaaggtgctcttcttcgcccgcgcgcgggacctaacgggcgtggcggattccgcggtggaggtgccgccggggagcaccgcgggggagtgcctcgcgcgggtcctagcccagttccccaagctggaggagatccggggctccgtcgtgctcgcgctcaacgaggagtacgcggccgactcggccgcggtcgccgacggcgacgagctcgctgtcataccgcccatcagtggcggctgacgttattaaccacggccgacttgtgtggaggtgataaaagatatgaagacatcgatcgttgaggcaaaaaaaggttcctctcccttcttcatggtcagtttatcaccacgaatgattgaaattattatatgctcgataaaataatctcttgttcttgattacaattttgttcacgttgatcaatagttttttgttgtcatagaatggatgaaatgaatgcttctcaactagctgat

SEQ ID NO: 2213 - DNA, 3060 bp, Zea mays
  Clone ID: 700207535_FLI
cccagatctcgctggaggcagcggcagcggcggcggtggggggcgatggcgctcaacatgaagaccctgacgcaggcgctggcgaaggcgtcggctgtcatcgagaagacggtgtccacgacggtgcaggaggtgacgggcccgcgcccgctgcaggactacgagctgctggaccaggccgggtccggcgggccgggactcgcgtggcggatctacacggcgcgaccgcgggacggcgccccctcggcgccctaccccgtcgtctccgtctgggtgctcgacaagcgcgccctcgccgaggcacgggcgcgggcggggctgtcgaaggcggccgaggacgccttcctcgacctcgtccgcgccgacgcggcgcggctcgtgcgcatgcgccacccgggcgtgctccacgttgtgcaggcgcttgacgagaccaaggccgccatggccatggccactgagcccgtcttcgcctccgtagctaacgcgctcgggtgccttgacaacgtcggcaaggtgcccaaggagctcaagggcatggaaatgggactacttgagattaaacatggactgctacaagttgcagagacgttagattttcttcataacaatgctcatcttgcccatcgagctatatcgcctgagacggtctttataacttctaacggatcttggaagcttggtgggtttggttttgctctttcagttgatcaagccacaggtggtttgacttcatcacagctattccattattcggactacgatgtcgaggatacagctttgcctcttcaaccgtcgttgaactatactgcaccagaattggttcgaagtggagattctaaagttggctctgcttgtgacatgtttagctttggatgtctagcttaccatctggttgctcgtagaccacttctggactgccataacaatgttaaaatgtacatgaatgccttgacatatttaacaagtgaagccttttctaatattccttctgatttggtatcggatttgcaaaggatgatatcgatggatgcagtatcgcgtcctagtgctgtggcctttacaggttcttctttcttccgggatgatacgaggttgcgcgctcttcgtttccttgaccatttgcttgagagagataatatgcagaagacagagtttttgaaggcattatcagatatgtggaaggattttgattcccgagttcttcgatataaagttcttcctcctctttgtgctgagttacgcaacatggttatgcagccaatgattttgcctatggttctaacaatagcagaatctcaggataaaggggattttgaacttgcaacactgcctgcgcttgttccagtgtttacttcagcatcaggtgaaactctacttttgcttgtgaagcatgcagatctcatcattaacaaggccacacaggaacatttgatatcacatattcttccaatgctggttcgggcttatgatgacaatgatccccggttacaggaagaagttctgcgtcgaacagtatcactgtctcgtcaacttgacaccaagctagtcaaacaggctgtgcttcctcgtgtacatggattagctctaaagaccacagttgccgcggtgcgcgtgaatgcgttgcgctgtttaggagatcttgtgccatccctggacaaagaaggtatattgggtatcttggagacggttcggcgttgcacagctgttgaccatactgcgccaactcttatgtgcacacttggtgttgctaatgcaatctataaacaatgcggtgtggagtttgctgcggaatatgtgattcctctcatcttcccattactcacagcacatcaactgaatgtacaacaatttgccaagtatatgctatttgtcaaggacattacaagcaagatcgaagagaagcgtggtgtgactgttacagataatgggaacacagaggtaaaagcatcaccttcattggcaaacgggatccattctgaacctatgccaggacaaataccagctgcaaagagcagccctccatgggatgaagactggggtccttctaagaaaaccggtgttccatctctctcagttgattctagtgcacagacaaagcaaccctcagtacacccttttgacttcagtactcaaacaaagcaatccacaccactcccctttgatttgagcacccgagcaaagcagccatcattagtttctcatgctacagcagctacaatcccacctgcgcaaccacaaccagtacaatctcttgtgcccagttcaggacctcaaacttctggctcatgtgcccctgttgacattgagtggcctcctcgaagaagctcgtcatccgacttcaatgcatccttgtctattagcaaggagaatgaatctggaaggctatctagcgacggacttgacgatattgatccttttgctgattggcccccaaaacctagcaatgttactagcattacagcaaccgagcatcgtccaagcataaatcaaaatatttctggatttagctcaggtaacatagggtttggtggcaacgggaattctatagggcaagcgaaaagcaaccaaatgagctggtcaaacacgtctaatctgatgggcatgaactcaactggcagctatttgaatcagggcagtgcagctctaggttttggaaatccaattggaggattgagcactggcctctccaatccaagcagttccagtacaggcctgagcatgatgcaacgaaaatctgattttggatcactgtccatgtcggccaataatgctgcaaatggcccacccagacttgcccctcctccatctacttcagttggaagagggcgtggtagaaatcaaggacaatcagcactctcccgagcatcaaggcctcctcattcgaactcgtcatcaggacaacaacctatcctggatttactttagtaagagaggcttgcctctattcttggcgatgacgattgtcaatgtgtacatcttcaaacctttgtaaggtgagcatcatactgttcttttggacatgcatgtggtgaaagcatatatatattttttgttcatttc

SEQ ID NO: 2214 - DNA, 1583 bp, Zea mays
  Clone ID: 700207577_FLI
ggcaaaatctgcacgagagacagacgacgagatggccgatgcggaggacgccgccgccgcgcgccgacgggccgccataaccgactaccgcaagaagctgctcaactgcagggagctcgagtcgcgcgtcggcaccgtgagagaaagccttaaaaatgcaaagagggattttaccaagactgaagacgacttgaaatctctgcagagcgtggggcaaataattggagaggttctccgacctcttgataatgaacgctttattgtgaaggccagcagtggtccccgatatgtggtcggttgccgaagtaaagtagacaaggagaagttgacatctggaactcgtgttgtacttgacatgacgaccttgacaataatgcgcactcttccacgggaggtggatccagtggtatataacatgcttcatgaagatccaggaaatgtcagttactctgctgtaggcggtttgtctgatcagattagggagctcagggagtccattgagttaccacttatgaaccctgaactctttcttcgggtgggaattaagcctcctaagggtgttctactctacggtcctccgggaactgggaagaccctattggcaagggctatcgccagtaacatcgatgccaactttttgaagattgtttcaagcgctattattgacaaatacattggagaaagtgctcgtttgattagagaaatgtttggctatgcacgtgatcaccaaccatgcatcatcttcatggatgaaattgatgccattggtgggcgaagattcagtgagggaactagtgctgatcgtgagatccagcggacgttgatggaactccttaatcaattagacggttttgatgagctcggaaaggtaaagatgatcatggccacgaatcgacctgatgttctggaccctgcgctcctgcgtcctggacgtttagacaggaagattgaaattccgctacccaacgagcaatcaagaatggaagttctaaaaatccatgcagctggtattgccaagcatggggaaattgattatgaagcagtcgtgaaactagctgaaggtttcaatggtgctgatcttcggaacgtgtgcactgaagctggtatggctgcaattcgtgcagagagagattatgtagtccacgaagacttcatgaaggctgtgcggaagctaaatgatgcgaaaaagctggaatcaagtgcgcattacagcgcagattttggcaaagagtaatgtatgatgctggacagatgcataaggcgtgtatcatcagggagctctgtcagatgcgatgcaaaagcgaaagaaaccagctatttatgttcaggctccaggcagctccactttttcctgatattcacaattttagtgaggaggattgtcaagctgaccagtgggggaaatcagtcgagaatttagtagttctgcgccagatggcctttgcttctgtaaatcgtacgtaatctgcttccgtgcgtcttagtctggtaataactctggttggacctgttctgtttccatgtacttttggacagtgtgcctgactccgcggtaacagaggaaaaaagaacattttgtattc

SEQ ID NO: 2215 - DNA, 1336 bp, Zea mays
  Clone ID: 700207602_FLI
ttggtagcggctcccccagctctggaccttctcaaacccttccccgtgggccgtggccgccgtctgcctgtctccttccactcgccactccgatttccctcggtcagacgccgaagccgaaccctgactccaattctctcgtgcgagtgacatctaggtttccagacgccttcggtgagtacagggaaggaagtcgccatggctgacgacgaacaggcggagaagaaggaggaggtccccgagcttgctccttttgacccaaccaagaaaaagaagaagaagaaggtggtaatacaagagccatcagatgaggtggataacttggcagagaagacagagagcttgactgtaaccgagtctagtgagccaagctttgcgggcatgaaaaagaagaagaaacatgtggaacttgattcttctcttaccgagaccggagatgttgatgacacaggagacgatcaagttagagaggatgaagaaggagaagggattgtgctcgctggtgccgctgccaccagatacccttgggaaggaactgacagagattataagtatgaagagctgcttggcagagtattcaacattttgcgtgagaacaacccggatcttgctggtgatagaagaagaactgttatgaggccccctcaagtcctcagggaaggaacaaagaagacagtttttgtgaacttcatggacttgtgcaaaacaatgcataggcaaccagaacatgtgatgatgttcttgcttgctgagatgggaacaagtggatccctggatgggcaacaaaggttggttatcaaaggaagatttgcaccaaaaaatttcgaagcgatacttaggagatatatcaatgaatatgtcatatgcaatggttgcaagagtccggataccattctttctaaagagaacaggttgttcttcctccgatgcgagcagtgtggttcatcgaggtctgttgctcccatcaaggctggattcgttgcccaagtgggccgtcgtaaggctggatcttaagctacctactacttgcctgaagtcgcttcccgatgaagacaatgcaaactagtttgctggtccacaaaaatcattgttgcactttcccttgtgcctacacagttcactggatttctgctgttcgctatacttggattggtgctgtgaatttatttcgtgtgatgagaggatttgtgtttgcggctcacttgtgtttactacgtttgttttgctcgtgattttgctgtggaaggcactgtcgggagcttcccgagttaggacgagtaacaaaaaaacgtgttgcttccattcagataaaaagcaaggctgcagcattctgaac

SEQ ID NO: 2216 - DNA, 747 bp, Zea mays
  Clone ID: 700207685_FLI
gatgtgtacaagttagctgagaatatcaaatccaagggtggtaagatcacccgcgaacctggtcctgtcaagggaggatccactgttattgccttcgcacaggatcctgatggctacatgtttgagcttatccagagggctgacacacctgagcctctttgccaggtcatgcttcgtgttggtgaccttgagcgttctatcaagttttatgagaaggccctagggatgaagctcctaaggaagaaggatgtacctgattacaagtataccattgccatgttgggctatgctgatgaggacaagacaactgttctggagctgacgtacaactatggagtcacagaatacagcaagggcaatgcatatgctcaggttgccattggcaccaatgatgtgtacaagagcgccgaggcggttgatctggcgaccaaagaactaggtggcaagattttgcggcagccagggcctctacctgggatcaacactaagatcgcctcttttgttgatccagatggctggaaagtggttctggttgacaacaccgacttcctcaaggaactccactgaaggctcgggatacccaggtgctgtgctaggatgtagtaatgcttgtctgtggtgtaataagatgtgggtggtttgtttctgccctgatgaacttataatactgaatgttgctacagaggttgtgcttctgccagtgaggtttgggatttgctatgtaactgtgcctgcgggctccgattc

SEQ ID NO: 2217 - DNA, 1948 bp, Zea mays
  Clone ID: 700207738_FLI
gatctcttccagctcccaccagcaactacaatagaacatcacatcctagctagctactagctcgagctctcatcagaagatacatactgatcatcgatcaccagtcaccaccaccacctaaggctcagtcaccaccaccacctaaggctcagacgatctcagagattgaaagccacacatcagccatggggctccttcctaccgaccgcatggacagcctcttctccccgcgctgccagtgggtgaacggccccatcatcgtgggcgcggggccctcgggtctcgccgtggcggcgtgcctgcgcgagcagggcgtcccctacgtcatgctggagcgcgccgactgcatcgcgtcgctgtggcagaggcgcacctacgaccgcctcaagctgcacctgcccaagcagttctgcgagctgccgcgcatgcccttccccgaccactacccggagtaccccacccgccgccagttcatcgactacctcgaggactacgccgccaggttcgagatcaggccggagttcagcaccaccgtggtgttggcgcgctacgacgagacgtcgggcctctggcgcgtcaccacctcggcgcccgccggcgccaacggtggcgacgtggagtacatcggccgctggctcgtcgtcgccaccggcgagaacgccgaggccgtcgtgcccgacatcccgggtctcggcggcttccacggcaaggtcacccacgtcagcgactacaagtcaggggaggcctacgccgggaagcgcgtgctcgtggtcggctgcggcaactccgggatggaggtgtcgctcgacctctccgaccacggggcccgcccggccatggtcgtgcgcgacgctgtgcacatcctcccccgtgaggtgctcggcaagtccaccttcgagctcgccgtgctcctcaggcgctggctcccgctctggctcgtcgacaagatcatggtcatcctcgcctggctcgtcctgggcaacctcgccaggctcggcctccgccgccccgccgccggcccgcttgagctcaaggagacacacggccgcacacccgtcctcgacaccggcgcgctcgcgcgcatccgtgccggagatatcgccgtcgtccctgccgtggcacgtttccgaaagggcggtcaggttgagctcgccgacggacgcactctcgacttcgacgccgtcatcctcgccaccggataccgcagcaacgttccccagtggctcgagagcagcaacgattccttcaacaaggaaggataccccaagacggccttccctcacgggtggaagggtcaatctgggctctacgccgtgggtttcacccggcgtggtctcttgggcgcctccaccgacgccgtgcgcattgccaaggacctcggcaacgtctggagggaggagaccaagcccacgaagagggccggcgcctgccacaggcgctgcatctccgtcgtcttctaatccgacccaccagcatgacgacgacgaatgaagctaacttaattactgaagcacacacataaacagacacacagacagatacacttgttcgttcatggtgttttagttagtcagtccaatccccttggttcgttgttcattaatttgttctttgcctgccaggtacattagtagtaatacggtgagagtgagttgagtaaaaaaaaaatggagccctcccatcagtagggaagaagtgagtgagccctagaggggattttttttactgcagctatggccgctagcttggtgtatagtagcaacctgttgatggaagaagaggctctctttatttttcattgacctaccagcatgtaaattatttaatttctttgttgttgtatacacaccaccggtgtattattagttactctactgcagcttgtagcttgtagtagtagccagttttagtagtgtatggttatatttatatatagtgatgaagaggt

SEQ ID NO: 2218 - DNA, 2847 bp, Zea mays
  Clone ID: 700207818_FLI
gtctgccccctgctcttcgcggctctgccgcactcgtcttctctcttcctcttctctctgtctctcctaccctccgtcaccacctcgtccctatggcaagcgagcttctcccagcctcttcctaccagactatcctcctgccgcaacggacctgacggtttccctccatctggcctccctgtcgcgcgagctgatcgacccacgcaagcgcaatgccgtccagaggctagttcgagctgctgagcgctgatcacggtgaggccacccagatccacccgactgccacccggatttcgcaccttgccttttcttctctcgttcacccagctggctcggtcgctcctccctctctagtgggcaactgccaactgggcgactcgccgacgcccctacgccaggtgctcaggtctttgtcgggtcttttgccggcgacgaacacacaccagggtattgtgtagagctatcatctccctcggtttcttggaagaacaattatttgacataattatcaccataagatgcctggaattacagaggatggagttgttgcagaggaggtgccgaacggggtgaatttctctccacagaacgaaagtctgcctgccccaaagtcgacagcagcttcaacgatggcgggtagcatgcaaagcgaggcgcttgagatgcatgttgaggcctccggtgctggggaaccctcaatcgagcaactctacaacaacgtatgcgagatggagagctcaagtgagggtggctccccatcacgcgagagctttggctcggacggggaggagtctagaattgactcggagcttcgacatcttgttgctggggagatggaggccatgaaggtgattgaggaggaagaggagaatgggagtgttgccaacgttgtaccccctgctcctgctgagaatgggaccccagtaaaggaacactcttccagttcgtccaagaagtcgaagaaggcatcaaaatcacagcttgagtctgatgcctctgttggactcaatggaaaggcgtccactgaggaaggtgagagcgaggtcagcaaaccggcaagccgagttggccgacggcggaaatcaaatgccaacccacagagtggaacagaagatgctgggcttgataacccagaccttggtccatttcttcttaaacatgcaagagacttgattgcctcagaaaacccacggcgggcattgaaatatgctctccgtgccacaaagtcgtttgagaagtgtgctggtggaaagccaagcttgaacttagtgatgagtttgcatgttgttgcagcaatctactgcaacttgggaaaatatgaagaggctgtacctgtgctgcatcgatccattgagatccctgtaatcgaggaaggccaggaacatgctctcgcaaagttttctggttgcatgcagttgggggacacctatggcatgctaggtcaaactgcacactcactgcaatggtatgcttctgggcttgaaatacaaaagcaaacattgggagagcaagacccaagggttggagagacttgtcggtacttagctgaggcccatgtgcaggcactacaactcgatgaagcacaaagattgtgtcagatagcccttgacatccacagggagcatcgcgagacggcctcactagaagaaacagctgataggaggctgatgggtctaatttgtgacactaagggtgatcacgaagctgccctggagcatctagtgatggccagcatgtccatggtagccaatggtcaggagacagaggtggcctcagtggattgcagcattggtgatatctacctctccctgggccggtatgatgaggctgtgtttgcttaccagaaagctctcactgtattcaagaccagcaaaggggagaaccatgcaactgtggcttctgttttcgtgcgcctagcagatctgtacaataagacggggaagctgagggagtcaaaatcctactgtgaaaacgccctaaaaatctaccaaaagcctattccagggacttctctggaagaaatcgccactggtctaactgacgtctcagccatatatgagacgatgaatgagcacgagcaagcgctcaagctacttcagaaggccttaaaaatgtacaacaactctgccggccagcagagcacgattgctggcattgaggctcagatgggcgtgctgcactacattttgggcaactatggcgagtcctacgactccttcaagagcgcaattgcaaagctccgcacttgtggcgagaagaagtctgccttcttcgggattgccctgaaccagatggggctggcatgtgttcagaggtattcgataaacgaagcagcagaattgttcgaggaagctagaactgttctggaacaagaatacgggccataccatccggatactttaggagtctacagtaatcttgctggaacttatgacgcgatgggaaggctggatgaggccatcgagatcttggaatatgtggttggaatgcgcgaggagaagctaggtacggcaaacccagacgttgacgacgagaagcggaggcttggggagctattgaaggaggctggccgggtgcgaagcagaaaggcgaaatccctggagaatctgctcgagaccaacccgtatatcgccaccaagagaaatgccgttgctgcatgagtcactctgtcctcagatgacacggtattgtgatggaaggcgaggattgttactaaggtattcgtattcatttggtttgttcagatggggggtaacgggagtagtggtgtttacatatttggaaatatgaaaatgcttaaattgattgttgtaaagtttcaaatgctactgtttctccttttctact

SEQ ID NO: 2219 - DNA, 1289 bp, Zea mays
  Clone ID: 700207823_FLI
cctctccctacccctacgggtccagtggccactgcgtcttgccgcaggcagccctcttctctctcttccgccgtctcgcctcctcacgccattaaaccccacccgcgcgcgcggcggccggcggcgagccctcacccatccgagcaagccgaggaggaagcgagcgcgcgaaagtatcaggaggaggcatgggtaccctggggcgcgcgatcttcacggtgggcaagtggatccggggcacggggcaggccatggaccgcctcggatccaccatccagggcggcctccgcgtcgaggaacaggtttcaaggcatcgtacaatcatgaatatttttgagaaagagccaaggatccatagagatgtgtttgttgctcccagtgcagcagtcattggggatgttgagattggtcatggatcgtcaatctggtacggatccatattgagaggtgatgtcaacagcattcatattggatctggtactaatatacaagacaattcccttgtacatgtttcaaaagctaacattagcgggaaggtcctcccaaccataattggaagcaacgtgacagtgggtcacagtgctgtattacatgcatgtaccattgaggatgaagcttttgttggtatgggtgccactctgcttgatggagtggtggttgaaaagcacagcatggttggtgcaggatctcttgttaagcagaatacaaggattccttctggagaggtctgggtcggtaatcctgccaagttcctaaggaagcttacagaagaggagattgcgttcatcgctcaatcagcaaccaactatatcaacctagcccaggtccatgcagccgagaacgccaagagcttcgacgagattgagctcgagaagatgctgaggaagaagtacgcgcacaaagacgaggagtacgactcgatgcttggggtggtccgcgagatcccgccccagctcatccttcccgacaacatcctcccacacaatgctcagaaggcggttgcccgctgaaccttttctcaacccatgcttggcgttgttgcctgttgtcttggagcattttgacacgcgttcgttctctgtttttttatgaagcccaataagattgggtcgagcactgttttaggatcgaccgcacacaacaccacctctattttaaactgcaatggacaagaagctcagggtctcatttactcatctttgacttctctctgtggagcacttgtaatcgaagatcgtgccctgttttctgtactatttcaaactgcatgcagactcctgggttccgtt

SEQ ID NO: 2220 - DNA, 824 bp, Zea mays
  Clone ID: 700207882_FLI
cccgactggttgctctgctcgtgcaccaccactgccagcgatccttgggttggtgaaacagctagctcctaagattgtgatagccatagaccatggcgctgatcgcgctgatcttcccttctcacagtacttcttaaactgctttcagtcttgcatgttcctccttgattcgcttgatgctgctggcattgatgctgattctgcctgcaagattgagaagttcctgattcagccaagaattgaggattcggtgcttgggcggggcaaggtggacaatccaattgcatggagaagtgcatttgcagctgctaggttcgtgcctgttccacccagcaattgggcagaggaagaggccgattgcctcctgaaacgggtgcaggtccacggtttccatgtggagaaatgtggggtcgggctcacactatactggcagcatggcgagcttgtcactgtatcagcatggcggtgctgatcagcaatccacgcctgtgggcaccaatatttcaccaccatttgctagcagcttcaactccagtaacgtgtatttcgtcttgcaatttagtgttgcaaaggtaacaaatatattggtgttgaacccttcatgttgattatctttgcaacttattagctagaactagcggatttttagcaatgttggtgtcaatgtctctagtgtaatgatgttgctctaggtttttaccctgcttgctctcgggtcactagacattctcatgtgacttgaaacactgcttgtgaggagagggtataattaacctatcaaatgtctgtggtacagtatcaatacgtgtttcatgttcctttat

SEQ ID NO: 2221 - DNA, 603 bp, Zea mays
  Clone ID: 700207896_FLI
tccgcagagagcttgttccgtccaggcaaccaaaaagcaagttgccccgccgcgcagaggaagaagagagcagaggaggatgctcgtacgaagcagaccgcccgcaagtccacgggaggcaaggccccccgcaagcagctcgccaccaaggcggcgaggaagtcggcgccgacgaccggcggcgtgaagaagccccacaggtacaggcccggaaccgtggcgctgcgcgagatccgcaagtaccagaagagcacggagctgctgatccgcaagctgcccttccagcgcctggtgcgcgagatcgcgcaggacttcaagacagacctccggttccagagccacgccgtgctggcgctccaggaggccgccgaggcctacctcgtcggtctcttcgaggacaccaacctctgcgccatccacgctaagcgcgtcaccatcatgcccaaggacatccagctcgcccgccgcatccgtggcgagcgcgcgtagccatcatctccggggatctgatgaatgtctagttaccaaacaaataggctgtattagcgtcgttgttctgtattcgttattttggattcggttgcagtgaaaaacagctttact

SEQ ID NO: 2222 - DNA, 1039 bp, Zea mays
  Clone ID: 700207929_FLI
tgctactgcagttgcaagataccgtacgaaatatcaggctgctcagaagggtaaggtcggaatagtcctggacttcaactggtacgaggctcttacaaactcacctgatgaccaagcagcagcccaaagagccagggacttccacattggctggtttgttgatccattgataaacggacactatccacagataatgcaagatctcgtgaaggagaggctgcccaggttcactcctgagcaggctaaactggtgaagggctcggcagactacatcggtatcaacgagtacacatccagctacatgaaggggcagaagctggtccagctggcgcccagtagctactctgccgattggcaggttcaatatgtttttgcacgcaatggcaaaccgattggaccacaggcgaattctaagtggctctacatcgccccgacggggatgtacgggtgcgtgaactacctcaaggagaagtatgggaatccaacgatctacataacggagaacggaatggaccagcctggaaacttgacccgagaccagtacctgcgcgacgccacgagggtgcggttctacaggagctacatcggccagctgaagaaggccatagaccagggagcgaacgtggctggctacttcgcctggtctctcctcgacaacttcgagtggctggcagggtactcgtccaagttcggcatcgtctacgtggacttcaacacgctcgaacgccacccgaaggcgtcggcctactggttcagggacatgcttcagaagcattgagatctccagagccgagcctgagcacggaaggtaccattttgttcagcttcgcctagtgtttgggatggcccaatggttcaaatccggctcagtgcctggctaccaaaatgggaacaaaggacagctaccccgatcaattgtgatgttgtgtgtttgtgggtatgttctctctggagtttgagctgtggttattttatcgtgttggttgatcgtgtttgaaatgcttaattcaggactgtgacatctcgagttgttttaact

SEQ ID NO: 2223 - DNA, 576 bp, Zea mays
  Clone ID: 700207977_FLI
tgagaagtgacggtggaggagctcccttggctacggacattgcgaacggtcatatggtgtgcggatgcgacaacatcgcgtattgcaaggcgaattcgacattcgggacctgcgtgatacccccaccgccgccgccgtcacctcccaaggcatccacccccggcagcagaggctcaacagcaggcggcgatgctagcgctggaacgatggccctgtcctcgcaatggagcttcttgctgggactggcttctctgcttcttttgtcgcgctcgtgagagccgagcggcattggtgactggttttgctgctcttgctacatgctctgcgagctgataggagcatcgtcccatgagatgagctgaggctgagctgaactgagctgtatatttgggtttactgcgcaacgtagttagttggatacgggaatcagttaaattcatcattcatttttattgattggcgtcgttatcgtgaatgttctaataagttccttaaaaaaatgtctcatggccctactgtcagtgacgtagccatgtgaaccgggagagagaaattacagcgtgtttatcttgttcg

SEQ ID NO: 2224 - DNA, 872 bp, Zea mays
  Clone ID: 700208013_FLI
gcctcagcacgacgggattgcgcccacacgcgacgccaaacgaaacagctagccagcccccattcttctccggctccggtgcattccgtgtcctgtcctgtcctgtcctgatggaagcagcaatggctgccacgtcctccctactccttgcctccggctccaggaggtggccagcaaccttgcctccttccccctggccccagcagcagcgtctggttattttctgcctcgctgcaagaacgaggccgctggacagcaagaggggtagctggaggcgctcttccagtgccaccggcggccggtcgaccgccgtctcgtcgtcgtcggaaagatgggttctcgaccctgcaggagacggtgactggcgccacatcggctacaaagtcgcgcgccctggggcgatcgagatagtctcggaggacacggcggtgaccgtgggccgggtcgccgacaaggcggacatcgtgctccccatcgccacagtttcaggcgctcacgcccggctggagaagaagggtggcagcctgctggtgacggacctggacagcaccaacggcacctacatcaacgagcgccggctcaacccgggcttccccgcgtccgtcgaccccggcagcctactcatcttcggtgacatccacttggccatgttccgtgtaaggaagacggtggtggttgaggcgcccagtactagtcgtagtaccgaggaggccgagggagctcagcaagagaccaccgcagctgaagatatttgacatgtgcctttattacagtaacagtagccccattttacaaattacatggtgatcgtgatccatctacttccagtctcctcaaaagccttatatatccaatataaattacatgatcag

SEQ ID NO: 2225 - DNA, 1280 bp, Zea mays
  Clone ID: 700208029_FLI
tgcgtccgcaaccctgtgcgggtcgatcaagaagcacctactagaccatttccacaagaaacctgtgccaccaaagccaaagccagaacctaagccagagccggagccgaagccagagaaccacccacctacaccaacatacggatcctcaactccgatctaccatcctccatccaggcagttgtttgacaagaaacacatgtttgatcacttccacaagcaccacgactaccatcacttctttgaccacttccacaagaaaccagttccaccaaagccaaaaccagaacctaagccagaaccaaaacccaagccccagccagagtaccactctccaactccaacatatgggtcgcccacaccgatctaccaccctccggctaggcatttgtttgataagaagcccttgctagatcacttccataaggaccatgactatcaccacttcttagaccacttccacaagaaacccgtgccacaaaagccaaagccagaacccaagccacagcctaagcctgagtaccaccctccgacacccacatatgtttctccaactcccatctatcacccgcccgctgagacagaaatgaagtatgacaagaagcacttctttgatcactttcacaaggaccatgactaccaccacttctttgaccacttccacaagaagcccgtgccacccaagccaaaaccggagccagagccaaagccaaagccacaacctaagccagagtacaagccccccatgcccacatacgggtctccaactcctatctaccatcctccagccaagaaagaagtggcatttgacaagaagcacttccttgatcacttccacaaagaccatgactaccaccactttttttaccactttcacaagaagcctgtgccaccgaagcctaagccggagcccaagccagagctcaaaccacaacctgagcctgagtaccacccccctacaccgacctatggatcaccgactcctatctaccaccctccggccaagcattgatcgatggagttgaatggtggtcagtgatcgacgtcgctagctaagagttgcatgtgtggtctagctagcgtggtttgcagtcccgcctttttgtttctacagaataaattatagctttatttgggtatgtatacttatttgtgtatcggttagtatcatataaatgtatgatttgagtgtgcgttgtttttaatatgcatgttctatgatgtactttattccttttaaaatattattatttatatgtagaagttaaaaggtttacagt

SEQ ID NO: 2226 - DNA, 799 bp, Zea mays
  Clone ID: 700208031_FLI
tccttcctgatcccaccgcggtctccttccgcgacacgcgcacacgccacagcgcattcgcgtacgtcaacggacgtcgaacccatcgcccatgggaggagagcacgaggagcaggagggtggcggcgcaaaggccgggggctactcctccggtctcccgccgtcggagccgccgcacctgcagggccagccgccgcaggagtacgggtacggcacgttccagggccctcggcatcctcccgtcgggttcccgcagcctgccccgcctcccgggttcggcggcggcggcggctaccacaaccagcaacagccgtacgcgcacgcggagacgtactacgcccaggggtaccaggccgtgccaggctatggtcctgttgctgaaggaagacctgtgagaatgaggcgtctcccatgttgtggcctcggcttaggctggtgcctgttcattgctgggtttttccttgctgccattccatggtacattggggctttcgttctgatatgcgtgcgggtacatgaccaccgagagaaaccaggatatgttgcttgcacaattgctgccgttgttgctgccgttgccatattcctgggggtaactaagggaacacacgtgtggtgaattgcttccagagaaggcaatggatttatacttgtatagtatctgtgtgtattaaaagtgtggagcgacatcgagatgctcttatgacttatgttcatacatattctactttgtaatgaaattttagatgtagtaatgcaccgtctgcttcatataataagataagataccttgtgtcgt

SEQ ID NO: 2227 - DNA, 2685 bp, Zea mays
  Clone ID: 700208060_FLI
ggaggagaggcctaggcgggagcgccggaggtttgaggatgtcggtgcgaatgggaagaatggtgatgtgagtaagtcgagtaaggaaatctcatctcatgagcagaagggggagttatcaattaacggagattcacagaacggcaatgggcctaatgctggttctcagcaactgctcagtgccgttcctatgccatcttctgttcccattccttcaaaggtatcttcaattactaccaacaatgcaaatgagggagttagtattagatctgatgaggttaccgtaaaatctagtacagatggaagtgcaacatctgctgctggcaaaagtagtaacctatctcttgatgctttagccaaagcaaaaaaagctttgcaactgaagaaggaactgtcagaaaaactcaagaaattacctatggtaagaaaacatagctagtcccagtcccttgctctaatttttaattgtacctttgcaactgttctaagcttttttcctcccccacagcttaataataagcttggtacatctgttactgctgcacaagtttctaaagaagaagcaaaaacttctgtatcagctgtagatgcacaactcttttctaaaggagaagcaaaacctactgatgtttctgttctgccaactagtaccatctctggaacgccggccgtaggtggtgctatcggtattccaggtcttacgaacattcccaatcttgaatctgtgaagcgagcccaagaacttgctgctaagatggggtttcgccaagatccacaatttggtcctcttatcaacttattccctggtacatccactgaagttactgtgccacaaaggcctgcaaaggctcctgttcttcgccttgatgcccaaggtagggaaattgatgagcagggaaacgttatcagcatgacaaagccaacaaatctgagtactctgaaggtcaatataaacaagcagaagaaagaggcttttcaaataatcaagccggacttggactctcttgcaaaatcaagtgttcattttgatgaacggatgggcataaaccaaaagaagctccttcgtcttaaaaggccaggatttcagttcgttgaagagggtaaactcactaggcaggctgaattgcagaaaattaagagtcaatttggtgaagcgcaagctaaagagctcaaagtaaagcaagcccagcttgctaaggcaaagacagaagtagacatgaatccaaaccttattgaggttgctcttggtgtgagagctccaaaacaaaagcagaaggaagagatccctgaaattgagccatggttgtttttgtttcctttttgaatgatgtttttaaggttctatgttgtgattgaacataaagtaatttttattgttgttttcagggatgcaaaaattttactttctgccacacatgaggatgtctctgtggagaaacttaatttggacaagatcaccatatatgttgaacatccagaaccatatgatccacctgctgagcctgcaccaccgccgccccagccactgaagttgactaagaaggagcagaagaagttgagaacacaaaggcgtcttgctaaggaaaaagataggcaagaaatgattaggcaaggcctcttggagccacctaagcccaaggtcaaaatgagcaatcttatgaaagtgctaggctctgaagctgtccaagaccccacacggatggagatggaaataagaactgcggctgcagagcgtgagcaggctcacgttgaccgtaacattgcccgcaagctcacaccatctgagcgccgtgagaagaaagaacggaagctttttgatgatccaactaacacagtggagactatagtttgtgtttacaagataagagacctgtcccatccacagacacgcttcaaagttgatgtgaatgcacaagagaataaactgacaggtgctgcggtcattactgatagtatcagtgttgtggttgttgaaggggggaaaaagtcaatcaaaaggtataataagctcatgctaaaccgtatagattgggctgctgctgttggtggtgatgaagacgcagaagcagaagcggaagctgacaagccagtgaatagctgtgaattggtctggcagggtagtgtggcaaagcccaccttccacaggttcactgtacataactgccggagtgaatctgcagctaagaagatattcgttgatgcttctgttcctcactactgggatcttgctgtcaattcctcggagggttctccctgagcaaagcacctgttcagaaccttggtagctactgctgatctttgctggctacatgctagttacgtgtggccagtgttatagcgcttgttatggtaagacccttaccacgagtatctacatcaatggcctcatcagttgaagtactgaactcagtaatgcctggtgttagggggtgtttatccctccattttatttcatttgtccctaaattgccaaatacagccatatttgtcaatttaggaactaaaatggaataaaatggagggactaaaaattagtccctataaaccgaacacccccttaatctgttgtgaacatgctatttcagagatgttattgttggattttcctgtggcctagaaactgttatgtgagcaactgttgaattttgcacgctcagcgtgcatttggaataaaccaattgcatc

SEQ ID NO: 2228 - DNA, 1131 bp, Zea mays
  Clone ID: 700208065_FLI
aggcgaatctctcgctaactgtcatcaatggcggccgagcccaagatcctagagctctccaacggcaagatcaccgcgaggatctccaactggggcgccaccatcacctccctcctcgtccccgacgcccaggggagtgtcgctgatgtggtgctcggattcgatggcttggatccgtacgtgaaaggcatgtcaccttattttggctgcatagttggccgtgtcgcgaataggatcaaggatgggaagtttacactaaacggacttgagtattcattacctgtcaacaatggacctaacagccttcatggtgggttgaagggatttgataaggtcgtgtgggatgtcgtggagcacaaagatggcgaatgcccttcaataacttttcagtatcacagcaaggacggggaagaaggctatccaggcgatgtaaccattcgagcaacatactctcttcctgaagctactactctaaggcttgacatggaagctacaccagagaacaaagcaactcctataagcctggcgcagcacacctactggaacctcgcaggtcacgcctgcggcgacatcttaaaccactcgctgcagatctggggcaagcacatcactccggtcgacgagaacacaattcccaccggcgagataatgcccgtcgatggcaccccttttgacttcacgacggagcgcaggattggcgagcgcatcgacggtgttcctggagggtatgatcataactacgtgctggactgtggcgacgagaaggacggcctgaagcgtgcggccaggctgaaagatccgtcgagcttgcggaccctggacctgtggactgacgcacccggcatgcagctgtacactgccaactacgtggatggcatcggtggcaaggcgggcgctgtctacgcgaagcatgctggagtgtgcttggaaacccaggggttcccgaatgccatcaaccagcctgagtttccctctgtggttgttcggcccggtgagaagtataagcatactatgctgtttgagttctcgggatgttgaatagtgactggacagcataaattgatgtaaaacatgttgaatgaataaacaagcagaaggataagctgtgataataatgcactagtttgcttc

SEQ ID NO: 2229 - DNA, 1331 bp, Zea mays
  Clone ID: 700208080_FLI
ggcgggccggtgtacgtggtgacggacccgtcggaccgcgaccccgtgaacccgtcccctggcacgctccggcacgccgccatccaggagggcccgctgtggatcgtgttcgcgtcggacatggccatccggctgaacgaggagctgctggtgaacagctacaagacgatcgacgggcgcggcgcgcgcgtgcacgtgggcggcggcggcgcgtgcatcacgctgcagtacgtgtcgaacgtgatcatccacaacgtgcacgtgcacgactgcgtgccggcggggaacgccgacgtgcggtcgtcgccgacgcactacgggtggcgcacgcggtcggacggcgacggcatctcgctgttcggcgcgcgggacgtgtgggtggaccactgcgcgctgtggcggtgcgcggacgggctggtggacgccatcatggggtccaccgccatcaccgtgtccaacagctacttcgcgcaccacgacgaggtgatgctgctgggcgccagcgacgcgtacctgcccgactccgggatgcaggtcaccatcgccttcaaccggttcggcccggggctggtgcagcggatgccccgctgccgacgcggctacttccacatcgtcaacaacgactacacgtcgtgggagatgtacgccatcggcggcagcgccggccccaccatcaacagccagggcaaccgctacatcgcgccggccgaccccaacgccaaggaggtgacgaagcgggtggagacggcggaggggcagtgggccgggtggaactggcggacggagggcgacatgatggtgaacggcgccttcttcgtgccttccggcgaggggatggaggacatctacggcaaggcctccagcaccgaccccaagtcgtccgcgctcgtcgacgtgctcacgcagaacgccggcgtcctcggcgaccccaggaacgacgccgaagaaaccgggtacaggggcgtcaactacgccggcgggagaactggcggcggcggcggctacggatacggctacctcgggatggtctacgccggcggcggcgaccagagatggagatcgcactcggcgctgtcactggtttcttcagctatcaccgtcgttgcgctcggatgcttgcatttgttgtaacatgtagacgtgtgattctcagttggaaaagttagcaagatggtggggaagattgtagctggggtagcagtaggaggagcgggggtaggcaggcaacagaaaccctgtgtgaagttgcacatgggtattgggtgggaggatattgccaagccagtcactgtacttcttacaaggagaaatggacgactcattctaacttt

SEQ ID NO: 2230 - DNA, 633 bp, Zea mays
  Clone ID: 700208151_FLI
gcaactaatcaacacataagcacacatccaaatgcccccttgagagcgagcgcacacactctctctctctcttcttcaacctcctcctctctcttccctgcattcttaggcttacatacatggcatacatggctcagcagctcgtcgcccggatcacaatggaggtggcgccatcgaagctgccgtcgacgatggccaggtgcgctaggctcccgaggaacctcgacacgatcgcggaggacgacgacgacgacaaggaggcagcagccatggagtcgacaagggagctgcctctccgcaatgcgagccgcggcgtgcaggtcgtcgtcgtcgtcgacgcccctgtgcactgcgccgacaagctggcctgctacctcgcccccatggccaagaccgagtgcctcaagatcaagatcaaagcctaagtttgtcaggacatagagagagacgagggtgaggcaatcgtctcatggagctggatttcttgctctcttgttttagtctgagcatatggcaatccgtttcgttttacgtatactacagttgctgtcagtgtacctgatgtgcgttggtgcataaaagtgctgtaaccacgaataaaaaaccatactaataacatgtgtttttaggttg

SEQ ID NO: 2231 - DNA, 1544 bp, Zea mays
  Clone ID: 700208165_FLI
gctaagatctacttcgtcatggagctcgtccgcggcggcgagctcttctcccgcgtctccaagggccgactcagggaggacaccgcgcgccgctacttccagcagctcgtctccgccgtggggttctgccacgcccgcggcgtcttccaccgcgacctgaagcccgagaatctactcgtcgacgagcaggggaacctcaaggtatcggattttgggctctccgccgtcgccgagcagttccgtcccgacggcctgctccacaccttctgcggcacgccggcctatgtggcccccgaagtgctcggccgccgcgggtacgacggcgccaaggcagacgtgtggtcgtgcggtgtcatcctctttgtgctcatggccggatatctccctttccatgacaaaaacatcatggccatgtacaagaagatttacaagggcgagttccgctgtgcgaggtggttctccaaagaccttaccagcttgctgatgcgcattcttcacactaatcccaacactcggatcactttgccggagatcatggagtcccgctggttcaagaaaggattcaagcctgtcaagttctatatcgaggatgaccagctgcataacgttatagatgacgaagatggcctgttagatatgggacctgctggtcctgttcctccaccattgccacctccaccgccacctctacctccaccaaaggttgatggtgatgaatcagggtctgactcagactcgtcgatctcatcctgccctgcttcaatgttatctgatgagagccaaaggccccgtggctctctaccacgtccagcaagtcttaatgcctttgatatcatatcattttcaaggggatttaacttatcagggttatttgaggagaaaggggatgaagtgaggttcatctcggctgagcccatgtcagatatcataaccaaattggaggacatagcgaagctgaagagcttcaagttgcggaggaaggactggcgcatctgcctggagggtacaagggaaggagttaaggggccattaacaattggcgcggagatatttgaactcacacctccccttgtaatggtggaggtaaaaaagaaggcaggggataatgaagagtacgagaacttctgtgacaaggaattgaagccagggatgcagcaccttgtccaccatatggtccgagcttcaagtatgctgcttactgatgccaagtagatcgaaaggctttgaacttaacaacagcacttcgcacggagctactggtaacaggcgtgacattctgagcggcatgaggctagaggagacagttgagcacagcacagttgaccagaagagatagtcgccggaacaaaaaccttgaccagttccacagcgctgtagtttcgcagatgatgagcagctcggcatctcatgactgaataaacgcaatgcccgccatggagggagactccggtgtctttcttgtacctgaggtggttaagttgttactcgaatgctgtatcacgagtggtgtagtcctgctattcgtaatatttcgattaaccatc

SEQ ID NO: 2232 - DNA, 884 bp, Zea mays
  Clone ID: 700208180_FLI
gcgaatcagaaaattccccaccaaaatctcctccccctgaagtcccgaagctcgcggaagcgccgagatgtaccatcccacgagaggcggcgtccgcggcggcagagatcaattcaaatgggacgatgtgaaggttgacaagcatcgggagaattaccttggtcatagtgttaaggctccggttggtagatggcagaaaggaaaggatctttactggtatactcgggataagaaatccgacacggaagatgctcttaaggaagaaatcaggagagtgaaggaagaggaggaacaggctatgcgtgaggctcttggcttagctcctaagcgcagcaatcgaactcagggtaatcgcttggataagcatgaatatgctgagctgattaagagaggatcaactgcggaggacttgggagcagggcacgctgaagcagcacaagtgcagggtctaggattgtacaaggcccctcgcgatgagggtggatcaagttctttgagccttgaccctcaaatggagcctgagcaggctgaacccctactagcacccaagcaggaggatgatttggaagataataggaaggggaaaaggccacgtgaacgtgacgagaagagaggggagaaggagcggaaacgagacaggcatggtgatggaaaggagaggaggcgggacaagcacgagaggaggcacgacttggaggacagatcaaagcggcaccgcaaagacaagcagaagaggaggcacgattccgattctgattgataacggccctgcgcctgctcctgtatgactactgtatactgcgaaatttcaaacccatggagccgcttttgtttgatgtatgcctacgctttaaattatgtttgccctaatgatgtttaaggat

SEQ ID NO: 2233 - DNA, 713 bp, Zea mays
  Clone ID: 700208195_FLI
ggggatcctgcagttgagtcctctacacatgaacattctgtcagcaattctctgcccatggatgatgaccataaagagtttgaaggagcacagtttgatggatctttgtgtgagaagtcagtatacaatgcagtcgagtgcagacatctaccaaatcagatgcctgcagattcaaatacggtgaacactgcactagatgtttgtgaccaagataatggagctcagtgttcagagtttcacatgtcactgccgagcgatacttcaaacagtcttggggatcaaagtgcatctgtataggagatgttgtgtggacaaggctctttggccgtcgagatgtccaaccaagaccatgaacaacaatgaaatggacaacacattcagtttggatctgacatctacttcagatgggtgctgttttgccatggcttggagttgtaaattcagcttcatctggagttgatagttcatgaagttgtacattcttcaactactatgtacttttcgcggcattttgttagcacacttggaactcaactgagcttccacggggttttgctgcccccaccccctaccccccatccccattcgagaaatcaaccttgttgtatgtaccatctgttgtattttcatcgctgtatgtccattctagaaactgaacatgtagattgtaagagttgccactgtctggattacccgcggtggttttcgtttgc

SEQ ID NO: 2234 - DNA, 878 bp, Zea mays
  Clone ID: 700208275_FLI
tgctcgcctcgggtcaaaccctaagcagggagttgatttatccgctgcagccatgagtaagttgcagtctgagtctgtcaaggatgccatctcccagattgttggggatgccaaggagaagaataggaagttcactgagactgtggaacttcagattggtctgaagaattatgatccacagaaggacaagcgtttcagtggctctgttaagttgccccatatccctcgtcccaagatgaaggtgtgcatgcttggtgatgcccagcatgttgaggaggccgagaagatgggacttgactacatggatgttgaggctctcaagaaaatgaacaagaacaagaagcttgttaagaggcttgccaagaagtaccatgctttcttggcatcagaggccatcatcaagcagattccccgtctccttggtcctggtctcaacaaggcaggcaagttcccgaccctggttactcaccaggaatccctcgagtccaaggtgaacgagactaaggcaaccgtcaagttccagctcaagaaggttctttgcatgggtgttgccgttggcaacttggcgatggaggagaagcagatccagcagaacatccagatgagcgtcaacttccttgtttcccttctgaagaagaactggcagaatgtgagatgcctctacgtcaagagcaccatggggaagccatacagggtgttctaagtatgctcttttgtgaagtctgctaggttctggcaccgaggttttattgaattaaacttttgttaagagtatgtttttggacgatcctatatttcgtcctggcgctactatgtttcagaatggtggtactactataagtatcctggcgctttaagtattgcttgaaaggatcaat

SEQ ID NO: 2235 - DNA, 1029 bp, Zea mays
  Clone ID: 700208278_FLI
catccagtgaccgtactatcaaggtttgggatctacagacaggtttctgcaagagcaccataatgtccgcgagcaaccccaactcgctagctttcatcgatggtgacaccatctgttcgggtcacagggatgggaatcttcggctgtgggatatccgcagtgggaaatgcaccacacagatagctgctcatctggatgtcacctcggtctgcgtgtcacggagcaggaattttgttcttacaagtgggagagataacgtgcacaacctttttgatgttagaacgctggagatttgtggaacattcagggccatgggcaacagagtggtgagcagctggggcaaaccttctattagccctgacgagaactgcatcgctgctggttcttctgatggatctgtttacatatggtcgaggctgaagaatggaacgccgaccatcctagagggtggtcattcttcgcccgtcctggcaagtgcatggtgcggactaggagctcttgctacctccgacaggaaccatatctatatctggtcttgagagatgtacaatttcatcaaggcgtggaaactggagagtttcgcatcatcagtatgctaatatgtgttctcttcatttcttgatgacactagttttcatgtgattatgtgaacgggttaactggttctgatttctggacgttgtaaatatcagaagtgattgttcatcgcagtgacgactacttcagttcgccatctgtgtgatggtttgcaaggtttttatggctgaaatttattggtattgatggttcaggtttgctgttattttaaggctaaacttttgagacaccagtcagctcagcaaacatcgtccagcattaaggaaaaaacaacattggcttgggaatagttttcaatgttaattttgcttcaattaatttattaagcactacatgatcctttcttgtgttctgctgagttgggatgttctggccttacctttcctatatttgtatagttaagtcaggatggcaatggaatatcttgcagaa

SEQ ID NO: 2236 - DNA, 1500 bp, Zea mays
  Clone ID: 700208306_FLI
gctgctactgctgctgcgtgcagggctgtgatggcgacgaagaggagcgtgggcaccctcggcgaggcggatctgaaggggaagaaggtgttcgtgcgcgccgacctcaacgtccctctcgacgacgcccagaagatcaccgacgacacccgcatccgcgcctccgtccccaccatcaagttcctcctcgagaagggcgccaaggtcatcctcgccagccacctgggtcgtccaaaaggtgtcaccccaaagtacagcttgaagcctcttgttccacgcttgtctgagctccttggagttgaagtcgtgatggccaatgattgcattggtgaggaagttgagaagttggctgccgctttgccagaaggtggagttctgctcctagagaatgttagattctacaaggaggaagagaagaacgaacctgagtttgctaagaagctagcatctgttgctgacctttatgtcaatgatgcttttggcacggcacacagagctcatgcttcaaccgaaggagttaccaagtatttgaagcctgctgttgctggcttcctcatgcagaaggaacttgactaccttgttggagctgttgccaacccaaagaagccatttgccgctattgttggtggatccaaggtctcaagtaagattggtgtcattgagtcgttgctggcgaaggtcgatatcctcatccttggtggtggtatgatctacacattttacaaggcacaaggatattctgttggaaaatctctcgtggaagaggataaacttgagctcgcaacttctcttattgagaaggcgaaggcaaagggggtttctcttttgcttcccactgatattgtagtagcggacaagtttgcagccgatgctgagagcaagattgtccctgccactgctatccctgatgactggatgggtcttgatgttggccctgatgccacgaaaaccttcaacgaagcattggacaccaccaagactgttatttggaacggccccatgggagtgtttgagttcgagaagtttgcagctggaactgaggcgattgccaagaagctagctgagcttacaaccacgaagggtgtcactaccatcatcggcggcggcgactctgtcgctgctgtcgagaaggctgggctggcggacaagatgagccacatttcgaccggcggcggtgcgagcttggaactcttggaaggcaagactctacctggtgtccttgccctcgatgacgcctagatccgctgctgctgctgctgctgctactcaggttctgccagctttgcgtgtcatcttgtttcggaccttggtgtaacgctgcaaggttaaggtttactcctccacacatggacttttggggataggcttgccatcgtgttttgctagatgagtcgtgaaataagcttttacttcctcgctgctgtgggtgaagtaactggaattcggaaatttggaactaacaaaaccccccgtggatttgtatgatatgttttgttcgac

SEQ ID NO: 2237 - DNA, 797 bp, Zea mays
  Clone ID: 700208320_FLI
attggatgaccacagcaaggcagtaacaagcttagcatcaagcagagatggacttctacttgtctctggatctgaggatggtaatgttcgggtgtgggataccagatgtcagcaagttacccgaaaattcaaacactcccaaggtccagtaaccaatgttcttattgtaacgccacaacgagtaaatctgccaccgctacaaccattacgcaaagttcggtctgcaaatggggaggctgaacggcaggcagtactttttcatcggcctgaaaatgatgtcccaattcctggaaataagaccttcatttttatggagcgctacttggatgagcttcagaagcatggtggttcatccaggttatttgattttgggccgaatgctcagaatggcactccaaaccaacagggaacagaatggagagatagatacttggagttgcaggatctctttgtacatgaggtcctccatcagatgccatcctcgaggaacccatgatgcacatgctttggatatcgtaggatcatttgtggtgtcgaaacagtgatggttgtcattcgggctacaaacgatgtagatgaattctttggagtaattcaactgatggtgctttcggctgcgaggaacttttcagattctgaactaaaaccactagaatcggtgccagcagtcacttggaactggttctcgtttgtgtactagtctagagaaacgctaaaaatcaggtttctcttgattctagttctaattacaaggatacagtgagcttgctacataaagttattttgatttattagag

SEQ ID NO: 2238 - DNA, 1794 bp, Zea mays
  Clone ID: 700208355_FLI
ggaagctccgtgcgttagtcaagcgtggtgctaactgttatggtcgttatatgcctcgtatggttataattcctccaggagttgaattcggccaattgattcatgattttgatatgtatggagatgaagataaccaatctccagcctcggatccatctatttggtttgagataatgcggttcttcacaaatcctaggaaacctatgattttggctattgctcgtccatattctgaaaagaatattgcaacacttgtgaaggcatttggtgaatgccatccgttgagggaacttgctaaccttacactgataatgggcaaccgtgaggctatttccaaaatgaacaaaatcagtgcagctgttttgacatcggtgcttacattgattgatgaatatgatttatatggtcaagtggcatacccaaagcttcacaagcactctgaagttcctgatatttatcgtttagcagcaagaacaaagggcgcttttgtaaatgttgcttattttgaacaatttggtgtcaccttgatagaggctgccatgcacgggttgcctgttattgcaacaaaaaatggggctcctgttgaaatttatcaggttctggaaaatggtctccttgttgatccccatgatcagcatgcaattgcagatgccctctataagatgctttctgaaaagcagttttggtcaagatgtcgagaaaatggattgaaaaatatacaccaattttcttggcctgaacattgcaagaattacttgtcaaggatatcaagccttggtccaagacatcctgctttcgcatgcaaagaagaccacaaggtgcctgtgaagtgcaggaagcatatatctatcattgctgtagactctgttaacaaggaagatttaattcaaattatcagaaactctgttgaggctacacgcactggaactatgtcaggttctacaggttttgtgctgtcaacttcactgacaatagcagagctacagtctgtaatagtacgcacaggcatgctcccgactgactttgatgcctttatatgcaatagtgggagcgatatatattatccattacagtctagtgatgtgccaagcaattcccgtgttacatttgcgttggaccataactaccgatcacatatcgagtatcgttggggaggagaaggtttaaggaagtacttagttaagtgggcttcttcagtagtagaaagaagggggagaactgaaaagcaagtcatctttgaagattcggaacactcttcaacatattgtcttgcatttagagtggttaatccaaatcatttgcctcctttgaaggagctgcaaaagttgatgagaatccagtcactgcgttgtcatgctctgtataaccatggcgccaccaggctatctgtaattccaatgcatgcatcgcgatctcaggctctaaggtatttgtctattcgctggggcatagagttgccaaatgctgtggtcattgttggtgaaactggtgattctgattacgaggaactgtttggaggtctccacaagacagtcatccttaagggtggattcaacactcctgcgaataggatccatacggtcagaaggtaccctttacaggatgttgttgctcttgatagctcaaatatcattggaattgagggattcagcactggtgacatcaggtctgctatgcaacaacagcttggtatacccacacaatgacaccaactgcaatctattttgttattaatagaaagaaagaaacagacaacagaaatatacgatacaaatacttagtttccattctaac

SEQ ID NO: 2239 - DNA, 796 bp, Zea mays
  Clone ID: 700208410_FLI
ggagacgacggcggccatggcgacctccttccaggggacgaccaccaagtgcaccgcctgcgacaagacggtgtaccttgtggacaagctcaccgccgacaaccgcatctaccacaaggcctgcttccgctgccaccactgcaagggcaccctcaagctcgccaactacaactccttcgagggagtgctctactgcaggcctcacttcgaccagctgttcaagaggacagggagcttggacaagagcttcgaaggaactccgaaggttgtcaagccagaaagaaacgttgggaatgagaatgctactaaagtctcaagcgcctttgctggcaccagagagaaatgtgttggatgcagcaagacagtctatccaactgagagggtcactgttaataacactatgtaccacaagagctgcttcaagtgctgccatggagggtgcaccatcagcccttctaactacattgcgcacgaggggaagctgtactgcaagcaccaccacatccagctgatcaaggagaaggggaacttcagccagcttgagaatgaccacgagaagacatcacaggctgggtcactggaggaggatgaacaagagtattgatcactgagcacaaccacagatgaataatgaatcctcttgcatttgcctagagcactatgtatttctgtggcgtggttcgatttcagttttaccaatggaggtcatgtgtgttcagagaacaatgatattgttgtcttgtatctgcatgtaaacgttgttatctttgagtcagatactctacctggtttcacc

SEQ ID NO: 2240 - DNA, 2008 bp, Zea mays
  Clone ID: 700208428_FLI
gttaccctcaatggccgacgaccccctggactcgtccccgtcggcgtccgccgccgccgctgctggcggagtctcctccggcccccgcccagcgctccggccccggcgggaggcatttgagtacggcgctcggcgaggacggctcggggagtgctgacctccgcgacctgcttcttttcctctacatccaatcctacaagcgcctcgtgccgcgcgtgcacaaggactcgcccgccgtcacggatgtttggccgtcgacctccgccttcgatggatacctctccgcgctgtcgccgatccagtttgtacggagcaatagtcgccgttttatgccttcacaagcagatgaagaagctcatcagctatcgtatttacaaaagcatatggccaacattctaacacttttagcagattctattgatggcgagggagatgattctatggtattgacaatggagacttttgagcaccttggattttttttgcagctctctgaaggaactccattaagccaagcagctaccttttttgcgaattcggatccagacatgcccgctgctcctgtacctgctgctttggtacatgattgggtcttgcagcatatagcttcagcattagaatttatggcagagaagactgtggcaaaagaaaacagccaacataatgcatttgatcctgatgtcacaatgtctgatgctgtcacgaatacaagaattcatagcagttcaccaactggcagttctgcaccaaactatcctggatactaccgaaatgcatcatttgtggagggttgctcgaaaacttcagttgtcaaacaagcatcggatctgaaagggcattcaataaaggttttgaactgccatgattctgtaatttacattttagccccacttaagtatgcaactgtctatggatgttctgacactaccattattcttggtgctattggtaaggttgttaaagtggagcattgtgaacgtgtacaaattattgcagcttcgaaacgaatttgtattgccaattgtcgtgaatgtatcttctacttgggagtaaatcaccaaccacttattgtaggggataaccataaattacaagttgccccatttaatacttattatccacaactcggggaacatttggcacaagttggtgtggatcctaatgtcaacaagtgggaccaaccttttgtgttgggagttgttgatctgcatgactcattatctcatcctgccggggtttctgatgtccaggctgagtccaccacttgtctagatcctgatctatttacgaactttttgattcctagttggtttgaagtagaaggacctaccaaatacaatccatttaccctgcctgaagtttattgggcgtcccaaaggaaaaagcatgcttctctggaagatattcaaaagaatatccgggagctggagatcgatgatatccggaagaaagaattggcatgtgcccttcatgctcaattcaaagattggttatatgcctcagggaatatccgccagctatactgtttgcaaggcgaatgagcataagatggggttcttgtgtaagcgcgagatgcagcagtacgcgtctgcaagtgcaatccaattccgggcgcctccgaaatctgaaagtgacttccaagctgagttggtgtcgcctgccctgatgcacttggtatttcagctgtagcgtttgtggaggcaagtaactgtaacgtttttgtttgttccaattagtttttaccacttttcccattcagttggccgcaaggtttctgtaaatctttcggtactgttggtttcatatttagaaaattcacaaagcggccactcaattctctttttggaaagtaactttttttttttttcaaatggtgtttggtttttagggactaatgtttagtcccttcattttattccattttagtctctaaattgctagaattttagtttttgtatttgacaatctagggactaatatagaataagatgattagtccttacaaatc

SEQ ID NO: 2241 - DNA, 277 bp, Zea mays
  Clone ID: 700208431_FLI
ccaagcgtccgcttgtgaatatgcaagtttgttctgtaacattataggcttaccactcctaggacctgtcttttatgaattattcatattcagccgaacgtacagtagataatagcttatgatacactggaacatagctggcattgcattctttacctttctaatatgttaatctgctttctgtaaggtagcgtttggttccagacccagtttgggatggaacagctccatagctccatctccgggagtggctccatactaaagattttggagagcc

SEQ ID NO: 2242 - DNA, 2375 bp, Zea mays
  Clone ID: 700208434_FLI
cccgaagaaaatgctttccccttctcagctaaagtgaccgtggcacattagcccgggtgatactgcggtgggcccgcgttttggttcctccgccattcgacgccaccggtgtgccgtctggtccgtctaccaagctggaatcggtagaccgtttcgttccatttgtccccacacgcgactaaaatttacatcacctcgaacggcggcggcggcggcggcggcggtttctcatctgcggcgcctcttcgatgctgtttgctttgccaaggctttgatcccagatggggatctcgtcgggtgcagacttccaccagcagcccaccccacaggccgtgctgccgccacgcccccatggccgtgcgccgacgctgcagacgtctctctccctggctggttccgcctcgccggagcaggtcgggtcgcctccggacacacaggagccgctgtcgaactccgacgcggggcatgactccgccacagagagcgccagctcacgggagacttggcctggggagcccggcaagagtggtggcggcgacgctcctcccgtggcatcagcaccgataactgcactgaggatagctgataataaggagaaggaggtggttggtaatggcgtcgccgagctgcaggcctttcggagtaggatcccgagtgcaggccggatgactctcagggaggttgcttgggacagggtggacctcgttgctgagaagatgaagggtatgagcgatgagctgctggacgaaaccaaagccgagctgcagtcgattctggaagggactggcggtcagcaccagattcaggagttcatgtacctgcagaagcttcttcagggcagggttgatctcaccctgcccatccttttgatggctcaccatgtgcagctggagatcctggttgccatcaagactgggatacaggcgttcttgcacccgagcgtcgacataccccagatccgcctcgctgagattttcctgtacaagaggtgccgcaacattgcttgccagagtgctgtgcctgctgaggagtgcaagtgtaacatatgcagtaacaggaacgggttttgtaatctctgcatgtgcgtgatctgcaataagtttgattttgaggtcaatacgtgccgctgggttgggtgtgatatctgctcgcactggactcacacagactgtgcaattcgtgatggaaagattgggactgggcagacgattaagaacggcgttggccatgcagagatgcttttccggtgccaggcctgccagaggacatctgaactgtttggatgggttagggatgtctttcagcaatgtgcacccaattgggacagggatgccttgctgcgtgagcttgactatgtttgcaagatattccgtctaagtgaggactcaaaggggaggaaattgttcagaaaatgtgctgagctagttgaaagattgaggggtggttctgctgaatcaatgactcctagaattctgctacaagcgctgcaagagctggacattgattcctccaagaactttgagcaccaagagccagggcggctgatcactccccaggaggcctgcaaccggatcgctgaggtcgtccaggaagcagtgaggaagatggagatggtggccgaagagaaattgcggacgtacaaacgcgcccgcctcgctgtggaggcgtgcgacagggagctggaggagaaggcccgggaggcccaggagctgaaggtggagcggctgcggaagctgcagcaggcggaggagctggagagcatcatccggctgaagcaggcggagtcggagatgttccagctgaaggcgagcgaggcccaggaggaggccgagcggctgcggagcgtcgcgctggcgaagcggaagtcggaggcggcggggcaggactacgcgagcatgtacctcaagcggcgcctcgaggaggccgaggccgagaagcagtacatcttcgagaagatcaagctgcaggagaaccagcatgccacgagcagcagcggcgggggtgcccgcctcggcggcggagctccctccgccggggaaccctcgcaggcgatgatgctgtccaagatccaggacctgctgaagaacgtgcgcagcgtgccgtccggcaagccagatgggcagcgctccaagtagcagtagcgtcgtggggtgggctcggctgggcgggaactgccactccatcggcctgctggttgttactacttgttattagacgtagtagttgttaactagcagtgtagtaagtttacatgatatatatactgcatttttttggggggaacaaaatgttgattacctgcgcagcattgtcctaggtgtgtttagtagcgacttgttttcactgattatgtgatatgtatgaattgtatgtgc

SEQ ID NO: 2243 - DNA, 1144 bp, Zea mays
  Clone ID: 700208454_FLI
ctctccttcgacatccgcggcagcgaagactaggccacaaaatcgcggtagcaagcagcagacaggtggggaagatgtcgtcgctgcggaatgcgatcccgcggcgcgctcacaaggagcgcgcccagccggaggcgaggaagaagtttgggcttttggagaaacacaaggactatgtcgtccgggcgcgagcttaccacatcaaggaggcaaccatcgctaaactgaaggaaaaggcggcattcaggaatccggatgagttctattttaaaatgatcaacagtaggactgttggtggaattcatagacctaagcctgaagataataagtatactgaagaggaacttcttctgttgaaaaataaagagatgggatatatccttcagagcgttcaaagtgaaaaaaagaaaatcgaaaagctaagctcaacactccatgaacttgataacaagcctcaaaacaagcatgtttattttgctgaagacagagaagaagcaaaagaaatacaatcaaggataggacaaagcagcaacatgcctgatcttgacaacatcccttctcgtataaagaagaaaatagcctcttcgtacagggagttagaagagaggaagcagcggcttcaaaagcttgagaaattgtatgcagacatggccttgcaaaaagaattgaagaaacctggacgcaagaggaaactgaaactccatgaagatgaagagacggacaatcaaacatcacggcctgtttataagtggcgagcacagaggaaacgatgagatgatatgaatgggctatggagggagtaaaaggcaacatgttagtagtggaagtactggtcagtggaaccgctccttcggaccttaaaatacttccctgtagaagtagccctccacaagaactgtgtctttgtcaaactattgggcttaaagatcagattctgtatgattcaatcatgtgcatcatatatcaattcattgttctgtattatgttgaattcgcctagggatgggctatttttgtgatccattttgagatcagcaagtaatgccagatacaataggatagatccaacacaatgtatccctatacaatgtatccctatacaataggatagatcagcaagtaatgcctagcgttgggcttgacc

SEQ ID NO: 2244 - DNA, 1435 bp, Zea mays
  Clone ID: 700208460_FLI
tggtcagaagagctgctgcatcaaatcttggaaagtttgcagccacagttgaacagaatcatttgaagacagaaataatgtcaatatttgatgacttaacccaagatgatcaagattcagtgcgtttgttggctgttgaaggttgtgctgctcttggtaaattgttggagccacaagattgtgtagctcacattcttccagtcattgtcaatttctcccaggataaatcatggcgtgttcgttatatggtcgccaatcagttatatgagctctgtgaggctgttggccctgagcccacaagagctgatttggtgcctgcatatgttcgtctccttcgcgataatgaggctgaagtgcgaatagcggctgctggaaaagtaactaagttctgccgcatattaaatccacagctttcaatccaacatattcttccgtgcgttaaggaattgtcatcagattcatcccagcatgttcgttcagctttagcctcagtcattatgggaatggctcctgtactgggaaaggatgctaccatggaacagcttcttccaatttttctctctttgctgaaggatgaatttccagatgttcggcttaacataatcagcaagcttgatcaggttaatcaggttattggcattgactttttatcccaaacactgctaccagccattgtagaacttgcagaggataggcactggagagtccggcttgcaataattgagtacatcccattgctggcgagtcagttaggtgttgggttttttgatgacaagctgggggcactctgcatgcaatggttggaagataaggtcttctcaatcagagatgctgccgccaacaacttgaagcgccttgcggaagagttcggtccagagtgggcaatgcagcatataattcctcaggtgctggagaagatcaacaatccgcactatttgtaccgcatgacgattctgcaggctatctccttgctagctcccgtcatgggtgcagagatcacttgtcaaaagctgcttccagtcgtcattaattcttcaaaggacagggttcctaacatcaagttcaacgttgcaaaagtactaaagtcacttgtaccgatcctcgatcaatctaccgtgaaaccatgccttgttgagctcagcgaggaccctgacgtcgatgtgaggtactacgcgaaccaggcgctgcaggcgtgcgatcaaatgatggtgtcgagctaactagccgtgtgcccgagtacttagagttcgatgcctcatagtccaattttggattacctgtaatttgttgggccttttagattgaagagttttccgtctagcctcggtggacagatcgacgctgcccatgctgataaatggacggtcctgatccattgttcgttgtgttattaatgttgtataattgagcaggacacaacacgtacgttactctc

SEQ ID NO: 2245 - DNA, 2309 bp, Zea mays
  Clone ID: 700208501_FLI
tttcgttccgttcctgatacaggcgagcagggacgactgcaggcctccccctctttctcggcttccactcacccgccaccactggaccacccccaacggcgagggagtgagagagatcggcagcagctcgggggcctggcagggcagctgcattgcgctgcggcgggcggcggccatggccgattcgtacggcgacggcaagggcccatcactcaagagccagagccagaaccagcagccgcgccctggcccccgcctcaagcccgccatcgagatggaggatctcatcaacctcctccacggatccgatccagtccgggtcgagctcacccgcctcgagaacgaactgcagttcaaggagaaggagctgggcgatgcgcaggcggagatcaaggctcttcgcttgtcggaccgcgcgcgcgagaaggccgtacaggatcttaccgaagaattggcaaaggtggatgggaagctgaagctcacagagtctctccttgaaagcaaaaacctcgaagcaaagaaaatcaacgacgaaaaaaaagcagcgcttgccgcacagtttgcagctgaggcaacactacgaagggttcatgcggcacagaaggatgatgacatgcctcctattgaggccatccttgcaccactggaagctgagctgaaactggcccgtcaagagattgcaaaattacaagatgacaacagggcattggatcgtcttacaaagtctaaggaagcagctctgcttgaagcggaaaggacggttcagatggcactggcaaaagcttccttggtggatgatctgcaaaacaaaaaccaagagttgatgaaacagattgagatatgccaggaagagaacaaaatcttggatagaatgcaccgccagaaagttgctgaggttgaaaagctcacgcagactgtcagagagctagaagaatctgttcttgctggtggtgcagccgcaaatgctgtcagagactaccagcggaaagttcaggagatgaatgaggaaatgaaaactcttgatcgtgagctagctcgtgcaaaggtttcagcaaatagggttgcagtagtggtggcaaatgagtggaaagatggcgatgataaagtaatgcctgttaaacgatggctcgaggagcgaaggattctgcaaggagaaatgcagcaactccgggacaaacttgctattgcagaaagggctgcaagatcagaagctcaactgaaagagaagttccagctacgacttaaggtactcgaggaaggattgagaatgtctacatcgagaaccaatgtcagtggcacacgccgccagtctattggtggtgctgatggtttgtctaaggccaacggcttcctgtcaaaacgcccatcattccagatgagatcatcagtgtctaccacaacgactctagtgaaccatgcaaaaggagcgtccaagtcgtttgacggaggctgtagatcacttgaacgctataagggccatgtaaacgggaatggtatgaacgtatctaccgattccagtgaagataaagattcaaacaactcagatgagaagtgtaacgagtttgcatctgctgagtcggaggactcggtgtcaggtgttctatatgatatgttgcaaaaggaggtcatttctctaaggaaggcgtgccacgaaaaggatcagagcctgaaagacaaggacgacgcagttgagatgttggcaaagaaagtagatactttgacaaaagctatggagtcagatgccaagaaatcgaggcgcgagctagctgctatggagaaggagctggcagctgtgcgcttggagaaagagcaggataacagggcaagacgttttggtagttcaagcggttctgccagcagttcgcagctcccacctggcaggactttacctaggagcggctcggcgcgcaacatgtgaaggcatgtaggaattgaccgaatatggctttgatgatccttacttggattaggactggtgactgggaaggaacctctcattgtcctggagaagatggcatcagcggaagagcctcttctgcctacatctcgtggtcgcagggatgaactactttgtgtctaacatctccggctagtgttttcttttcttttgttttgacgacgtgtcattcggtggtgattgctgttgtttcttttcttttggcagtttgatgatctttgttggtgctgtataggtttggtgaggcgttgctcctttttcttctttggtttgtttgttcgacatatccgtcggtctggttgtttacgatgtaaaatgtacgcactgaagagttgcttatggtttgcctgat

SEQ ID NO: 2246 - DNA, 464 bp, Zea mays
  Clone ID: 700208517_FLI
gtcgtcgagctccgcctccccggcgccgggctcatgggcaacctcccttcgggcgtgctcggcaacctgtcggcgctccgcacgctctccctccggtacaacgcgctcacggggcccattccggacgacctctcccggttgtccgagctccgggccatctacttccagcacaacagcttctccggcgaggtcccggcagcgctgttcgagctcaagaaccttgtgaggctggacatcgcggggaacaagttcagcggcaagatctcgcaagacttcaacaagctgatccgcctcggaacgctgtacctcgacgggaacagcttcaccggcgagatccccaagctgcagctgcctgcattggagcagttcaacgtgtcgtacaaccagctcaacgggtccatccccaacacgctccggaagatgccgaaagactcattcttaggcaacacgggcctctgcggcgg

SEQ ID NO: 2247 - DNA, 1155 bp, Zea mays
  Clone ID: 700208534_FLI
agctaatacagaaagtaaccctgaacttcttccagatgctgttacctacacaacattactcaagggtttaggaaatagccgtgacctttattcagtcgtgaagattgttgtggagatgaaatcttcactaatttcaatcgacaggactgcatacactgctatggtagatgctttgctagcttgtgggtccatcgatggggccctttgcatttttggtgatataataaagcatgctggcaagaacaatgatttgagacctaaacctcatctttatctttcaatcatgagagcttttgctacgagaggtgatgttgatatggtcatgagatttaacaagcgcatgtggctggattcagttggatcaattagccgtgccgccaaagaagagacacatgagctattaatggaagctgccataaataataatcagatagatttggctagagggcttctaagaagaatagtaaatgagaaagaatgtttctcttggacaagtagagtaggcctggtcgcagttaaagttgaaagcttatctggattcaccaactctcttctaaggccccacgtatttccacagattatcttgaatgatccagttgagaagtatatggttccatttcaagaatctcgaccattacccgccgacttaatattgcggaaggttgtgatgcgtttgttgaaagagcgtgcagttcctcttgtggatgattggggaggatgcattggcattgttcaccgcgacgattgtaccaagctggacgcacctcttatttcaatgtctagagggccacctctgtgcgtgcctacttcaaccaccgtggagcacgtcattgacctcctcctgagaaacaagtccgagatggtgatcgtggtgaagagtggtaacatgtacgaaggcagctacacatccagctcaagacccttgggcgttttctccctcgccatactatggagcttcaccggcgactactcgtcaggatcagatgatgtccccgacgcaggcatctcccgggcagcaaaacccaaaccagacgccgaggcctgcaaccacagctagtttggtgtttcttttgctcagcttgtagcaactccgcgtcgtgttgccgggcaaactagtcatgtaatggtcctccagttggacaaggggtgcatgcg

SEQ ID NO: 2248 - DNA, 1749 bp, Zea mays
  Clone ID: 700208540_FLI
cgtacatgcgctgcggtcgtctgttgccatctcgcgttcggtggtgactccgggctccgggcgccctgcgcccctggatttcgaaccgagaaagaaagctgctgcccaccgtttcccaagtcccatcgccgcccaagaaccggagccacgccgcagatccgccaaaatcacacctcctagcccgtcctccgtcccaatctcttctcgggccagggaggcggcgggacttggtgcctgcatccgagccctagacatggatcaacctgaggaaaaccctgaattcccaagctgtgatgcctactttgaagctatccagtccaagaagaagttgccactgactttgcaagaatcactaactgctgcctttgctcagattccagtctcatccttccctgaggttccagctggtcgagtaattgaaattcctggtgatacttctgttattgatgctgtaaggactctctctgaacagaacataagggcagcaccagtactgaatccagaacctggggctcctactgattggcaggggaggtaccttggtgtcatcgattactcggcaatcatcctttgggtactagaaaatgctgagcttgctgctgttgcactctcggctgcatcggcaactgctgctggagttggcatgggtgctgttggtgctgttggggtggcagctttgggaacaactggcccagctgctgtagctggcttaactgcagctgcaattggggcttctgttgctggtggattaactgctgaaaagggtgtggcgaaggatgggctaactgctgcagatcatttaggggaggatttctacaaagttttacttcagcaggaacctttcagatcaacaacagttcgatcgattgttgagtcgtaccgctggtctccttttgtccccattacactggacacttccatgctgactgtacttctgttgctctctaagtacagattgcgaaatgtccctgtgattgagcctgaaaagcctatcatcaggaatttcattactcagactggtgttgtcaaagggctgcagcaatgtaaaggaagggactggtttgactacatttctgcacttcctctttcagacttaggacttccatttatgtccattgatgaggttatcaccgtcaacagtgatgatcttatcttagaagctttcaagtgcatgaaggataacaagattggtggtgtcccagtagtagaaggccccaaaagaaaacttgttggcagtgttagcataagggacatccgctttctgttgcttagacccaacttattttcaaatttcaggcagttgacagtcattgaattcatgaagactctaggctccactcttcctgattcagagagcaattgcctggtgaagccaccacccacttgcactcctgacgcttcccttggtagtgttattgacagcattgcatcaagaataacacacaggatatatgtagtggatgatgaccttgaggttgttggtgttgtgactctgcgtgatgtgatctcatgctttattcatgagccacccggttattgcgacaactatttggcttcagcgatggagaagcttgaggggaaaggagtcagatcagtggagaaaatttgagcttttctgtagcgtgaatgttgataataacaggtcagtatgtgaggaaggtttatttggttggaacggtgcattcgtgtcgtgttaatccagcaaatcctgtgtaggttaagtaacaaggcttctgtgctgttaaaaat

SEQ ID NO: 2249 - DNA, 1459 bp, Zea mays
  Clone ID: 700208584_FLI
tgctctcccccgcctcccggtccggcagcagagatcgagatccggaggccgcgagtgggagcgccaccaccagcgactgcggcaatggcgggcacggtgacggtcccggggtcgtcgaccccctccacgccgctgctcaaggacgagctcgacatcgtgatcccgacgatccgcaacctcgacttcctggagatgtggcggcccttcttccagccctaccacctcatcatcgtgcaggacggcgacccgaccaagaccatcaaggtgcccgagggcttcgactacgagctctacaaccgcaacgacatcaaccgcatcctcgggcccaaggcctcctgcatctcattcaaggactccgcctgccgctgcttcggctacatggtctccaagaagaagtacatctacaccatcgacgacgactgcttcgttgccaaggacccatctggcaaggatatcaatgctcttgagcagcacatcaagaacctcctcagcccatccaccccgttcttcttcaacaccctgtacgacccctaccgtgagggtgctgactttgtgcgtggataccccttcagcctcagggagggtgctcacaccgccgtctcccacggcctgtggctgaacatccctgactatgatgctcccacacagctggtcaagcccaaggagaggaatgagaggtatgttgatgctgtcatgacaatccccaagggaaccttgttccccatgtgtggcatgaaccttgccttcgacagggatctcattggccctgctatgtactttggtctcatgggtgatggccagcccatcggtcgctacgacgacatgtgggcaggatggtgtgtgaaggtcatctgcgaccacctgagcctgggagtcaagactggcctgccatacatctggcacagcaaggctagcaaccccttcgttaacttgaagaaggaatacaagggcatcttctggcaggaggacatcatccccttcttccagaacgtgaccatccccaaggactgcgacaccgtccaaaagtgctacatctacctctctggacaagtgaaggagaagctgggcacgattgacccctactttgtcaagctcggtgacgccatggtcacctggatcgaggcctgggatgagctgaacccgtcgacccctgccgccgcaaatggcaaggccaagtagatgtgccatcacttcggcactggagtgaaaaagaaagtatgattgggtcctgcctaggccccatagatatagctcttttttgagaaggaagagagattaattcagcagcagcttttataaattctttgttgtcatgaagcaggtggttcttttgtagttgatgaaagggatttgtcgtcgctatcgtttacataattcagacaataattttatattgtgtaattctgagaatcaaagcactgtttgtgttatagcatatctaagaatgagcattgctgtt

SEQ ID NO: 2250 - DNA, 632 bp, Zea mays
  Clone ID: 700208612_FLI
ctccgcgctagctgaggacggtacagcggcacagaggtgcgacgtacgacgacgacgacgcaggcgccacacatggcatcccagctctccgccgccgtgccccggttccacggcctccggggctacgccgcgcccaggtccgcggtggcagcgctgccgtccgtgagggtgggcaggaagaggtcgtcgtcgcagggcatccgctgcgactacatcggctccgccaccaacctgatcatggtgacgacgacgacgctgatgctgttcgcggggcggttcgggctggcgccgtccgcgaaccgcaaggcgacggcggggctgaagctggaggcgcgcgactccggcctgcagacgggtgaccccgccgggttcaccctcgccgacacgctggcctgcggcgccgtcggccacatcctcggcgtcggcatcgtgctcgggctcaagaacaccggcgccctcgaccagatcatcggctagatccctacgtcgccgttgttaagatcagactcagcagcctcgatcgcgccgccggccggcaggtgcaggtggtgactttgtaacgtgtgtgcgtgcgtacgtgtacattgcatccatcttggttccaatggacatatagctcctgttgctcctct

SEQ ID NO: 2251 - DNA, 881 bp, Zea mays
  Clone ID: 700208701_FLI
cacatccctcgagaagacgcctgctcctcgccgatcgatacgatggccgtcttctccgacctccacaccgccgacggcctcaagtccctcgaggctcacctcgccggcaaaacctatgtgtctggtgactccattactaaggatgacattaaggtcttcgccgcggtgccgtcgaagcctggcgctgagtttcctaatgccgcccgctggtacgagaccgtctctgcggctgtagcctcaagattccctggtaaggctgttggtgtaaatctgcctgcgggatcagctcctgcggcagctgctcctgcggatgaggctgaggatgatgatgaccttgatctttttggtgatgaaactgaggaggacaagaaggcagctgatgagcgtgccgccgctgccaaggcctcttctaaaaagaaagaaagtggtaaatcctccgtccttatggatgtcaaaccatgggacgatgagactgatatgaagaagctggaggaggctgtccgcagtgtccagatggagggtctgacttggggagcatcaaagcttgtgcctgttggatacggcatcaagaagatgactatcatgttgacaattgtcgacgatcttgtgtccatcgacactctaattgaggaccaccttacgcaagagcccatcaatgagtacgtccagagttgcgacattgtggctttcaacaagatctagagttcagtttctgagattgggcaacggcagcggctcagctcgtcaagtttgtgctgggatgccagtttatcccttctagtctattacagaaatgttgttcggagctgagtctattataaacatcttggtctgagtttattgttgagtggtgccagtttttttcaatatacatttatctt

SEQ ID NO: 2252 - DNA, 805 bp, Zea mays
  Clone ID: 700208712_FLI
gacgcggcaatgaagtacaagtcggaaggtcatgacatggtcatcattgctggctccgagtacggcagtggcagctctcgtgactctgctgccaagggaccaatgctactgggtgtcaagtcggtgattgcaaagagcttcgagcggatccaccggagcaacttggtggggatggggatcattcctctctgctttaaagcaggagaggatgccgattcactcggcctcaccggacgtgagcgctacaccatccacctccctaccagcaccgccgagctcagtccaggccaggacgtgaccgtcacgacccacgacggcagatccttcacttgcactcttcgcttggacacacagcttgaggtcacatacttcaaccatggaggcatccttccctacatggtccgcaacctggcagcacagatgaaataagttaaaaaagcaagctagcttattggtgcggtgggaataaattaaaaaggtactcagtgccccacgtatttgacgtatgtctgtaaataagtggcacattcgagcgctcttcgctctgccattgaggtggatcgaagctgccacatattttctccgcaggacatcggcacgaattttgtcttagcaaaccagttaattttgtactctttagattctttaattggttccatgctctctttggtacttttcatgtcagtttgctttgcaaacattatcagcgtgcccttgtagatttcgtaatggttatatgtatatgccctattgaaattgtcattttgctttgcaaaaaaatatcagcgtgccgttgtagattttc

SEQ ID NO: 2253 - DNA, 1862 bp, Zea mays
  Clone ID: 700208731_FLI
gcaagcgagagcgcagcaaccttgacgtctacaaagatttcaacaggctgccaggcgcggatccatgccacagccacggccacggccacggccagaccactgccggggcttccgaccagagcgggaggatcggcaggaagaggaaggaaatgcacagcgacgaggaggacgacggcgaggagaacgatttccaggagggcgacgagccctccgcggctaagaagccgagagtcgtctggtcgattgagctgcaccggaaattcgtcgcggccgtcaaccagcttgggattgataaagctgttccgaaaaggattcttgagcttatgaatgtggagaaactcaccagggaaaatgtcgcgagccatctacagaaatacaggctctatctgaaacggttaagtgctgtggcatcacagcaagctagcattgtcgccgcatttggaggtagagacccctttctccacatgggagcctttgaaggccttcagagctaccaacctttcgccccctgtgctgctctatcgtccttcatcccacaccacggctcgcttggtagaactaccgcggcagcattcggggtcccggagcttgctcctgccatcacagttcaagctgctgccagcaatggcatgataagccactgtgctggcgacgcaagcaagtttcagctctccggtatacaagaaaaccagcaaccaaatctgggacaaggctcggccacctctcttgggctgccccagctccaacagaagtggatccagcaagaaactggcgacttgtctgctgtcttctctgggagtgcactggctaacactctgtctggtgcactccagagagttgcgagcagtccattgccaccgcaagaacttttggagggcgtacaaaccaaagttagtgcccagccaccaataacaatggcatctgtgagttcagaacttgttgagaggactgttggagtttcggctaatttgcaggactccggtatatccccgcagggcactcttccaataaatgatggatttactgctgacaagttacagctgcaagatccattcgacagcaatggtggaacaaatttttcagtaaacatgcctgtttgtccctctggtagccttacagcatccagcaacgccaagggtggtgctagttcgtgcagtccagtgctgctcgctcctgatactgggagacattcaaactacttgcagtttggagttgcaggcaactctggacatgacatgaacgatattaaacaggaccatctgcatcaaggattgagcactggaggtttcaatcacgattttggcacctgtatgactgaacaaacagatccaaatgtgccgtatcttatgccacaaatgaagcctaacaccttgtcatcagaggataaactgaagcagaggaatatttatgatttggggattccaaagctccatggtggttttagctctagtagctgcaattttgatggtcttctcaattccatgatcaaagcggaaaaggatgatctctcattcacggatagcgacctggggtgcgacttctttccactcggtgcttgcatatgagacctcttaacaacccctcgtgcagattggccctcgacgggatgggatgggactacggcctacgggagaggttgtaaagtacactgcttaggagcattggccagtttatgctgcctaatgtgttactatgcttggtactgtgcacactagaaatgctagggatacaggtagctacggacatgccttgtaatctacatttcctcctcttcgaatgggaaatgaaagtgattatggttaggtaaaaaggagcaagtataatgctccaaattaacatcatcttcatcttaaaattttacc

SEQ ID NO: 2254 - DNA, 585 bp, Zea mays
  Clone ID: 700208735_FLI
agcaaataacagaagatagatgcggtggttcagagttcagaccatggttggttggtttacgaatgctcaaactggaactgacagagtaaaacatctctcctgtactacgctacgacatgcgtgcgttattatgtttgcacttgcacaccaccagactaaacgggaactgaatcatcatcactaggtagattggtaggtaggtagaagagacggaggcgacctccatctgctgcgtctcgaccgtcctccggagctagccccggctagttgcagcagcagcagaggcagtcgaggcagcactcgcaggtctcgtagcagcagaagcagcacagcgcagtgaagatgcaggcgtagaggcagcccttctcctcgtggcgcctctgcacgtgctccaagtaggacatctcctgggccgacggcgcgttgtacatcttgcctgccttgcggatcgatcggagctgtggtggtgaacgaacgagcaagggctctctctctctctctctctctctctctctctctctcctgaccctcttctcctttcccttggaacgaacctgatcctcttctccgtttggaacgaacgag

SEQ ID NO: 2255 - DNA, 824 bp, Zea mays
  Clone ID: 700208741_FLI
atcaccacgcatttgacgcggacgcgcgaggaagcaagcaccgccggagtcggagggaaaaagaaaaaagagcacggacgattcgcagctgcaacctgcacaggcggaggcgaggaggaagagagagcccccacgatcggctcgccgggacggccgacgggccgagggtgcggtagtgcgggcgcgtggccccgcgcgtggagccggatccgtattgctctctagcagccggccggtggcggcgctcggcgtccgaggccagagcccagagggtgactgacagagagagaatcgtccatccatgggaggagccgggcgcggcgcgcatttcttggacgcgtgcttcctctgccggaagccgctcgccggcaaccgcgacatcttcatgtacaggggcgacacggcgttctgcagcgacgagtgcaggagcgcgcagatggcggcggacgaggcggcggcggcgaaggccaaggccaaggccaaggccagggcggtgtcacgtggggccctgctgaccgccagggaagcggaaggcccgcagaggcgcggcaaggtccgggccggctccgtcctggccctgtgaccccgaggggggtctctcactcagggacagcctgtgtctgccgcgcatggcatttttcttttttcttttttcctctgcgtttacgagacgcgccaccggagggcatcactttcgtgtacacggccgggtttgcgttttttttaagagaaaaccttgggaccgtccggtggtgctgctggttgcgttgattgctggtccatgtaaaccgcacgtacatggaacaataaaaataataataatc

SEQ ID NO: 2256 - DNA, 1521 bp, Zea mays
  Clone ID: 700208748_FLI
gaaattcttgtctgcacacatatcattgaaagtggaatagatattgcacatgccaatacaatgattatccagtttgctgaactatatggacttgcccagctgtatcagttacgaggaagagtaggaagatcaggtacagaaggcttcgcataccttttctacactgataagtctttgctctcaagagttgcaacgactcggagctattgaggagcattcagagcttggccaaggtttccatgttgcagagaaggatatgggtatcaggggatttggaagcttgtttggtgagcaacagtctggagatgttgcaaatgttggcatcgatttattctttgatatgctttttgatagcttgtcaaaggttgaccagttttgcctagtcccagtaccatacaaagatgttcagctggatataaacatttctccacgtctctcttctgaatacataagttatctggaaaatcctgttgagttgctcaatgaagcggcaaaagctgcagagaaagatctatggaccttgatacagtttacagaagacctccgtcgacgatacggaaaggagccccgtgatatggagttactactgaaaaagctctatgtaaggcggatggctgcagatcttggtatcagtcggatatatccatctggcaagatgatattcatgaaaacaaacatgaacaagaaggtatttaggctcatgacagaagcaatgacttctgagacacatcggaattccctatcatttgctgaaaaggaaattaaggctgaactcctcgtgaatttgccagataccctacttctgaactggcttttccattgcttatcggactgctatactgtaataccagcccttgtgaagtactagattattgttactatttcataagaactgaaggcttctgctgcccaccatgaaaggggacaatatgtccatgcttgaagagaatgatctatcagagaaatcagtcttggctctttgattcatctctgatggatgactcttcgttatgttggtattggcagtcaggctctggcaggccaaagcaagcccatacacactactgctttaggaaaaggtccgccaaaattgtcaacattacaagcatacttcaatgctatacacaaactggagaatgctccacacagacacattgcagttttctacattcgctaacatcaataggatgagtgcctgatgcataattgctaaattcaggtgcaatgcaagtatgaaacatgaaatcaggaagctcagaggacctagttcagatgtacctgacaatagattacatttcaaaattcttctaggtttttttgacatgaactatcaaaatattgctcgagtagatagggaactagggatggcgttaacaatagaccatttgtttgacaataaaacattaggaattttggaccaattggtcagagttaatatttgttgtaaatctattcaaacagatcgtgacattgacaataactataatagttgaaaaaaatcacggaactacaagtattttt

SEQ ID NO: 2257 - DNA, 1008 bp, Zea mays
  Clone ID: 700208764_FLI
ggagaacaagctggaccagctacaatttgctcggcagaaactgacatattgctatctgtctgctgctgctaccgtattttcttctgaattgtctgacgctcgcatttcatgggccaaaaatggtgtcctcacaactgtggttgatgacttcttcgatgttggtggatcaaaagaagaattagaaaacctgatagcactagttgagaaatggcatgcgcaccatgcagttgagttctattcggaacaggtgaaaatagtattttctgctatttatacaacagtgaaccatcttggagcaatggcttctgcagcacaaggccgtgatcttacaaaccacctagtagaaatatggctggatttgttaagatctatgatggtcgaggcagaatggcagagatgccaatatgtaccaacagttgaagaatacatgacaaatgctgttgtctcatttgcactgggcccaattgtgctcccagcattgtattttgtagggcaagagctattagagcatgctgtcaaagatgaagagtacgataaattatttaggctagtgagcacttgcgggaggctcctcaatgactaccaaagtttagagagggaaggcaaccaggggaagctgaatagtgtttctctacttgtgctccacagtggtggttctatgtccatagaagccgctaaaaaggcaatgcagaagtccatagacgtgtctaggagagacttgctaagattggttctcaggaaagaaagtgctgttcctaggccatgcaaggagctcttctggaagatgtgtaagatacttcacctgttttactctcagaatgatggatttagctccccaaaggaaatggtcagtgcagtgaatgctgttatcaacgagccactcaaagtccaaaatagtactacgtttttgtctagttcatcaaggtagcgaggatatcatgtaatttatcctgttcatatggatcagaagcaacagcagcaagcttaagatatttgtaagtttgtgac

SEQ ID NO: 2258 - DNA, 631 bp, Zea mays
  Clone ID: 700208767_FLI
cttgctggacgcaatccttttcataaacgagtgctctcagtcgaacgatcccgacttatccctgaagcaaaacaaagtccctgactatgccgagcggttggtgaagaagcagatgcgttccgcttggctattcagggaagcggctcttaagcacgggggcgtacactgtgaaggagatgctagcgacgcgtttggccaggatgctgacgactctgagtgggaaacggctagcgaaagcgacgccgagaatgatgacacgggagaagcggatgatggaactgaatggaagaacgatggacaccgggaagatatctgtgagaaaagctgaggagcagggcaagctgaacctgtattcaagagggagtcaaactgagcagctaccgaagcagctgctgggccttatgaagtctgctgcgctatcaagcatcagatctttctaatgcaacgatctggtaatatttctactgtcctcgtgaaagcaaagccccagttaaactaattcccacgtcttgttgcttggtcagttgggttgcgcctgtgaccattcaatatttcctcttcgatgttggttctggtttggtgttcgtagcatgctctttctttcaccagtttctcaactctttgaatgaac

SEQ ID NO: 2259 - DNA, 1450 bp, Zea mays
  Clone ID: 700208768_FLI
ctcttcaagtgccactcccatccaccacaaggcttggcttggtgggaagaagacaaacgccggcacgcgcacgcagacacgatggcgatctgcagcgcgcacactaccacctccctgcgctccccatgcacgaccgtctcgaacgcaggtctgaggcagaagcaagtcatcttcgtcaccagcaacaggaggagcggcggcggcaggaggcacggaggggcaaggagcttccaggtctcgtgctccgtcgacaagccggtggtgattggcctggcggcagactcagggtgcggcaagagcaccttcatgcgccggctcaccagcgtcttcggtggcgccgcggagccgcccaagggcgggaacccggactccaacacgctcatcagtgacaccacgacagtgatatgcctcgacgactaccattccctggacaggaacggcaggaaggagaaaggtgtgaccgccctcgaccctagggccaacaactttgatctcatgtatgagcaggtgaaggcgatcaaggaaggccaggcagtcgagaagcccatctacaaccatgtcactggcctcctcgaccctccggagcttatcgcgccaccaaagattttcgtcattgaaggtctgcacccaatgttcgatgagcgagtgagggacctcttagatttcagtatctacttggacatcagtgatgaagttaagtttgcatggaaaatccagcgggacatggcagagcgtgggcacagccttgaaagcatcaaggccagtatcgaggccaggaaaccagattttgatgcctttattgatccgcagaagcagtatgctgatgctgtgattgaagttctgccgacccagttgattcccgacgacaacgaaggaaaggtgctgcgtgttaagctcatcatgaaagaaggggtgaagaacttcaacccggtttatctctttgacgaaggatcgaccatcagctgggtgccttgtggaagaaagctcacatgctcttaccctggcatcaaattttcctatggcccggacacttacttcggaaacgaggtatctgttctggagatggatgggcaattcgacagactagatgagctcatctacgtggagagccatctaagcaacctttcaaccaagttctacggagaggtgacacaacaaatgctaaagcatgcagacttcccaggtagcaacaacgggacaggtctcttccagaccatcattggactgaagattagagacctctatgaacagattgttgctgagagggctggtgtaccagcggaagcagcaaaagtttaacgatctatgcattcagatgtcctaaaactacagctctccgaactcaatgggagtaacaaccttcgcatctgttgggatatatggcgagctaggaggtatagaaatgtcattgcagaactcaggaaaacgtgcaatggaatttcttgaaatc

SEQ ID NO: 2260 - DNA, 1775 bp, Zea mays
  Clone ID: 700208773_FLI
ctccaactcatcaccggctccatccttgtcctacactgacctcgtccccatcccgcaaccgcaagcaaccaccgatccagcccgttcggcctttcggcgaatggtgacgaaccaggacgcggaggcggcatcggcggcagccccggggccaggggcgacggtggacccgatgcgcctagcgtcgcggtggcggtcccagacggagtgggaccgcgcggtgccggagctggaggctgagccggagccgtccgagctcaacaccgtcaacagttcgggactcttctccgtcgtctctacggacaagttgtccgtgaaatacctcggcagccatcaccacggccacgacgtcggtgtcgtgcaggccgaccgccccgctcccacgcgccgggccgtgtactacttcgagatggccgtcaggaacgcgggatacaaggggcagacatccatagggttcacgagcgagagcttcaagatgaggcgacaaccgggttgggagtcaaacagttgtggataccatggtgacgacggccacctttaccggggtctagggaaaggcgaaccgtttgggccaaaattcacatctggtgacataattggcgctggcatcaactacttgtcacaggagttcttcttcacgaaaaatggagctccggttggagccattccaaaagaaattaaaggcccactatatcctacaattgcagttcatagtcagggtgaagagttgactgtaaactttggaaaggaaccattctgttttgacattgagggttatattcttgaagagaaaatgaagcagcaatcggtgtctgataaattgaacttggagacggacatcagtcattggattgtccgctcatatctcctacattatggataccaagatacattaaatgcttttgatatggcaaatgcaactgacccccccaccaatcgccaaaatggtcatgcagaacctcccgaaacgtatggtcttagccacagaaaacttttgcgtcagcttatcatgagtggagatattgactctacattcaaaagacttggggagtggtatccacaagtgataaaggatgagaaatcggttatttgcttactactccattctcaaagattcatagaatatatcagggctgaacaactggaagatgctgtgcactatggtcgtgctaacctggcaagcttcttgacacacgaagcttttgagtggctgctgaaggatagtgtggccctgctggcgtacgagaagcctgcagaatcatgcttgggatacctgatgggctctccccagcgtgaattcgtggcagacgcagtgaacgcggctgtcctgtcgacgaaccccaccatgaaggaccctgagagctgcctctactcgtgtctcgagaggctactaaggcagctcacagtttgtagccttgagcgacgtgcattcaacaacgaccaaggagatgcattcttactccacaaagaaatgcaaaactatgaaaggtctaggcgctcatagcctcataggcatcaggattgttgcgcttctgaagtaaactcggttcgggtgttagacctcctcatctgccgtttgaagggacgaagattcaatgacaagcacgtatccttccctttgcaggtctgcagcgcccctcagctttcgcaagggtgagcaccgaattgcatggacacagctcaggcgcttcgggaggtgttctaacctctctgtaatcagaaaactcacagtgagataaagccaacgtttcagatttcccctattttgttggttggct

SEQ ID NO: 2261 - DNA, 765 bp, Zea mays
  Clone ID: 700208843_FLI
gcacgtcgcttcatgatctacgttcactctaagatgatgatagtcgacgacgaatacatcatcgttggatctgccaacatcaaccagcgctcaatggatgggggcagggactcggagatcgccatgggcgcgtaccagccgtgccacctgaacaccaaaggccaggtcgcccggggtcaggtccacggcttccggatgtcgctgtggtacgagcacctcggcatgctacacgacgatttcctcaacccgggaagcctggagtgtgttcggagggtaaaccagatggcagacaggtattgggacctctacgctggtgacagcctcgacgccgacctccttgggcacctactcaggtacccagtcaccgtcacgaaggagggcacggtgacagagctcccgggggccaagttcttccccgacacacaggctcttgtgcttggggcgctatcgaaactgcctcctattctcactacatagagaaaccttctgtactgttgccatgtgacgtttgcgggctgaattggttgaggtttttgctactccgtattatgctactactggtagtgttattgtatggtttcttcctaataatagtatttatagttttggacttatctaaaatagtatttatatgtgtctaaaatagtatttcagttttatttcattcatatatattttattttcttattttctaccacttatggctgatttaataaatagcaagatgatttctctccataaatccacttgggatttatgatcacc

SEQ ID NO: 2262 - DNA, 1457 bp, Zea mays
  Clone ID: 700208847_FLI
ctttcatctgtgccctctgcgttcgagatcgatctcagctggcaccgtcccagttcgccatggcggaggaccggagccccaagcccatccactgcaaagcggcggtgtgccgagccgccggcgagccactcaccatcgaggagatcgtcgtcgacccgccgaaagcgtacgagatccgcatccgggtcatctgcacctcactctgccacaccgatatcaccttctggaaagctaaggtggcaccggtgtttccaagaatactagggcatgaggcgtacggggtagtggagagcgtgggggagcacgtggagggcttcgcggcgggggacaccgtggtgccgacgttcctggggcagtgcgagcgctgcgccagctgcgcgtcggagcacagcaacgtgtgcgacgcggtgccgttcgtcatcggccccgggatgcggcgcgacggcaccacccggttccgggacgcgcgggggagcccgctgcacgacctcctcgccgtctccagcttcagcgagtacaccgtcgtggacgtgaaccaggtggtcaaggtcgaccccgccgtgccgcccaagctcgcctgcctcctcagctgcggcgccggcaccggggtaggagcagcgtggaggtctgccaaggtggagccaggatccactgttgcaatctttggcctcggatctgtcggtttggcggtggtccaaggcgcgaaaatgtgtggcgcatccaagatcatcggcgttgatctcaaccctgacaaggaggaagtagggagatcgttcggcgtcacagacttcgtcaatccatcgcagctggacaagcgttctgtcgtagaggtgatcgttgagatgaccggcggcggcgtggactacagcttcgagtgcatcggcgtgccgtcggtgatgaccgacgccttcagatgcaccaagatggggaagggcaagacgatcgtgctggggctggggagggacagcgacgaggtgtgcctgccgtcgctggagctgctgttcgggaggtgcgtcatggggtcgctcttcggcgggctgaagcccaagacccacatccccgtcctcgccaagaaatgcatggacaaggagctgcagctggacgcgctggtcacgcatgagcttggactgcaggacatcaacaaggccttcgacctgctcctgcaggggaaaagtctgcgctgcatcctctggatggacaaggacaagtaacggaaggagaggggcggccggaccaatccttcctgtctctgaataaatttgccctgttttttcagcgaggcgttgctgaaagctggtgttagcggcgaccaagactatctgttcctgaaaccctgtgtatcagtatcgtttcgttgtctgaactgattaaatcctaatatcgatagattagactctccccagcaaccgctttgtcccctgaataaagtgattcatcatctcttttttacgtctagc

SEQ ID NO: 2263 - DNA, 1183 bp, Zea mays
  Clone ID: 700208851_FLI
gggccgcgacgcgctccgcttcgcacgcttcgctgtgaggtacggcaagagctacgagagcgcggcggaggtccacaagcggttcaggatcttctccgagagtctccagctcgtccgctccaccaatcggaaaggcctctcctaccgcctcggcatcaaccgcttcgcggacatgagctgggaggagttccgtgcgacccggctcggcgcagcccagaactgctccgccacgcttaccggcaaccaccggatgcgcgccgccgccgttgcgctgccggagacgaaagactggagggaggatgggattgtgagcccagtgaaaaaccagggccactgtggatcatgctggaccttcagcactactggtgcacttgaggctgcatatacccaggcaactggcaagcccatctctctctctgagcaacagcttattgactgtggttttgcattcaacaatttcggatgcaacggaggccttccatcccaggcctttgaatacatcaaatacaatggtggccttgacactgaggaatcttacccttaccaaggtgtcaatggaatctgcaagtttaagaatgagaatgttggagtcaaggttttggactcggttaacatcaccctgggtgctgaggatgaactgaaggatgctgttggtctggttcgcccagttagtgttgccttcgaggtgatcactggtttcaggctgtacaagagcggagtttacactagcgaccattgtggaactacaccgatggatgtgaaccacgctgttctggctgttggctacggtgtcgaagatggtgtaccctactggctcatcaagaactcatggggcgctgactggggtgatgagggttacttcaagatggaaatgggcaagaacatgtgcggtgttgctacgtgtgcatcctaccctattgtcgcatgaggcccttacgaagtgttacatggtctgtttggcatcaataatgcatgtttaacctgagcttggcgatgggttatacagaacggaaactctgtttgtgaatagaaaatcatgaagggaaggagttgaccggacccctgcttgtacgtctccccgactgtgtaggtagattgtcagttggggttccgaagtactctactcatacgtgtgtatgacagtttatttatgaaacaaaatacgcattgatcgttatggtgc

SEQ ID NO: 2264 - DNA, 470 bp, Zea mays
  Clone ID: 700208852_FLI
ccgccgccaccccggtttccttcgtaagcccgtcgtcctccgtccgcgactctgcgcgagaagcgagagtatggacacccaagtgaagcttgctgttgtggtgaaggtgatgggaaggaccggctccaggggtcaggttacccaggtcagagtgaagttcttggatgaccagaaccgtctcatcatgaggaacgtcaagggaccggttcgcgagggagacatcctcacactgctcgagtccgagagggaggctaggaggctgcgttgaggcggaatggtgtcttgctagttttcgtatggagttggatgtcatctaattgtgctatgtttttcaaacattggaatgacctttaaaacacctgccttgtatgattatttgtgagcctggtgataagattgcagtttggtttttatgatccggttgagggtatgtttggcaacaatatttatcaaaatcatggttttacaat

SEQ ID NO: 2265 - DNA, 1208 bp, Zea mays
  Clone ID: 700208858_FLI
gctagcgcttatagcttgtcagccatggccaccgccgccgcgtctagcctcctcaagtcctccttcgcgggctcccggctcccggccgccacgcggaccacaccggcgtccctcgtggtggccaccggcccgcgcggcgccggcgcggggcccatctgcgcgtccatgtccatgtcctcctccaacccgccctacgacctgacgtccttccggttcagccccatcaaggagtccatcgtgtcccgcgagatgacccgtcgctacatgacggacatgatcacctacgccgacaccgacgtcgtcatcgtgggcgccggctccgcggggctgtcctgcgcgtacgagctctccaaggaccccgccgtgagcatcgccatcgtggagcagtcggtgtcgccgggcggcggcgcgtggctgggcgggcagctgttctcggccatggtggtgcgcaagccggcgcacctgttcctggacgagctgggcgtggcgtacgacgaggccgaggactacgtggtcatcaagcacgccgcgctcttcacgtccacggtcatgagcctgctcctggcgcgccccaacgtgaagctgttcaacgccgtggccgtggaggacctcatcgtcaggggagggcgcgtcggcggcgtcgtcaccaactgggcgctcgtgtccatgaaccacgacacgcagtcctgcatggaccccaacgtcatggaggccaaggtcgtggtcagctcctgcggccacgacgggcccttcggcgccaccggcgtcaagaggctccaggacatcggcatgatcagcgccgtgccggggatgaaggcgctcgacatgaacaccgccgaggacgagatcgtgcgcctcacgcgcgaggtcgttcccggcatgatcgtcaccggaatggaggtcgccgagattgacggcgcccccaggatgggcccgacgtttggcgccatgatgatctccggccagaaggcggcgcacctggcgctcaaggccctgggcaggcccaacgccgtggacgggaccatgtcgccgccgttgcgcgaggagttgatgattgcgtacaaggacgacgaggtcgtggacgcctgagtgcggcaagcagagaggaggatcgacgccagcagcgtcttatcttaattgccttgttgttcaatgatgaatcgatcgaattcccttgggttagctttattattgttgttgttattatt

SEQ ID NO: 2266 - DNA, 1672 bp, Zea mays
  Clone ID: 700213463_FLI
caactcgccgtcgtcttctgcggttctgccgtctacgcctccaatttggcctctctcccttgcaagtttaagcttcatcttcagccatgggtaaggagaagtcccacatcaacattgtggtcattggccacgtcgactctggcaagtcgaccaccaccggccacctgatctacaagcttggaggcattgacaagcgtgtaatagagaggtttgagaaggaggctgctgagatgaacaagcggtccttcaagtatgcttgggtgctcgacaagctcaaggctgagcgtgagaggggtatcaccattgatattgctctgtggaagtttgagaccaccaagtattactgcaccgtcattgatgcccctggacaccgtgacttcatcaagaacatgatcactggtacctcccaggctgactgtgctgtccttatcattgactccaccactggtggttttgaggctggtatctccaaggatggccagacccgtgagcatgctctccttgcgttcactcttggagtgaaacagatgatttgctgctgcaacaagatggatgcaacgactcccaaatactccaaggcgcgttatgatgagattgtgaaggaagtctcatcctacctcaagaaagttgggtacaaccctgataagattgcctttgtccccatctctggttttgagggcgacaacatgattgagaggtccaccaaccttgactggtacaaaggcccgaccctgcttgaggctcttgaccagatcaccgagcccaagagaccttcggacaagcccctgcgtctccccctgcaggatgtgtacaagattggtggtattggaactgtaccggttggtcgtgtggagactggtgtcatcaagcctggtatggttgtcaccttcggtccaactggcctgactactgaggtgaagtctgttgagatgcaccacgaggctcttcaggaggcccttcctggtgacaatgttggcttcaacgtgaagaacgttgctgtgaaggatctcaagcgtggttttgtggcctcaaactccaaggatgaccctgccaaggaggctgccagcttcacgtcccaggtcatcatcatgaaccaccctgggcagataggcaatggctatgccccagtgctggactgccacacctcccacattgctgtcaagtttgctgaactcattaccaagatcgacaggcggtctggcaaggagcttgagaaggagcccaagttcctgaagaacggtgatgctggtatggtgaagatgattcccaccaagcccatggtggtggagacattctcgcagtatcctccccttggtaggtttgctgtccgcgacatgaggcagacagttgctgttggagtcatcaagagtgtggagaagaaggacccgaccggcgccaaggttaccaaggcagctgccaaaaagaaatgatgcaacctgtcgttaatcctgtatctgcttttgcaatacctgacttgtcactccatcccgaagttttgtatgcggttgttactgttattgtgtactgttaagctctgctgcggcgtgccctgttgtttgggtagcgtcaacgtcgagcgccacttgcgggtgtgcctttgtctgctatcagtagcggcaaaaattgaaagctctcgagacttatgtcccttttgggcgccgttgaactgatt

SEQ ID NO: 2267 - DNA, 1014 bp, Zea mays
  Clone ID: 700213496_FLI
ctgtactcaggcaagcagtgagcatcctcttgccaaagctattttggactatgcattgcatttccatttctttggcaagcttccttcatcaaaagatggcattgagcaacgaaaagacaaggtattatcccagtggctgcttgaagctgaagacttctctgcagtacctggcaaaggagttcagtgctcgatcaatgggaagcatgttttggtcggaaaccgttctttgatgactgaaaacggtgtgaccattcccccagaagcagaaactttcttgatagacctggaatcgaatgcaaaaacaggcatacttgtggcatatgatggcgattttgtgggtttgatgggcataaccgaccccctgaaacgggaggctgctgttgtagtggaaggactaaaaaagttgggtgtccatccagtgatgctcacaggagataattggaggaccgcgcaagctgttgctaaggaggttggtattgaggacgtgagagcagaggtgatgccagccggaaaagctgacgttgttcgctccctccagaaggacgggggcaccgtcgccatggttggcgatggcatcaacgactccccagccctggcagcagccgacgtcgggatggccatcggcgggggaacggacattgccatcgaggccgcggactacgtgctggtgcggaacaacctggaagacgtgatcaccgcgatcgacctatccaggaagacgttcagccggatccggtggaactacttcttcgcgatggcctacaacgtcgtggccatccctattgccgcgggcgcgctgttcccgtttaccgggctccagatgccgccgtggctggccggcgcctgcatggccttctcgtccgtaagtgtagtgtgctcgtcgctactgttgaggaggtacagaaaacccaggctgacgactgtgctgcagataactgtagagtgactgtgaatactgaatactatacgtcccttaaccgattttttgcagaaatgaactggaaattgcatcgg

SEQ ID NO: 2268 - DNA, 685 bp, Zea mays
  Clone ID: 700214339_FLI
gtagtccggtacagatagtgtggtcccaagcttacaacactgtacgtaatatctttgctctggtaaacctacttcgacagccagtagatgaagatgagaaacgctcctctccttttcccccctccctgcacagcgccgctcaccgtcaccggaccacagcagcgatcgatggctgaggtacacaacgagcggcccgtggggatggtgggcggcgtccgggacgcgccggtgggccgcgagaacgacctcgaggccatcgagctcgcgcgcttcgcggtcgccgagcacaacagcaagaccaacgcgatgctggaattcgagaggctggtgaaggtgaggcaccaggtcgtggccgggaccctgcaccacttcaccgtcgaggtgaaggaggccggcggcggcgaaaagaagctgtacgaggccaaggtgtgggagaaggcgtgggagaacttcaagcagctgcagagcttcgagctcgtcggagacgccgcggtcgcctgaggcgcacaggcttttcgctggaggctggagcacaacaatgaaagaatttaactgtcatcccactggaaaagtatgatataatgaataaaccagcgtcttaccacatgtattgtaccctaatgagatatttgacccctgtaatagaatgagatgtgctaaggaatctgaaagccttcttgctttt

SEQ ID NO: 2269 - DNA, 1361 bp, Zea mays
  Clone ID: 700214342_FLI
ggggctagctgagagcctccagctcagtgtgctagctagctagagcaagagaagggctgtaagcgaggagatcgatcgagatggctttcctcaacatggagcagcagacctgggccttcacctttggtatcctaggtaacatagtctcactgatggtgtttctttcgccgctgccgacgttctaccgcgtgtaccgcaacaagtcgacggaggggttccagtcgacgccgtacgtggtgaccctcttcagctgcatgctgtggatcttgtacgccctgctcaagcccggcgccgagctgctggtcaccatcaacggcgtgggctgcgtcgtcgagaccgtgtacctggccatgtacctggtgtacgcgcccaaggccgcccgggtgctggcggccaagatgctgctggggctcaacgtcgccgtcttcggcctcgttgcgctcgtcaccatgcttctctccgacgccggcctccgcgtgcacgtgctcggctggatctgcgtcagcgtctcgctcagcgtcttcgccgcgccgctcagcataatgcggcaggtgatccggaccaagagcgtggagttcatgcctatctcgctctccttcttcctggtgctcagcgcggtggtctggttcgcgtacggcgcgctgaagaaggacgtgttcgtggcgttccccaacgtgctgggcttcgtcttcggcctcgcgcagatggcgctgtacatggcgtacaggaagcccgcggcggcgctggtgataataccggagcagtccaaggaggaggtggccgagggcaaggccagctgcggcggcgccgaggtgcaccccatcgacatcgcggaggtccacgacctgcagaccgtggtcgtcgacgtagacgtggagcctgtcacctacgccgctgcgtccggtatggtcgacggcagtgtcggcaggcctagggcgccggagcagctggtgatcaagcccgacatggtcaccgtcattgcggcggaggcgtaggttggttaagtagtagcagagtgagtcgatatcgatctgcctacctacagtacagccgcggcggccagatgtactggcagcgttcatgcaggctcgttgacttgaccggtcgagatggttggagtagccgggccgagtagcccagacgtactggcctgtgtcatgaaccggcaagctgataacgcgagcgagagggacgttggttcatcacattcagaagacggcaagctgatagtttctgtctctaggtctgtgtgtgtgtgtctgtaatcgactccatcagcttgccgcctttcctgtcctattctgattgttttcatccattgatgccgtcgtcgcagtaataaacttggaacgaacgattcc

SEQ ID NO: 2270 - DNA, 1099 bp, Zea mays
  Clone ID: 700214348_FLI
caatgggatcctgcttccagcttgtctttgcaccaatcgatgagcttttccctgatgatgctccattggtatcttcaggctttcgcgtgatcccgttggacataaaaacagacggaccaccctctggaagaacgttggatttggcctctagccttgaagttggcgcaaccacgcaacaagtggcaggggatggatctcaggacgtttgcaacctgcgatctgtgctgacaattgcctttcaatttccctatgaaacacatctccaggacaccgttgcagctatggcccggcaatatgttcgaagcatcgtttctgcggttcaaagagtatcaatggccatttctccctcccattctggcttgaatactgctgggcagaagctaatttctggctcccctgaagctgctacacttgttcgctggatttgccaaagctaccggtatcacttgggggtggatttggtcagccactcggatcaagctggggaatcacttttgacaatgttctgggaccatcaagacgctgtcttgtgctgctctttcaaggaaaagcctgtgtttactttcggcaaccagatgggagttgacatgttagaaacgactttagtcgctctgcaagatctcacccttgacaagatctttgacgagcctggtagaaaggcactacatgcggaggttccgaaactgatggaacagggctatgcgtacctgccggctggggtgtgcctgtctgggatgggccgccatgtctcctacgagcaagctgttgcttggaaagttctcggtgaggacggcaacgtgcactgcctcgccttctgtttcgtcaactggtccttcgtctgatgtgatccaatgcaccgcggaaactttacgatcagcgtccatttttgcattctctatagacgagaatggtgcggtgttgctgctactgttagctaggcaacggcatgttcaggtaaggtagtcttggggaaagccagtattgtgaagatgtaaatttgcgcccgtttccgctaatttaacccgctgaacttactgttgtttgttaaggccaggggcactcgtacgtgagattaaatgttgtgaaattgtatgtgctg

SEQ ID NO: 2271 - DNA, 575 bp, Zea mays
  Clone ID: 700214440_FLI
ggcacacggcggcaggctcgtggctgaggttcgaaagatgcggttgtggagctgtgtgccttctctgatccgatccgtcctgactgtgaagagagaacctccgcctccgcctcggaggtgcaggtgcagtttcctcggccggtaaaatttgcgtagtgggctcctgcattcatctgtaacagaattttggtgcctcatgtgtggatctctctcaaaggatgtaaacagcacacaggagcgcgactaggttaggaggcgtcctggtgccagacgctgctggtatcttgctccacttgtgaagctgagagtagatccagatcgtgggcttgtttgtccacgtgtgtttgttgtagcctgtctctccccgctggacgccgggggaaagctggcagttgtcgagcgcggtgtgtcacatgactggggaagacgaagatctgtgtctcctgcatatgccgatgatcattgcgcatcaaggttccaggagcagctggtctcatcgaactggttagttctgttgggatatgtaaccttttttttcctctgcaactaacgtgttaccggctctgtagtgtggt

SEQ ID NO: 2272 - DNA, 1374 bp, Zea mays
  Clone ID: 700214441_FLI
gtggcaatctcattcatatcgctgcttgccatgtctgctgtattagctacgtgtttctttgtgagaaggcatcgaataaggagagaccaccctagaatcccagaagctagagagttccatggaatgagcagtcagttagttaaggctatgccaagtcttattttcacgaaagtgcaagaagataactgcacatcatcgatgtgtgccatttgtttggaagactacagtgtcggagaaaagctcagagtgctgccttgtcgtcacaagttccatgcagcttgtgtggacttgtggctaacttcttggagaacattctgccctgtatgcaagcgagacgcgacgagtggagtatcagaacttcccgccacagaggctacccccttgctttcttctgctgtccggttaccttctcagccatcttcattcaggtcgagcgtggcagcctccccacccaggccgataagccggcatccttcatcgcactcggtttctcgtgcttactctgtctctagtaccccccactcccccaaccccttcagatctcacacaaacttacctggggtcatccatgcaagcagaagcaccacagaccttgcaaacatgtcgtctccccaccctcgcatctcacacttgtcgtcgtcgacacactccctcgtcggcagccacctatctccaccaatcagcataaggtatccattgccccattctcggcatgaatcgcccagtccacacgtcagttcgccctacatctcaaattctggctacggttcttcaagctactactaccttggcggctcgagccagcacgggtcgtacctgcggcggtgtggagagtcagggccaagcctgtctaccatggtccctcggtcatcgcagcagcagttccagtcagaggcaaacgtggccgcaggcgcgtcgtctgcccagtcctcacggcagtcctacctgcgacgctgtggcgattcagacgccagcttgtctgacatggcgtcagcccagtcgttgccggggtgctgaggcagatgtgcactacaagatgcggcttgacctgtgcatacaatgaggcttgcagcgtcacataggtggggaacatgtatagcatagactttatgatcctgttcttgtctgtgagtggtatatggttctttttttgtgccttttattgtgtgcatctgacgtgacaggagcctgttgaagttgattctgttaacattttagtccgcaccatgcgtccatgccagtttctccctagatttgctactctactaccatgcacacatttgaacgaggcagtgctcagctgcatgcatctgatgttaatgttgtgctgctcgctcagtgagcatgaagagatggtcgtctgagcaaattcag

SEQ ID NO: 2273 - DNA, 597 bp, Zea mays
  Clone ID: 700214445_FLI
gctagcaacgattttgttgggtcctatcgattcttgagaaaaaagaaggaacatcacttccagctcttgttgcgtttgctcaccgcccctcattgcattgcatcgcgtgtttcgttccgtaacgcaggagggccgtgcacgcctcgtcgtacgacaagaacccggaggagcaggtgcgcccggcgttcgtgccggacgatgtgatcggcggcgcggggagccccgacaagtactggagcccccaccccaagaccggcgtgttcggcccggcggcggtggacaccaaccagctgggcgtcgccgctgacgctgccgccgcgaatgcggctgcagcaggaggcacggtgctggaccagaaggtgtggttccgcccgctcgaggacgtcgagaagccgccccccgtcgcctgaaccgcgccacgcccacgcgacgcgacgctgccagcccacactgctgatacaagggcggcggccgggagggagagtcctggcaacgtcatgctcgtgcctgtaataagaacaagcaggagatgtgtgtgcctgtgatgtaccggtgtcgttatcagcgttatacaagtacttgcggttcatatgatcg

SEQ ID NO: 2274 - DNA, 321 bp, Zea mays
  Clone ID: 700214467_FLI
cttcatcggtgggtggcctctgctgtttaattttgcctttgggtagtgtgtatgtgtatggcgaagttttctttctcttgccagtttccagtttgctgctacttcggcctgctctcctgtaaataacataggagacatgctaattgaggccaagtctttatccagttagatcaacaagatattgaattgggcatgaaggctgaacaccatgtgtgtgcattacagtacccaacccaaactctaacatagcatcgttataatggctgcgttgtaatgtggcgttaggccatgttcactctaatactacctcaatcccaaaat

SEQ ID NO: 2275 - DNA, 1602 bp, Zea mays
  Clone ID: 700214514_FLI
cgtggcgtcgattgggaggggcaggaggcggaggcgcgccatctcgtgctgctcgtctccagacgcagatggccctcgccccgccgcgccaccgacctccgcagcgccttccgacgggtcgatacagctctattcccagatcgagagggtaatcacggaggcggcaaagcagtcccgggaaggttggggttcgactggagattggaccgaagtcgagggatcatgggtgttgagaccgaagtccttggagccatcatttgttgtccactttgttggaggaatttttgtcggagccgctccccagatcacataccgcttcttcctcgagtgtctcgcgaacaggggagctttggtgattgctacgccttatgcgagcggctttgaccatttcttcattgcagatgaagttcaatttaagtttgacaggtgtttgagaaacttggatgagcctgtaaatgatctcccaacgtttggtgttggacattcattgggatctgttatccacatgttgattggatcaagatatgctgtgcagcgaagtggaaatgtactgatgtcctttaacaacaaggaggcaagctctgcgatcccactattttcacctgtaattgttcctatggcacagagttttggccctatattctcccaattggcatcgtatccaacaatccgatttggggcagaagcagctattaagcagcttgagaatctaagcccacctgttgttaagcaacttctacctttacttcaacaacttcctccgttgtatatggacctaataaaagggcgggaggacttcattccaaaaccagaagagacacgccgcctgataaaatcctactatggaatttctcggaatctcttaataaagtttaaagatgatcaaattgatgaaacctctacccttgcacaagtactaagttctgaagcagctattagctcattgcttgatatgtcaattcgatcacttcctggggatcatgggttaccattacaacaggttcttcctgatgttccaccagcaatggctgatgcagtgaaccgtgaggtgaacttctgacaaatctgacaacaggcacaccatgggaggctgttgctaaggaggttggcaccactttgggtactgactcaggcattctacgagcacagatctcaaaagacgttgaaactcttgttgatgtaattgcttcatggacatcttcaaattctggtccaagactacttcgcccatgatcacccagcagtctgcgtacagaaatgttagtaacagtgaagatcaacaggatttaatgatgcattatgatacgagacgttggcaattagggagttatgttaccttggccggtggaggaaggatgcatggcactggcaataggagcttttgtggacaaactatcttaacccattggcaaaggcaagatctccttcctcagatattttagtctgtaatcaatttggattaaaggtaaacaatataggcttataaggtgaactaagtaagttaggatatttctccccactaaatgtattaagatcttatattcaagatgactgaataagagatgctagtaaatggacaatgaaattacgtatcttatattc

SEQ ID NO: 2276 - DNA, 626 bp, Zea mays
  Clone ID: 700214542_FLI
gtacaccttccttaggttaactagctacctaattaccagctgccagccatcttctgtcagcacactgcagtgttcgctcgtttctgtcgggaagagagagaagaggcagcgacgatggatgagcctccgccacagagcgacgacgaccggaagctgtcggccatggagcacgtcaagaagcgccacgaggagaagggcttcctctatgcctgcgccttcatgttctgctgctgcttctgctgctacgaggcctgcgagcactgcctggagtgcttctgctgctgcggcaagaaggacgagtgatttgaggccggtccaaccagttccgcccgcccaccaatgatgaatgatcggtttgtaattcgttgtggatttgatttgtttcggttgtgaagaactgcgatcaatctggaactgttcgtcgtgataaaacatgttgatgctgtaaataaactctacgttaacagtacgtagtgagctagcttagctaccccagtacgtatctgtgactcgtgagcgagttcagtgagacgctgtgcttgtaactgtaaatctgtgatggcatgccaacgcactggtactacatgtattactgcccttaattgtgtatatataagtttcttgtg

SEQ ID NO: 2277 - DNA, 1015 bp, Zea mays
  Clone ID: 700214553_FLI
agaaaatttgtttaggtttggagattatgacgggactggctcagatgtgctacttcaacatcccttgggtgttgtttatgccaatgacaatcaagtatatatagctgattcctacaaccataagataaaaaagttagatcccgtcacaagaaaagttacaactattgctggaacggggagtgcaggatacagggatggtccaggcttgacagctcaactttctgaaccagcaggacttgttgaagttggagatggaaggcttcttgtagcagatacaaacaacaacgcaatcagatatataactcttagtgacaaaggtgctgaggtgaagacactagagttgatcggagtacaaccgccatcaccaaaaccgaaggtgttgaaacgcctaagacggcggttatcggcagatacagatgttattaatgtcgatggtggttcttcaaaggaaggattcttgtctcttgcagttacagtacctgatggttaccatttctccaaggaagcccgcagtaaatttgatgtggaaacagagccgcctaatgcagttgagattgaaccagcgaacggttttctaaactcggaagggctggcatcactgaagttcagaaggatatcatcatccttgtcaatgggaaggataaactgcaaggtttactactgtaaagaagatgaagtttgtctctaccaatcgattgcttttgatgtcaaattccgtgaagaggcggaaccgaacccagcacaaattacgctatcctatactgtttcgccaagagataattcaggtagcacacaactactggctgctagaaagaatgccaaggtgtagtcagactcacggtgatttttttacttgcatcattgtattgattgtcaatttggccccaggcccacaatggcaagtgtttcaagattgacttctcctgtatgttgtatagcgacatgttgcttgtaacccagcttcattgtctcccctcagcacaacagtattaatggagtagtttattgtcagttc

SEQ ID NO: 2278 - DNA, 1064 bp, Zea mays
  Clone ID: 700214560_FLI
gggggaggagaagggtggaaatggaggaccggcatgtggccgaggtcgctctcggcggagatccccaagtggcgctctttggtgtattcgatggtcacgggggcaaaaatgcggcagagttcgctgcggagaacatgcccaagtttttggccgaggagttcaagaaggtgaacggcggaggagagatcgaaggagctgtcaacaggggttacctcaagacggacgaggaattcctcaagagggacgagagcgggggcgcgtgctgcgtcacagccgttctccaaaagggtggtctggtcgtctccaacgctggagactgccgtgcggtgctcagccgagcagggaaagcagatgtgctcacctcggaccaccgggcctcccgggaggatgagaaggagagaattgaaaatttgggtggatttgtggtgaattaccatgggacatggcgagtccagggttccctggcagtgtctaggggcattggggatggacacctaaagcagtgggttgtggctaacccagacactaggacgctcctcgtcgaccaccagtgcgagttcttgatacttgcttctgatggcctatgggataagatcgataatcaggaggcagtagaccttgcacgtcctctatgcattaacaatgacaagacctctcgcctggctgcctgcaggatgctcactgagacgtcgatttccaggggctcaactgatgatatcagtgtcatgattgtgcaattgcagaagttttcaagttcctaacttaattggagaaacttgaccaaaactctaggcattagcaccaacacactggtggaaggcaggactttgctggctaaagttttcatgagtcagcactatttttggctgtttaacatcaattctttgtcatagaaccatttgttttattattagatgtaattagatctatttgattcattctttgacaatatttattgaaataatgcggggtgatctctccatgatcgattgactgtaaaaggcgatttgcctatgtaaatacaatgatatattctatcatagaaacttactgtgttttcgttt

SEQ ID NO: 2279 - DNA, 1346 bp, Zea mays
  Clone ID: 700219168_FLI
agtagacttcagtgtgtttttgaagctcacacccaagcagaaggacattgttcacaagttggaaatgcatgataggttcaaaagaagtgcagtagggagtgcactgtacatccatccttgtctttcaggactttcagaggttaatgctgagaacagggctcacaccttgagagatgattcagttgatagtctgatggattccatcaatgtgagagacggcgtgaaggccaactttttcatgaatatcctgtcacttgctaattccgcaggagagaaagtacttgcttttagccaatatatacttcccatgaccttctttgaaaggctgctggttaagaagaagggctggcatgtggggagagagattttcatgatctctggcgacactagccaagaagacagagaagcggcagtggaccgtttcaacatctccgctgatgcgaaggttctattcggttccatcagggcatgtggagagggcatttccatcgtcggcgcgtcgagagtcgtcattctggacgttcacctgaacccatctgtcacccgtcaggcgatcgggcgcgcgttcaggcctggccagcagaagaaagtgttcgtgtacaggctcgtagctgccgactctgacgaggtgaaggtccacgagacggcgttcaagaaagaagtcatacagaagctgtggtttgaatggagcgagcagtgtaccacggaagacttcaagctcggtcaagtcgatatcgacgactctggggacgagctattggataccagagcgatccgccaggatatcaaggcgctgtacagaaggtaacaaacttcgtggccgatggacaccatgtaaatactggcggtgctgatcaatgagaaatactggcttctctacagacctgagtttgctctaaaactaggacttttcaagctatatctgtggaatggtttcttttcttttgtattatgtgccagcttcggacagcagtcagctgatcctcgactcatttcttgactcgtaggccaggattattgaggattaactgctatggtgtttagacttcttaagggctagtttagaaccccggatttctaattttccaaggaaaattagttcatttttcattgaattcctcgggagaatggagttttcaaactaatccttagtaaatatttccgtcggcgataataaacaccacccagtagaccctaattcgtctttggttcgtgttggttgctcttgagcgttggaacttacctggtgccccgtttataattttatatatactccatcagttgtaaaatatagtttttatagcctatttttttgcccgtgaatgataataaatggtcatgtagac

SEQ ID NO: 2280 - DNA, 985 bp, Zea mays
  Clone ID: 700219193_FLI
cttgagaaggttgttgaatccaaaaagatggagtatcagcaaaacaaacctaccgatattgtctgcaagtactttcttgatgctgtggagaagaaatagtatggatggttctgggtttgcccaaatggcggcaaagagtgccattacaggcatgcccttccgcctggatacgtactgaaatcacaaatgaaggccttactagaggaagagagtgagaagatagctattgaagatgagattgaagatcagcgtaaaaagacaaagactacaacccctatgacaacggaattgttcatggaatggaagaggaggaaggcagaagaaagagaagctggtcaggctgccttgaaagcagagagggctaagaatgatcgcatgagtggccgtgagttgttcatggctgacgcaagtgtgtttgttgatgatgctgaagcatatgaagtatatgagagagaggagtctgaggccaatgaagaatcgaccaataaaagtcagaatccaggtccaagttcatcaacatctaatggcaaggaggttgaggagcctgacgacgatgatatcgatgttgacgatgacttagacattgatgaattgaatgaacttgaagcaagcctgtcgagaacttccatccaaattcgagagcctggcgagggaacatcatcttgagcagtactacaatggaagattgttgcgaagttgctctccatttttgcgcttccatccgatctagtcgcttttgcaaacaaagaaccgtggagcacagatgcaagtggaatagatctcttagcctttcactagctatcttgagggagcaacgatcaacaaatgacgaccagtattatgatcacacatgacaattgatgtttgctgtgtgccttattttttttatcttgtgccctttgtgggaaatatgttgctacttgtgaataacaggactaaacagtttgttagctttccgcagactcaacagaattttgaagtgaac

SEQ ID NO: 2281 - DNA, 2236 bp, Zea mays
  Clone ID: 700219207_FLI
acaaatagtcggtttactatcttctataatccaagagcaagcccttgtgaatttgtcatacccatggctaagtatgtgaaagctgtgtaccatacccgtatatctgtgggcatgcgtttccggatgctttttgagacggaggaatctagtgtaaggcgttatatggggacaattacaggaataagtgatcttgatcctgttcgctggccaaactcgcactggcgctcagtaaaggttggatgggacgagtcaactgctggagagaagcagccaagggtatctctttgggagattgaaccgttgacaacttttccaatgtatccatctccttttgctcttggattaaagcgcccatggcctgcaggcctgccttctttatacggtggaaggggtgatggcttgacctcttctcttatgtggcttcgagacagggcaaacccgggtttccagtcactgaatttcagcgggcttggtatgagtccctggatgcagcctaggctggataattccttacttggtctccaatctgacatgtaccagaccatagcagcagcagcagcatttcaaagcactacgaagcaagttccaccttcagcaatgcagttccaacagcctcagaacattgctgatagatctgctcttctatcaagtcagattctgcagcaagtacaacctcggtttcagcaaatttaccctcaaaatctcaacgaaaacaaaattcaaggccatacacaacctgagtacctccaagtccaacagcagcttcaacgctgccaatcatttaatgagcagaagcctccgatgcatccacagcaacaacagcaggaaccacagaagcagcaatgcgtccaaacaccacaggatcaacaaatgcaagaacagaagcatctgcacaacttccactccttgccagatgcattatcggccttttctcagctttccccagccactcactccccaccttccgcattgcagacagttccagcattctcgcatcaacaaaacttcccagatacaaacattagctctctctcaccatctactggcccttcaatgcatggcatgttggggagattaccttccgaagcagcttcgagcctcccatgtgtggcaatgaacgcccctgtatcggtatctgacccatggtcatccaagagagttgcagtggagtctgttaacccttgtcgacctcatgtttcaccacatatagaacatttggatatggcgacgtgtaacatgccgcagagctctgcactagcaccattacctggacgagaatgcctagtggatgaagatgggtgctctgatcctcaaaatcacctcttgtttggtgttcacatagactcacattcacttctgatgcaagggggcattccagcccttcagaatgataacagttcaggcactattccatactcaacctccaatttcctgagcccttctgataacgatttccccttgaatcaaccgctacgcagcgctggctgcttagatgagtcggattatcttccatgtgcagagaatgccgaacaggcaaatcaacagtttgcaacctttgtgaaggtttacaaatccgggaccgtcggaaggttgctcgacatcactagattcagcagctacgacgagctccgtagcgaggtggggcgtctgtttggcctcgagggccagctggaagaccctttgagatcaggctggcagcttgtatttgttgacagggaggacgatgtccttctggttggcgatgacccatggcaggaattcgtgaacagtgtgtcctgtataaagatactttcaccggaggaggtccagcggatgggcaagccgggcatccagctcctgagctcggctccttcaagaaggctgggcaatggctgcgacagctacgcgagcatgcaggagccgagaggcctggacgctgggatggcgccggtgggttcggtcgagttctgaagacggcggaggggagcccatggccctcggctcgaggattactctccctcctgtatgtttctgcagcacttgctagctctgcgacttggaacaaagcacgtagatcaaatggagctctgtgctgctccccgtctgatgatgtcttatggtatagactcgtagcagtaactactacatgttgtatacatgccgggcacttcagttcttatcgagtagcaataccgctagtttagtccatccaatcaactacgttcttgttcctatgatcctgttgttgcgatgcagt

SEQ ID NO: 2282 - DNA, 1475 bp, Zea mays
  Clone ID: 700220579_FLI
ctgcaggcggacctacaagctctttggaggagtagagacttccagccatcccttctacgctctccccgttcccgtgtcgtcctcccgacaaagagggagccgctagggtttagcggcttccgcttctgggtgagggcttacccgcgagggacggcgcgacgcggcggcacttgagctagggtttccctccgatcccgttcctttcccggcgaggcgatggacgaggcggcgattgacgacttgatccggcggctcctcgaggcccgcggcgggcgcaccccgcgcaacgcgcaggtgactgacgccgagatccggcgcctctgcgccaccgccaaggacgttttcctctcccagcccaacctcctggagctcgaggcccccattaagatatgcggggatgtccatggccagtattcagacctccttcgattatttgagtatggtggctatccaccagatgcaaattatctgttcctgggtgactatgttgatcgggggaaacagagcatagaaacaatatgccttctcttggcgtacaagataaagtacccagaaaacttctttcttctcaggggaaaccatgaatgtgcctcgatcaaccggatatatgggttttttgatgagtgtaagaggagattcaatgtgcgtatctggaagatattcactgagtgttttaactgcctcccagtggctgcacttattgacgataagatcttttgcatgcatggggggttgtctcctgagctaaagaacatggatcaaatacgtaacatttctcgtcctgtggatgttcctgacgttggtcttctatgtgatctgttatggtcggaccctgataaagagattgttgggtggggtgataatgacaggggtgtttcctacacctttggagctgacatagttgctgagtttcttcagaaacatgacctagatttgatctgcagggctcaccaggtcgtagaggatggctatgagtttttcgcaaatcgccagcttgtaacaatattctcagcaccgaactactgtggagagtttgacaatgctggtgcactgatgagcatcgatgactccctagtatgctcgttccagatactcaagccttctgaaaagaaaagaaaagcaggagctgagaacatgccaaagcccggtacacctcccaggaagataaaaataagtgttacccgcatttagccagattctcgttatcaaactggatttgagaagttgtgattaaatgctccccaaacttgttatggtaggttttttggtgagcttaacacggtgttaaactgtggagtgtggaccaccgtgcttatgtcttgctgatctgaagtcatgcaaatgtatcctggcgttttgccaaacaaaaaagatcatgctaacagaaacttctggattttttttattgtggacctttgttcttattccccgacaaatgcaacatgtttatgaatgggtagcattgcttgcattgg

SEQ ID NO: 2283 - DNA, 2986 bp, Zea mays
  Clone ID: 700221147_FLI
gggccgttcaccccgtccatttgatttgcgttcactgcgttgcgtttccttggaggggattgttctctcctctcctttggattggaggtccctccttcttctcctctctctctcagaggaaggcctgaggatccaggaagaggacagcaatgggggaaggtgcaggtgaccgtgtcctgagccgcctccacagcgtcagggagcgcattggcgactcactctctgcccaccccaatgagcttgtcgccgtcttcaccaggctgaaaaaccttggaaagggtatgctgcagccccaccagatcattgccgagtacaacaatgcgatccctgaggctgagcgcgagaagctcaaggatggtgcttttgaggatgtcctgagggcagctcaggaggcgattgtcatccccccatgggttgcacttgccatccgccctaggcctggtgtctgggagtatgtgagggtcaacgtcagtgagctcgctgttgaggagctgagagttcctgagtacctgcagttcaaggaacagcttgtggaagaaggccccaacaacaactttgttcttgagctggactttgagccattcaatgcctccttcccccgtccttctctgtcaaagtccattggcaatggcgtgcagttcctcaacaggcacctgtcatcaaagctcttccatgacaaggagagcatgtaccccttgctcaacttccttcgcgcccacaactacaaggggatgaccatgatgttgaacgacagaatccgcagtctcagtgctctgcaaggtgcgctgaggaaggctgaggagcacctgtccaccctacaagctgataccccatactctgaatttcaccacaggttccaggaacttggtctggagaagggttggggtgattgcgctaagcgtgcacaggagactatccacctcctcttggacctcctggaggccccagatccgtccaccctggagaagttccttggaacgatccccatggtgttcaatgtcgttatcctctcccctcatggttacttcgctcaagctaatgtcttgggttaccctgacaccggaggccaggttgtctacatcttggatcaagtgcgcgctatggagaacgaaatgctgctgaggatcaagcagtgtggtcttgacatcacgccgaagatccttattgtcaccaggttgctccctgatgcaactggcaccacctgtggccagcgccttgagaaggtccttggcaccgagcactgccatatccttcgcgtgccattcagaacagaaaacggaatcgttcgcaagtggatctcgcgatttgaagtctggccgtacctggagacttacactgatgacgtggcgcatgagattgctggagagcttcaggccaatcctgacctgatcatcggaaactacagtgacggaaaccttgttgcgtgtttgctcgcccacaagatgggtgttactcactgtaccattgcccatgcgcttgagaaaactaagtaccctaactccgacctctactggaagaagtttgaggatcactaccacttctcgtgccagttcaccactgacttgattgcaatgaaccatgccgacttcatcatcaccagtaccttccaagagatcgccggaaacaaggacaccgtcggccagtacgagtcacacatggcgttcacaatgcctggcctgtaccgcgttgtccacggcattgatgtgttcgaccccaagttcaacatcgtgtctcctggcgcggacctgtccatctacttcccgtacaccgagtcgcacaagaggctgacctcccttcacccggagattgaggagctcctgtacagccaaaccgagaacacggagcacaagttcgttctgaacgacaggaacaagccaatcatcttctccatggctcgtctcgaccgtgtgaagaacttgactgggctggtggagctgtacggccggaacaagcggctgcaggagctggtgaacctcgtggtcgtctgcggcgaccatggcaacccttccaaggacaaggaggagcaggccgagttcaagaagatgtttgacctcatcgagcagtacaacctgaacgggcacatccgctggatctccgcccagatgaaccgcgtccgcaacggcgagctgtaccgctacatctgcgacaccaagggcgccttcgtgcagcctgctttctacgaggctttcgggctgacggtggttgaggccatgacctgcggcctgcccacgtttgccacagcctacggcggtccggccgagatcatcgtgcacggcgtgtctggctaccacatcgacccttaccagggcgacaaggcgtcggccctgctcgtggacttcttcgacaagtgccaggcggacccgagccactggagcaagatctcccagggcgggctccagcgtatcgaggagaagtacacctggaagctctactcggagaggctgatgaccctcaccggcgtgtacgggttctggaagtacgtgtccaacctggagaggcgcgagacccggcggtacctggagatgctgtacgcgctcaagtaccgcaccatggcgagcaccgtgccgctggccgtggagggagagccctccagcaagtgatgcgcgacggcggccacagacctgatcgatcgatgagcgagagggagcactcggagtgtcgtgtcttttcccttgccatttctttctttttttcccttcccggaggcgaaaaaaagagtctgcttttgctaggcggcgggcgttcgttgctgctctttgcttcaagagttaaatttacctaccttgtcaaggtcttgttccatcattgatccgggtgtcgcttttttagtagtctgatggactgttagtagtttgcgttgcgtcggttgagagggaacgttggtggtggtggtgtgtgtgcagtcaggcgtggtgctccctttgtttcctggatgggatgttgctccttgaataataatcgtagtggccttggagcccttttcctg

SEQ ID NO: 2284 - DNA, 1258 bp, Zea mays
  Clone ID: 700221167_FLI
gcgcgcagaagctactcccgaagagtcgctctcctgcgtccacgcctcgcttgcggcgactagggcgactgccgccgccgcccttcgcccagctgcccaggtcttcgtcgggcgctttaccgctgaagagcgcccaccataccagattggccaccagaggattgctacatttgggaaggatgagcaaaggccctgttccattcgccaacattgggaagagagcaaaagatctcttgtacaaggactacaactttgatcaaaagttttttttgtcgacatgttctaactctggtttgaatctcacagccactggtgtgaagatcaatgaagacttcattggtgatatacggacacagcataaaagcagcagaaccactgttgatgtcataatcgatagtgattctaaagtgtcaaccacagtcactgttgatgaagcactaactggtttgaagacttcatttgccttcaaggttccagatcacaagtctgggaagcttgatctgcaatatgcccacaatcgtttttcaatgaattcgaccattggtttgacatcaacacctttggttgagctcgctgcaactgtcggcacaagtgaacttgccattggtgctgagtttgggtttgatagtacttcagctgctgttaccaaatacaactcaggggttggatacaacaagtctgatttctctgcttccttgctactggctgataaaggggagactttgaaggcatcttacgttcatttattcaatccgaccaacggggctacagttgcagctgaggtaacacacaagctgaaaaccaaggagaactatttcacacttgggagctcccatgcccttgatccttcaacattgctaaagacgagattcagcaactcggggaaggtcggtcttctctgtcagcatgagtggaggccaaagtccctcgtgactctttcagctgagtatgatccaaaggtggtaagtgcgccttcaaggatcggcgtggccatatcgctcaagccttgagatatgggtcaagtcaccttctgtaaaacagtacaagcgttacgtactgatactcgtgtccaagaacataaacttttggagcgatgcctagaacaaccctctcccttttagccttgtttttggtaagatccttgggcaaagaagtgttgtcagggagttggacttgttttgtggaatgtttccattaagagccaaccccacaccgatgattgcaaacagaggtttgtattagtgcagaagtttcactc

SEQ ID NO: 2285 - DNA, 786 bp, Zea mays
  Clone ID: 700221194_FLI
ggcctactgttgtggtccagtgatccagtctgcgtctctttccccgtcgtggtgggttccgatccaatcgacgtcgacgactccgcagccaccgctcctctcctctcgtcgcttcttctatctctcggcgtcgaatctcatccggccagtgaccacactctactagccgcccggaaggagttcttccgggattcgagccgttgctgccctcacctctgcaggcccagcgtcgagcggagatccaatcggaaattgaactgacttcatcttttgtcgcatcccagtcaggagaagcaatgtcaggagtgatcacaaagttcgcggttacatccatggtgatgtggatggcccctgttgcgatcatgtatgggttttactaccaggtgtttccaggtgtgagtcagatgtcatcctcggcgcagacacttgccagtgggttcctggctgtcatatcagttaatctagtgatcggcttttacatattcatggcgatgaaggagactccacaccaagagccacagccagatcccaccttcctggagaaagccaaagcgagtatcaaccagccaacatcctctcgagtgagtgatgattccaaggggaagggaaaggtcgagtaagctgtagcatgttggcttaggtctcgtgtatgttaagtgcatgttatttaggaggaatagttatgccacaccatcacaaggaccgcaacctttcacaatttatgattttgctgtaaatcttgacagttatggctatggagcaatatgaagttgaaccttttgtacc

SEQ ID NO: 2286 - DNA, 1859 bp, Zea mays
  Clone ID: 700221196_FLI
gtggatatgatagagggaaaatgtgaggttagaaagaagaacgatcttgcaagttcagaccttccagtgatgtttgaacatgtatttttctgtgaactcatatatgaccgtgccagtggagctctcaagcagttgcctccaaatgttaggtttatgtctatggtgcaaaggacaagtgcgttgaaaaagaacaaaggaaagcagatctgtgagcctgatcaaatagattcaggtaaatggttggatgtgcctaaagagaaccgtctagctactcttgacatttttgctggctgtggaggtttatcagaagggctgcagcaagctggtgtatcttttacaaaatgggcgattgaatacgaagagcctgctggtgaagcatttaataaaaatcatccagaggctgtggtctttgtagataactgcaatgtgattctaaaggcaattatggataaatgtggggatactgatgattgtgtttcaacttctgaagctgctgaacaagcagcaaaacttccagaagtgaacattaataatcttccagtccctggcgaagttgaattcataaatggtggtcctccgtgtcagggattctctgggatgaatagattcaaccaaagcccatggagtaaagttcagtgtgagatgattctagcattcctctcattcgctgagtatttccgtcccagattctttctgttagaaaatgttcggaactttgtttccttcaacaaagggcagaccttccgtttggcagttgcatctcttctggagatgggataccaggtccggtttggaattctagaagcaggggcttttggtgttgcccagtccaggaaaagggcgtttatttgggctgctgcacctggagagatgcttcctgattggccagagccgatgcatgtgtttgctagccctgagctgaagataacactgcctgatggccaatactatgcagctgcaagaagcactgctggtggagcgcctttccgagcgattactgttagagatacaattggggatctgcctaaagtgggaaatggtgccagcaaactcacgcttgagtatggaggtgtgcccgtgtcttggttccagaagaagataagagggagtatgatggtactgaatgatcacatatctaaggagatgaatgagctgaacctaataaggtgtcaacacattccgaaacggccgggttgtgattggcatgacctaccggacgagaaggttaagctgtcaaatgggcagatggctgacctgataccttggtgcctgcccaacacagccaagaggcacaatcagtggaaaggactgtacgggaggctggactgggaaggcaacttccccacatccgtcactgatccccagccaatgggcaaggtcggcatgtgcttccaccctgatcaagacaggatcatcacagtccgggaatgtgctcggtcacagggctttcctgacagctatgaatttgcgggcaacatccagaacaagcaccggcagattggcaatgccgtgcccccgcctcttgcctatgcacttgggaggaagctcaaggaagccgttgacaagcgtcaggaagccagcgcaggcgtgcctgcaccatgagaagttttccttccatcaaaccatgacccatgaagctaagcgctgaggtcgtccttgaggaccagttaattttggttttatcagtcttaatggactcctgaatgtatatgttagagaagtgtcgattgctgattgttaccctgattcagggtagcggttatatctaaaaacttgagaaaatctagtgtactctagttgctatgtgttccattttgttgactctaaactttcaactagttttggtgattaatgacaac

SEQ ID NO: 2287 - DNA, 967 bp, Zea mays
  Clone ID: 700221914_FLI
ggggagcagcgagatcgtgcgcgcctccgagatctccacgaagttgtggtaacatggggctcaccttcacgaagctcttcagccggctcttctccaagaaagagatgaggatccttatggttggtctcgatgcagctggtaagaccaccatcctctacaagctcaagctcggagaaatcgtgaccaccatccctacaatcgggtttaatgtggagactgttgaatacaagaacattagcttcactgtctgggatgttggaggtcaggacaagatcaggccattgtggaggcactatttccagaacacccaaggccttatctttgttgttgatagcaatgacagagatcgtgttgttgaagcaaaggatgagctccacaggatgctgaacgaggatgaattgagggatgctgtcttgctcgttttcgcaaacaagcaagatctaccaaatgcaatgaacgctgctgagatcaccgataagcttggtctccattccctgcgccaacgccactggtatatccagagcacttgtgctaccacaggagaaggtttgtacgagggtcttgattggctctccaacaacattgcaaacaaggcctgaatggacaattctgctgtttcacggagcacatctgcacatggcgaggcatggtcattttgaccctcagacgatcattgtttcattggaaagtatcgtatttctatgctaggcttttcagagagattactctctaagaaactgatccgatattaagacactataattggcattggcactagtagatcgtttactgagtaatgcagtttattttaatgtatcccaattgtgttgtaagatacaactatgcgtcggaattacccattcaatttgaatctagatacgtagtttttgttatatacttatacttggatatatattgtttaatacatggtaaaagtaacatatcaagaaaaatattttataatttg

SEQ ID NO: 2288 - DNA, 1586 bp, Zea mays
  Clone ID: 700222430_FLI
cagttctcgacctctcctcctacctcctcttcactcccttcctccctcttgcatcactatcaccaccaacaacaaggctaacgcacaccaatccaacaaggagaacaaaaaacaattaatcgtgttttgagcttttgatatcacctcgttcgagttaagtgcgtgaagaggcaataatggtggcagtggaggttgtgccggcgtccgcggagtccccgattccgatcgaggctaagaccgcggtgacgtcggaggcggaggcggaggcggaggccgagggcgaagtggaggcggagatgaagggtgatgcggcagccacggcgggagaaacggcggaggaggaggaggaggagaaggtgtacaagagcgacctgaagaagctggagaacctcatgtccaagcttaacccctccgcgcaggagttcgtgccgtcgtcgcgccgcacggccccagccgccgtggcggcggcgaagccggcgggaggaagggtgctctcagccgacgcgcccgtgttcgtgtccgccgccgagtactacggcgctgccggtgggcacctggagataggcggcggcggcggcaaagtcgtcgttggcggcgggggcagggactccagcagcgacggatccagcaacggcggcggcggcggcagtcgccaccaaccgaatcgccggaggaggaacagcttcaaccacgggaggcggaggggggccggaggccggccccggcggggtgatagggaggacagcgtgcgccggaccgtctacgtgtccgacattgatcagcatgtgaccgagcagaagctcgctgaagtgttctccaactgcgggcgagtggtagattgccgtatctgtggcgacccccactctgtcctacgctttgcgttcatcgagttttctgacgatgctggcgcaagagcggcgctaacactcgcgggaaccatacttggctgctatcctgtcagagttttgccttctaaaacagcaattctacctgtcaacccgaaatttcttcctcagactgacgatgagaaagaaatggtatcaaggactgtatattgtactaacatagacaagaaggttacggaggaggatgtaaagggtttcttccagcaagcctgcgggaaggtttctcggctgaggctccttactgacatagtacactccacatgcattgcttttgttgagtttgctcaggctgaaagtgcaattatggcattaaattttagtggtatggtccttggctcacttcctatcagggtgagcccttccaaaactccagtccgtccacgttctcctcgtgtgatgtccaattgatcaggctgctaccaatagcaaatcatcctaggcagagcttattgtagctatgatcgccctagaacccacttcacggatcaatgacgtcgttgtcctgagagtgtccaagtcagtcataggaaaccaacttgttgccaaatgctaatgtttttctgtttgccagatccatgcaccatttcccttctttttttcattcccccttatgttaattatgaacataattgtttataatcgcctttctcaggcatcagaataagaatgaataactctggc

SEQ ID NO: 2289 - DNA, 131 bp, Zea mays
  Clone ID: 700222435_FLI
ggtagcataggcattagtacattacaagttgctaagtagcttgagccaaggattcctctgtatgttgcttttagggagaaaataatatttattacatgtaattcaaactgcattgggtccaaaagttcagt

SEQ ID NO: 2290 - DNA, 2066 bp, Zea mays
  Clone ID: 700222492_FLI
gaagccaccaactcagacatgactaaattcagtgctatacagaagcagataggccttctgctaaaagaagttcaccgcagggaggaccagcttcaagaggaggagcacaggattgttgaagctcagactgaaatttttatcttacagaggtgcttaggtgacatggctgaagcaaatgctgatgtcttggcacaattgcagaagcaacaagtggtatgcaaggatcaagaggagaaagttgatttcttgtcacagaacaaccagcagctgactgaagggataggttctgtagtggaagtactgaatctggatgagaaatacgaatcattggatctgatgaagattgatgttgttgtgcagctcctcttgcatgagatcaagtgcctactgaatactatttctgatgctcaggatgtgaagcagaaccagatccttgagaagtcccttgttgtcacgcttcttgagcactttgggcgagaggtggctgacctgaggtcggaaaggagtgttctgaagcaagagtggcaagcaaagagtgaggagctgcagcagctgcagagtgaaaagcatgacctcctaaagataagctgtgagctacggaaggaaatggaggctcgtaaccgcaaagtggatgaactgaaatctgaggcaaagttcttggttcgacaactgtcggaattgcaagagtcacggcagtcgttgcaagcagagattgtcaagctgattgcagagaactcttcactctctagcaaagtttacagatccagagagaaagagacgtcatttgatgaggatttcagcacacttgttgatgaagcgatcaggacagatattcttggtgtcatttttagaagcctttatgaagagaggacatcacaattgcagcgtttgcatgaggattttgggtctctacatgcagcaggcaatgagctgtatcaggaaatcaagctgatgaacaagaagctcggagacctacagcttgagaacaactatcttgagaaggaactcagtagaactctaagcatctgtgatggctctggtacagaaatttcctccggaagaaggcgtgctatgaggagggacacgaagctattaaaatctggcaggaaaagccaagagggtggccagaacatggaacaacgaaaagaagttgacaatgctggcctcgagaaatcgaacgaaatgcttagagtggagctccagaagttgaaaaatgaactgcaggtccttaaaagcaaggaacagcctgtgattgacgtgaaatcttgtgacgcagagatcactaaactgctggccagcatgcaattggccacagcgaatgcgtctctcttcaaggagaaggtgcttgagctcatcgtgacatgcgagagttttgagatcagtgacatggtgcagaaagaggtgctgaaagaggagatcactcggaggaactcttacgtggatgagctcaaggacaagcttaatgccattgagattgagaacagaaggctgaaggttgatctgaacggcgacttcacactgctcggagcattgcaaactgaagttgatgccctggagaaacaaaccttgtctctagccaaggattgcctaccaccaagcatgctcaagaaggaggagaatccactatcacctcagctgtcaaagattgctgtgaggccaagtgaagatcagaacaccacaaaggtggtgaaggacatggagctgcagaaactccacgggaccatcaaagcacttcagaaagtggtgtcagataccggggtggtcctggagcaagagcggcttgacttcaacagcaacctccaggacgcgaggaagcagatcgagatgctgaagctgaaggagatcctggacagcgacgccagcgacgtgaactacgagcggatgatgaaagacatccagctggacctcgtccatacgcctagccggcgagccgccgcatcctcacacgggcgccacaggaagaagaactcagtagccgcgacggcgcagtctgacgacaacaagatgctcgcgctgtggagcgtggacagggtgagcagcggcagccggcggcacgacatggacct

SEQ ID NO: 2291 - DNA, 1341 bp, Zea mays
  Clone ID: 700208885_FLI
cacgaattgatctctgcgccgctgcaaccccggcccgtcgaagccatggggtccggggactggttcaagacgatcatcagcaagaaaaaatcgaagcggggaaagtcaaagcacgcaaagctctctggccaagtaacaaatggaggcaaccagacaaatcagaagttagacggcccttcttcaagtagtgaggaccacgaagacaatgcagcactagaggaatgggctgctactcgcattcagaatgcgtttcggaaatacaaggcaaggaagaccctgcgttgtctcaagggagtcaaaagattgcgcgttgtgggtcaggcgaatccggttaagaagcagactgctgccacgctgagttacatacagtcttggaacaagttgcagtcggagataagaaaccgacgtgctttcatggtcaccgaaggacgcaacaggaagaagaagcaggagaaccaaatgaaacttgaggcaaaactgcataatttgcagattgaatggaatggaggctcggatactatggatgaaattcttgctaggatacaacaacgggaagaagcagcagtaaagcgtgagcgagccatggcgtacgcgttcaaccatcagtggagagcaaggtctgccacaagtctaggaaacttcagctatgaagtcggtaagggtggctggggctggagctggatggaccgctggatcgcagcacgaccatgggagccgcgatccatggtccaccctgagaacccgaagaaagcacaggcaaagaaggagaacaccacaaacccatcagctctcaagctgcaaggctccattaccctaagcaacaatatcaatgaccggaaaaccctgaaaaagaagccattgccttcagcttctcctgctgatcagaagaagccatcaccgtcgccttcttccgatcagaagaaaccagtaccgaaggagcagagagcaaaggcagctggcactcctccaaaaccaaaggccaaagatatgaaggggagtcaagagaaaaagccacaaccacaacagaaagtgcctcctccggttagcgcatgaagcttcctgctgcgaaaatggttactgatcatgtaagatacatcttgtgaagttatctcatgttcaacactcatgcttgtatgtttttgttttttgttttatggtgttatgggacgaggggtgcccaatctagaatgtgcttggtttgagcgattgcgcacgcacaacatatctgatgagaattgtttttggttaggattaggatctctgttattcattgttgtgatgctgtaataagacttgccttgcctggctatctgcttgaatggaaagtcttgttggaacaac

SEQ ID NO: 2292 - DNA, 788 bp, Zea mays
  Clone ID: 700208888_FLI
cacctctactcgccgggccgcgcgcccgcgcgtgtctgctcaaccgtagcgctcgcatcccctttcttcctcgttgttctagcaccaccggccgggcttctccctcgttgagtgcccttgcctacagccccgacgtgccactgctctggccctgccttgttgtgttcatggatatggacagcatcgacatcttcattgtggcgcgtcactgtgatctccccacgccatgccatacacgcccgccaccacgtcttactccagctgcagagcaacaacacgctcgccattccctaatcagcctcaccgtcgttttcaacaacgtggagacgctcctctactcaacgtgtgttgcctgctcgtcggaatgtgtgactggcctcctcgaccttgcagtgggctgtttcgcgtcggccaccgtgtatccaacttccatagtaacgttgttgttctctcctgggggctcattgccgactccgctacccggagaaagttcatattcgctacccacttggtgcgggatggaaagttttaactgcagtttgtcgtcattcctcgtcctcggtccagtcagctttgcattgtcgtcatgttcactgtggtgagctccctggctgtggacagtgtcgtgcttgtgcgtaggttagattgtggtttgtgtgtgcgtgtttgtttgtgtggagaaggacccgagtgtcgttcaccagatgtacgatgaaaggctcgaatcagtattcgttaatcgatgtagtaaattggagctgaatttaatattgccccgcatttttatt

SEQ ID NO: 2293 - DNA, 858 bp, Zea mays
  Clone ID: 700208893_FLI
gcgccgccgcaccctgctcaaggtcatcatcctcggcgacagcggggttgggaagacgtctttgatgaaccaatatgtgaacaagaagttcagcaaccagtacaaggctacgattggggcggatttcctcaccaaggaggtgcagttcgaggacaggctcttcactctgcaaatatgggacactgctggtcaggaaaggtttcagagtcttggcgttgcattctaccggggagcagattgttgtgtcctagtctatgatgttaattctatgaaatcgtttgataatcttcacaactggcgtgaagagtttctaattcaggcgagcccatcagatcctgacaatttcccttttgttctgttgggtaacaaagttgatgtagatggtgggaacagccgtgtggtgtcggagaaaaaggcaaaggcatggtgcgcctctaaagggaacatcccgtactttgagacgtctgctaaggatggaacgaacgtggaagatgccttccagtgtattgtaaagaatgctctgaagaatgaaccggaggaagaattgtatgtgccagataccgtggatgtggtaggtggcaaccgggcccagagatcatctggctgctgttaagacatgaggcatccacgaggcgtggtgatcatcatcggctatgcagtgatcaaacaatacctccttaacattgctgggcctccatggttatctacgtgtccgtattccatttgttacctttccagtctcctgctatgtacctttcccatgctgtcagtcaatccgtagacttcatttgtgcagttccatcagtagcgtcataccttgtgaatacagttggacaaaataagagcaagtctgaactg

SEQ ID NO: 2294 - DNA, 1382 bp, Zea mays
  Clone ID: 700208909_FLI
gtcgcatacaggcagcaggatgctctttattcccctgtgtcagcttcagcgaagctaatcccattccagtgcccgtaccgcgccgtccctatcgtgccggatcgccacccgctcgctgcgcccccacctccccccctcgccggttcgccacttcgccccacctccgcgcctcagatccatccccaatccggcaaccctagcgccgggttcctcctcctcgtctccgcccgccgccgcctccattgccagaggtgatcgagggggagagacagagcttgggtggtcggattagggagagagggaggggaggatgtccagaaggtcggtgaacccgagccggcgggtggcggacgggggcttgccgtccttcggcggcccgttccaccctaagtcacgctcgcctcccgtgctcaccattgccctcgtcgtcctgggtgtcatttttctcattgcctacttcaacagcagcccaggtgtaactgttacgagcaaagagaccgtgaccaggtctgaaggttcttgcacatcagaagttatgcgggcgcttccatatcttaagaaggcatatggcaatgccatgcaaaaggttctccatgtaggccctgatagttgtacagtagtttctaacttgttgaaggaaggaaaggttgaagcatggggagtggagccttatgatttggaggatactgacagtacttgcaaaagactcgtgcgcaagggctttgtccgtatgtctgatattaagttcccccttccataccgtccagattcttttaatcttgttattgtgtcagatgctttagattatctgaccccaaggtatctgaacaaaacacttcccggtttagcaagggtttccacagatggccttgtgatttttgctggcaatcctggtcaacagaaagctaaggtctcagaactaccaaaatttggaagaccggcaaaactgcggagttcctcgtggtggacaagatactttgtccagactggcttaacagagaacgaagggccactgaagaaatttgaagaggctacatcccagaacaaataccaaccagattgtcagatcttccacttaagttcgccaaggtgatgcgcatccagaacaccttgggttgttgtcagttgtcacatcagttctgtaagcagcacctttgcttacccctgttgacttgcgcatctttcgtgcggaggaatggtcacacaaacagagccagccatcagcagtaggttagcttgtgtagagagggagagagagagagagagagaggcctcgacacttgttcctagaaaatcgttctggaaattaaattatgtgtaaccaatgactgaaaactggagcccgctgggatatatatgtaagaacttcacgctgttgtact

SEQ ID NO: 2295 - DNA, 868 bp, Zea mays
  Clone ID: 700208940_FLI
ggcattaattgtacagctttattagctcctgcttctgcttctgcttcttcttcttagctggagactagagaaagaagaagacacagtgatcatcggcatagatagtaagtagaagaatagctagctgacccaacgaaatgacgatgagagatgagatcgtcttcttcgacgtggagacgacggctccgtcggcggccgggcccggtcggtggtggctgctggagttcggcgccatcctggtgtgccccaggaagctggtggaggtaggcagctacgacaccctcatccgcccgggcgacctctccgccgtctccaggcgattcacggacgacgtggaggcggccataatggcgtcggcgccgcccttcaaggacgtggccgacaagatattcgacatccttgacggccgcgtttgggctgggcacaacatccagcgtttcgactgcccccgcatccgcgaggccttcgccgacatcgggcgccccgccccggagcccgtcggcgtcatcgactccctcaacgtcctggccgcacacttcggccgccgcgccggagacctcaagatggccaccctcgcgacctacttcggcatcggcaagcagaagcacaggggcctggacgacgcgcgcatgaacctcgaggtgctcaagcactgcgccaccgtcctgctgctggagtccagcctgccggacgtcctctgcgcgcagcagtctcgccgagccgcggtcaccaggaggacgtcgcaggcgcagaccatcaagccgccacctaaacatgctgtgcaacaccacctgcggcccggcggcgtcgtcatgtcgcagacaaagctgccatttaccgctgtaacaactacacctgcacctgcact

SEQ ID NO: 2296 - DNA, 844 bp, Zea mays
  Clone ID: 700208952_FLI
ggtcagaccaatcaacaaagtgacgcgagcacgagcatccatcgtttccccttcttccccatcgcgtgccctcgccgcagccatcttccatggcggaccagctcacggacgagcagatcgcggagttcaaggaggccttcagcctcttcgataaggatggcgacggctgcatcactaccaaggagcttggaactgtgatgcgctcccttggccagaaccccactgaagcagagctgcaggacatgatcaacgaggttgatgctgatggcaatgggaccattgacttcccagagttcctgaacctgatggcaaggaagatgaaggacaccgactccgaggaggagcttaaggaggcctttcgcgtcttcgacaaggaccagaatggtttcatctcggctgctgagctccgccatgtcatgaccaacctcggcgagaagctgactgacgaggaggtcgacgagatgatccgtgaggccgatgttgacggcgacggccagatcaactacgaggagttcgtcaaggtcatgatggccaagtgaggagcgatccccgttatctatgaatgaattgaagtgaaatatcaggcacacaagctgtactttgccatgtcccttttgagtacacatcagtatcatgcaggaggtaatgtctagtagtggtcggtttaggtggtgtagtcatgggaactcgacatcagatacctggtctcttttgattgtgatgttatcttgcattattgctcctgctggagcttttaggatttgttgtaagctcatattttcagggggttttggatcttttgtgcgagtcttgtatctcgtgtacgttgcattgcaaaaaaaac

SEQ ID NO: 2297 - DNA, 1902 bp, Zea mays
  Clone ID: 700208968_FLI
ggtcaatccgccaagagaagagacccacggcacagatccctctcccctgtctctctctttctctctcctcgaccctcccgacgcgaaaaaataccagggaggagaggagggagtaagggaagaggaggccgaaatctcctcccctttccaaatcctggcccaataatctctccatcaggggatcctaaggctgatcaggtcggaggactcggcgggcgcagccatgaacgagaaggcgtccgtctccaaggagctcaacgccaagcacaagaagatattggaaggtcttcttcggcttcctgagaatagagaatgtgcagactgcaagtcaaagggtcctcgatgggcaagtgttaatcttgggatctttatatgtatgacatgttctggaattcatagaagcctgggggtgcacatatctaaggtaagatctgctaccctggatacatggctgccagagcaagttgcatttatccaatcaatgggaaacgaaaaagcaaatagccattgggaagcagagctgcctcctaactatgatagggttgggatagagaatttcatccgtgcaaaatatgaggacaagagatgggtaccgaggaatggaacattgcgaccttcctccggtgttcgagatgagaagagccaagagtctccagctagtgctaataggagtggacatcatagatcttcgtttgagcaaaaccgtgcttcaccagctcttccgagcaaagttgcacatgtagcttcaaggataccctctcaggcatcacctcaggccccaaaggtagaaccaccagttcctaaggtggtttcacctcctcagccacaaaaatctcttgccaaagttgaggcaacaccccctaaagttgagaagccatcagttgcgccgcctcctaaagttgattatgctactgatctctttaacatgttatcaatggatggaacaacagagaaagagtcagagtcatctccaaacgatgataatgcctgggatggcttccagtctgcacaaccagtacctagctcggaggaaaaagattctgccaaaccagcagaaagcatgacccagtctacatctggaatagaagacttatttaaagattcgccagttgtgtcattatcctcagctccagctgtttcccaagtaaatgcaaagaatgatatcatgagtttgtttgagaagtccaatatggcatcaccattcgctgtccaacagcagcagctggcgtttatgtctcagcagcaagctcttctaatggctgctcttaaagctggaaattcaccacaaatagttccagggaatgccaatcaactaaacactaacgtttctaatccccctcttggaaccttgcctttccaaaactggacaaatcttggctatcaaaatcctgggttgactctagcagcagcacagaatggtgccaccaaggtttcgaacaacaatcaagacctctcttctggtacctttggtttgggcacacctgggatgcacaacattactccagctgtcccagcaaatggtgccacggcagcaggtgctagcaacaacgacactgcatcaactgcctcttccactctcccctcacaatctggcaaagattacgatttttcctcgttaactcaaggatttttcaccaagcgatgagtgcctagtgggcttggaagccaaacagattacctggacatcatgttggacgaggcatattgatttagggagcacaaggagcttgcacatgctttatttcgaggcagattttattctggtggatatatatatagttgtcacatgactttgtagctgtcagacaataagagtggaaatatgcggctaaatagctcatgttgtttgtacaagtgaagaattccttgccgttttatgtcaacggttttgactcgaggact

SEQ ID NO: 2298 - DNA, 888 bp, Zea mays
  Clone ID: 700208976_FLI
gcaaatcgctccctgcctctggtcacctcgcttccgctcccggctcccctccggccacccagacatcgtccgttcgctcgccaagagacaggaccggagaccatggcggaccagctcaccgacgaccagatcgccgagttcaaggaggccttcagcctcttcgacaaggacggcgacggttgcatcacaaccaaggagctcggaactgtcatgcgatcactgggtcagaacccaaccgaggctgagctccaggacatgatcaacgaggtcgatgcggacggcaacggcaccatcgacttcccggagttcctcaacctcatggcccgcaagatgaaggacaccgactccgaggaggagctcaaggaggcgttcagggtgttcgacaaggaccagaacggcttcatctctgcggcggagctccgccatgtgatgaccaacctcggcgagaagctgaccgacgaggaggtcgatgagatgatccgcgaggccgacgtcgatggcgatggtcagatcaactacgaggagttcgtcaaggtcatgatggccaagtgagtaaagcctgcggtaacggtatactaccccgcgggaattgaaggaggaaaccaaaccgtgcatcgcatattagaaaggcaatgcaggtcttgtttccttcgtcttccccatgaagaaaccgtactagctgtagctgctgaacgtttgagtcctcctgctgccacccttatctccatttgtgtcatcgaaactccttgcttcccctgctgtgtgaatctgtacggctttgcgtgttctggacactgattgcagttggatccagtttgtagttatatttgttcatcgaatctgcccagactcctttggtaccattcaacaggctgctgctttctgttt

SEQ ID NO: 2299 - DNA, 2238 bp, Zea mays
  Clone ID: 700208983_FLI
actagttctagttctcgcctggttaactcctccaaacaccttggatcgcgcggcgacggcggaggccgccggcgaggagacggagaaggcggcggcggtggccatctccgggtggcgagtaagcagcggatcggaggcgggagtgaggcgggtggcgtgccgctggcctgctgctgcactgaagaagggagcgccgccgctatacgcgacggcgccgagcgcatcgccgccggcccctccctccctgcgcctgtactcagcccgctgcttctcagtccacttcatccacagctcctcttctctcggtctagagatccgtccgggcacggtagtctcgccttcgttttggcacaacgaacaattactctagaagagttgtactctttggtgtgccgtactctctgtaacaatcttaccaattaccattcttgagaagaggtacatctgtccgtcagcgatgtccatagaagagaggaagataagtatgataagcaagagcactgcactaaatccaaatgcagaggaatttgttccttcgtcccttagatctttcagtgattcctccaagaaatcagatgcaactatgattgtctcagggtcatctaaagaatctagcacagacaagccagaatccattttacgaagtaactctgatgaagaagcacatcagtactggcagcaacagctccctgacgacatcacccctgatttcaaagtcctgggacaagacgaaagtcctggacctgacagtctatcactcacaggcctgtcgattaatgatggcattgacacatcaatattttctccaaaccagacactgggcgtgcagcaccatgcttcaccttttatcagggacaaactgaatacacgcccaaaaattaacttgtctggcccaacttatatggacgaacggtcccaagccgcaattttgagtccaactgcaggttccatgagtccaaatgctgctccatgggtgaagaatctaaggaatgggggacattataacacaagcagaagggatgccactgccagtcactacaatggagattctagcattggggcttcattgcacaacctcactgatgcgtatcatggaagcaggcgcagcttaagcacgactatggatatcatgagtcagctggagagtaaagtcgatgggcgactcaatcagaacctcaggtcactgtcgtttggaaattcaagtcctccatcaccagcatcatatgcccaaaatggtcttggaaactatagtaatgaagcttttggtctgccaaacagtccatatagatctcattcagctatactcgcagatgatattgtttcaccttcagctggacgtgaacatatatccctcgatgttcctagaggaaggtataagacaactagtttgcctgttcctggtcttggttcaagcagaggttctcaggtgttgggtggcccatataatggaaaccatgatatgatctcaaccaataccctacaaaacatggctggaattcagacaggagcagcttggcttgaaactgatgctgcggcaaacacatatttggaatcaaaggatgaagttcatgattttgcaagcctgcgacatgcagttcttgaacagcaggatagacaggcttttctgatgggaaacaaccctttagcaaaggatctaacattgaaggagctatacagtatacaaagcaggttggctcaggagaaagctagagaaacaacataccgacaaagattccaaataccagagcttcaaggcctcatccaggagcagaatcccccaatcgatctctgtggtcttcacatcagcgaggccatgcacgtcctgaactacgagctcaacaaccgaagaaagatcgtgagatccactggtcgccgactccaggctatgatcatatcaagcgcccgcaccccagcacggctgactgctgccgtcgagcagtacctcatggaacacggccttcagtacacgcaggcacaaccaggcctcttccgcgtcctgctctagtgatggagccggcctagctgttgtcacaactggatcagacgagaaagaagaaaaaaaaagttgtacttttgtatatggcagagatggctagcaggatagaagcgttaagatagctcatgcattcacatatcaggctttagcaaatgtatacatcttaaaatttgcggagttaggtctttggtgctggtggatgcataaggtgatagcatcttcaaaatcatgttctcgttcac

SEQ ID NO: 2300 - DNA, 878 bp, Zea mays
  Clone ID: 700208991_FLI
cgcctcaggtacgcaaggcggccgaacacgagcgcccgccttcgttcttgcctgcgctgcccctctcctcgccgtttattcgggctcctacctcttgttacaacttgcgcggtgggggcagtgaggcagcaagacgtgaggtccaggatgatgaacaacaacagtggcggcggtgccggaggccctggagggggcatgggtacgggagtgggtggagggggggacgggcggcacgacgacgaggctgcgctcaccgagttcctctcatccctcatggactacacccccacgattcccgacgagctggtggagcactacctcggccgcagcgggttccactgccccgacctgcgcctaacgagactggttgctgtagccacccagaagttcctatcagacattgctagcgattctcttcagcactgcaaggccagggtagcagcacctatcaaagacaataagagcaaacagccgaaggatagacgtcttgtattaaccatggatgatctttctaaagctttgcgcgagcacggcgtgaacttgaaacacgcggagtacttcgcagacagcccttcagctggaatggctccttcgaccagagaggagtagactggattaggccaacttgtacggaactagggagggatcgcgtggaatggatgggcatgttggcattcttgcccgatcagatcgatgggatgtattactattaagtactgctactatgactagtatatttctcaattaccattgtcactgagagaatccagacacaagtcgttttgcccatgcgcttttatttgtacaaactgtcaatcatctgtaaccctatggggcccaaggatgattgggcaaacatcatgagttttttgttttct

SEQ ID NO: 2301 - DNA, 1313 bp, Zea mays
  Clone ID: 700209004_FLI
agcatctagctgccataacatgatagggttgcagagtttacatgcatccagcaccagtcatgtagcaccgttgaacatgaaacgcgagtgagcaccaaagaaatgttctaaacttctaagagggcatttttgacatctgacaacagcccactgtaggctaagagaccaggtcgtcctaccgttagcatccttcgtccggttctttaggattcagcaacaaccttggatcatgccggcacatccattgcactatgggaccagtacatgcgtttatcagtctatggagtccaaacagaggttcaggtccagaaaaggttaagatgctactcttttcgtttagccacaaagagtttgctcatgtcttcagtaacaacattgctccttccacgaagctgcggtggaattagggcgttccctgcagcacttcctatgccttgggattgtgaatgcatcctcgattttgaccaggattctgaaaccggaaggaagctgcatgactgcttcatgcgtgcttgaacatcttcatgctgagccagtgcaggtagacagccacgattattacaggaagcgtcaacggcacaagcagacagtaataccagtcgttttggatggcggccaggaatccattttgatgtggcggaagcagcttggacacgacggcaacgtagaagaaacacacgaacaatgtgagcccaaaggcaatgaacgccgagccgatcagctgatcggtagaaaaatgcatctctggatttcccagtcttgtcggtctctgatgcgcagacccggtgggagcggacacaatagtaaaccctgagggcatgttcgtttgcaatggattacttccctaggggcatgttcggtttacaggtttttattccagagaggtattgaatccaggagggattgagttaatcccctctttgtcacttgaaccccttgggggtataatcccttttggctataatccctggctcaaactgttgttcggttaatctagagtattgtcaagtaccagtcacgctgccaatacataacacttcagctccatagagacctgcagagcggtggaggacggccggcgtctggctctggcggctggcggcccacgtttatggaaggaaaggagaagaacattgctgtcattgttggcacagtcacagatgacaaaaggatccaggaggttccagcaatgaaggttactgccctgaggttcacggagacagcaagggccaggattgtcaatgctggtggcgagtgcctcacatttgaccagcttgctcttcgtgcctcactgcctcacgggcattcttggg

SEQ ID NO: 2302 - DNA, 720 bp, Zea mays
  Clone ID: 700209022_FLI
tttgagtgtcctgaacatgaaaaatactatttgaagtcttcaatatggaacaatcttcatccaaaccaagttatcggtcaacctgcagctatcaaggaaattgattgcttgacagccactgtcgatgagatccgagaagtcagagcacaagtcacattgccaatcagaatggaagctagattatcagcactggctggatggtttgatgttcattttcgaggtagtgctcaaaaccctggggtggaggaagttgaattaactacagcgccagatgagcatggtggaactcattggggtcagcaggtattcttgctgactccacctctgagtgtgactaaaggagacaacgttaacgtttccttctcgatggttcgctcgaaggaaaatcatcggcttatggatatggagttcacatatgaattgcacgagttatctggcaggaagcacccagcagtcaaaaccaagatgtacttagagtagaacaagatggaaagacggaacctcacgacgccgttgctgaaacctttgctcagaagctgagcatgtagtgtgcttgttacacccatgatgggtacattgagaccatttatgttgtattagtaatatattgtttgattgcccaattaacggggtgagccattgtttcatcacaacatcgatgtgttagcagataaccacatcgccgttttaagcaaacattgagtgcggaattttgttgtc

SEQ ID NO: 2303 - DNA, 643 bp, Zea mays
  Clone ID: 700209073_FLI
ggaagtgtcgatgtgaaggaagcactgcgccttcaaaaggaaaacaactttgtcattcttgatgtcaggccaggtggatgagcctctttaaactctgcttctggcctgacatcaagaatgacaaagtttaaagaggctcatccacctggcgccatcaatgtacaaatatacagattaatcaaggaatggacagcgtgggatattgcgaggcgtgcagcgtttgcgttcttcggcatatttgctggaacagaagagaatcctgagttcatacagagtgttgatacgaaggttgggaaagatgcgaagataattgtggcatgctctacaggagggacactgaagccaacgcaaaatttccctgatgggaagcaatctcggtccctgatagctgcgtacctgttggtcctgaatggctacagcaacgtgtaccatctggaaggaggactttacacatggttcaaagaaggactaccagctgttgcaggagaagagtaagagagacattacgacatagtgttcgcatgctggagagagtggagagtggagactagagttgcgaggacttgtagtgatgtgcttgcttcacagtcacagggttgtcgattgttgtgtacggattgagatgtcgaagatttctcctgcc

SEQ ID NO: 2304 - DNA, 1379 bp, Zea mays
  Clone ID: 700209082_FLI
ggcctttatatgctgcatgtgtgcttttgcaatgcgccgctgcttggtagttaccaaagcagctggccggcatggtggagaaggcgtcgatcgaggacgtgatgaaggtgctgatggcgtcgcggaagcaggacctgcaccagctgtggaccacgtgctcccacctcgtggccaagtccgggctgccgccggaggtgctcgccaagcacctccccatggacgtcgtgtccaagatcgacgagctccgcctcaagtcctcgctgtcccgccgctcgccgttcctcgcgcaccaccaccacccggcaccggggggcggcatggaggcctcgtccgcggccgacatcgacgaccaccacaagatccggcgcatgcggcgcgcgctcgactcctccgacgtggagctcgtgaagctcatggtgatgggcgaggggctgaacctggacgaggcgctggcgctgcactacgccgtggagaactgcagccgggaggtggtgaaggcgctgctggagctgggcgccgccgacgtgaaccacaccgcgggccccgccgggaagacgccgctccacgtggccgccgagatggtgtgccccgacatggtcgccgtgcttctcgaccaccacgccgaccccaacgtgcgcaccgtcgagggcgtgacgccgctggacatcctccgcacgctcacctccgacctcctcttcaagggcgccgtgccggggctcgcgcacatcgagcccaacaagctccggctctgcctcgagctcgtgcagtcggcggccatggtcatgtcccgcgaggacgcgcacacggcggtcaacgccgcgcccatgtacggcgagccttccggcggcggcggctgcggcgtgtacagtgcgagcggcaccagcagcacgagcttggtgaacctgaacctggacaacaggatggtgtacctgaacctagggatggacgcgcagttcggcaagatgggcgacggcgatgacggcgggggcagggggccgtcttctttgttctccccgcatggctaccattgacaagctggagcggccggctgctgctctactatatatctccttgtaagcttagaactaattaattacatgttgttattcatatccacattacaggagatgaagaagatgatgattggaaagatggcgagacgatcctttaattttttgcactctatctatatatcatcatgtgactcttttagcagctagagacgattagagagagacagagagatcatgcatgcaaagtgatgcatcacaagagcttgggtcgatctttattggtgagttgtctagtctattgatggaggtgttgttttggaaattgtaagaggtgctaagaggtaaaaaaatgtttttttggttggt

SEQ ID NO: 2305 - DNA, 1139 bp, Zea mays
  Clone ID: 700209150_FLI
gcgagcgtgaaggttttcgggtcacccacctcggcggaggtcgcccgcgtgctcatgtgcctcttcgagaaggaggtggagttccagctgatccgcgtcgacgcctaccgcggcaccaagcgcatgccccagtacctcaagctgcagccgcaaggcgaggcgctcaccttcgaggacgagagcctcaccctctccgactccagggggatcctccgccacatctcccacaagtacgcgaagcagggcaacccgtacctgattggcacgggcgcgctggagcgggcgtccatcgagcagtggctgcagacggaggcgcagagcttcgacgcgcccagcgccgagatggtctacagcctcgccttcctgccgcccaccctgcccaagcagaacgacaacggcaacggcggcgcgttcaacgccagggacgccaccgtaggcagcaacgccgacgcgtccagcggcaagcgcggtgtggccgggtcacagccggcggcgagccagaccaaggtgagcgcgcagaaggaggaggagatgctgaagctgttcgagcagaggaagaaggacctggagaagctgctggacatctacgagcagcgcctggaggaggccacgttcctggccggcgacaacttcaccatcgccgacctgtcgcacctgccctacgcggaccacctcgtctccgacccgcgctcccgccgcatgttcgagtcccgcaagaacgtcagcaggtggtggcacgacgtctccggccgcgacacctggaagtacgtcaagaccctgcagcgcccgccgtccacgtccaccgacgccagcgccaagaacggccagctgggccagcagcagcacctgccgtcgtccaccgacggccacggcgtgaagacccaacggctggtccagaacgagcggcacttctagctgttgccgtcccttcccgccgacgaataaactacctgcgccgccgccaccgccgccatccatcaacatggttccttgtgctgttcgtgtcgttttcatacgtcatacgtgtcttgctgcttttgaagctccgttcccgggtgcagggacctacgagtccattccgtcgtttgctgattctgttcgtcgtgtaataaaatgaaaaccccaccccgttttgaatg

SEQ ID NO: 2306 - DNA, 1088 bp, Zea mays
  Clone ID: 700209152_FLI
catgagcgccgaggcgattcggagcgcgttcggcgcggccgaggaggagttccataggcaggtgaggcaggagtggaggagccggccgcggctcgctgccgtgggctcctgctgcctgctcggggccatctccggggacacgctgtacgtggccaacgccggcgattcccgcgccgtgctcggccgccgagtgcccggcggcggggcggccgtcgccgagcggctctccgccgagcacaacgcggcgtgcgaggaggtgcggcgcgagctcgccgcgctcaaccccgacgacgcgcagatcgttgtgcacgccaggggagcctggagggtcaaggggataattcaggtgtcgagatccattggcgatttttatctcaagaaaccggagtatagcctggaccccttgttccggcaagttggggcccctattgcgctgaagaggccagctctcagcgctgaaccatcggttcaagtacgcaagctgaaaccaaacgacctgttcctgatatttgcttcagatggcctttgggagcacctcagcgacgatgctgcggtgcagattgtcttcaagaatccgagaactgggatagccagcagactggtgaaggctgccttgaaggaagcgaccaggaagagggaggtcaggtaccgtgatctgaggacgatcgagagaggggtgaggcggcatttccacgacgacatcagcgtcgtcgtggtctacctcgatggccaccgcgagcgtcgccacaccagggtcgttgactcgagcagcaactgcaccagtgcgcccgtcgacatccactcctccaactcccgctagtttccggagccccttgcaacgcgagctgaactctgggtgggaggtgaggtgggtgcagccgtagccatcggaatcggaacaagtcgatatgtacataggtaggactgggtgcgtggcattttgatgccggagaagatcatttggtctcgaaactacttagcacaagtggttaatgactgcatttttcttgtttctttttgtctgaaaccagcagcaagcccgtccattggatcggacttatttttaaggtaagaaatagttgatgacg

SEQ ID NO: 2307 - DNA, 1660 bp, Zea mays
  Clone ID: 700209195_FLI
tgctgtcagcggtcgaatgcgggagcttcatgatgaacatcatatgaagtctttgggtctacaggtttcctctcctggatatgacagacaagctgttgctgatcatgcaaacaatcttgcctcgaaaatccgtatcaacttgactaactcaatgaaagctctaggagtggatatattgacaggtgttggcactattgtgggaaagcaaaaggtacgatatggaaaagctggtttcccagataaagaaatcactgccaggaacatcataattgccactggttcagttccttttgttccgaaagggattgagattgatgggaaaactgtatttactagtgatcatgcactgaaacttgagtcggttccagactggatagctattgttggaagtgggtacattggacttgagttcagtgatgtatacacagctcttggaagtgaggttacttttgttgaagctcttgaccagctgatgcctggatttgatcctgaaattgcaaaattagcccagagagttcttatcaatcctcggaaaattgactatcacactggtgtttttgcaagcaagattactcctgcaaaggatggaaaacctgtgctcatcgagcttattgatgcaaagacaaaggagcacaaagaaacccttgaggttgacgcagcccttatagctacaggaagggcgccattcaccaaagggcttggcttggaaaacatcaatgttgttacacaacgtggttttgtgcctgttgatgaacggatgcgagtcatggatgcagatggcaatgtggtacccaatttatattgcattggagatgccaatggcaagctcatgcttgcccatgctgccagtgcacaaggaatttcagttgttgaacaaatatctggaaaggatcacatcctaaatcatttaagcatcccagcagcatgtttcacccatccagagattagtatggttggactgacagagccacaagccagagagaaggcagataaagaaggatttgagataaatgttgtgaagactagctttaaggctaacactaaagctttggcagaaaatgaaggagatgggattgctaagttgatttaccgacctgacacgggtgaaattcttggggttcacattttgggtttgcatgctgctgatctcattcacgaggcatcaaatgccatcgccctaggaactcgtgtgcaagacatcaagtttgctgttcacgcacaccctacattgtctgaggtcctggatgaactcttcaaagcagccaaggttaattccggtgtttctcattctgtaaatgaaccagttgcagcctagagaaaggccggatagcaagccaaggcagccaccccaaccactcctgaaggtcctcagcttcgtcacgaccctgttttcttccccaaaacgagattgacaacggtaacggggagggtgttgttgtaggcagttgctgtaggttacaaatttgaggaagaaattcatcagtgaatacaagcacacaaatgtttcttttttgggtccagattgttaaaagggtcttttttttacggtggggtgggtttttgttggcttcgttatttgcatatttgttgttggttgccctgtaagatgaagtgccgaggctagctcagctagtttgaaataattcatgtttcaaaactc

SEQ ID NO: 2308 - DNA, 834 bp, Zea mays
  Clone ID: 700209246_FLI
ggtctagctaggactagtaagtagcataccattaccatcctccgcgcggctagctccgactcgctttcatccatacgattgcccggagctcaagccctgagctgagccgccagagcgcgcgcgatcatcgcttgagggaaaagcagagtggagtggccgagatgaaggtgcagtgcgacgtgtgcgcggccgaggcggccgaggtgttctgctgcgccgacgaggcggcgctgtgcgacgcgtgcgaccgccgcgtgcaccgcgccaacaagctcgccggcaagcaccgccgcttctcgctgctcagcccggcgccaccgccgccgccgccgctctgcgacatctgccaggttcactcgatcatccatcccccgatccccgtgcaaaataaatctcttcggacggggttctttccgattgttcagcctgcgaggtgtgccctgcctgcctctgatcgatatgcatgcaggacaagcgggggctcctgttctgcaaggaggaccgcgccatcctgtgccgcgactgcgacgtgtcggtgcacacggccagcgacctgaccatgcgccacgcccggttcctgctcacgggcgtccgcctctccgccgagcccgccgccgcgtgcccggcgccggaggatgaggaggaggaggacgacgagaacagcagcggcagcttctgctgcagcgccggcgacgcagccgcacatcctcctcctcttccgtcgtcggcgcccgccaccagccacgggagcgacagcagcagcatctccgagtacctcaccaagacgctgcccgggtggcacgtcgaggacttcctggtggacgaggcggccgc

SEQ ID NO: 2309 - DNA, 479 bp, Zea mays
  Clone ID: 700209286_FLI
gaatggcagggtggcattcctcatcgcggaggcgtgcctgctggcaggatcagtgcgcaacgcgtaccacacccggtacaggggcatattctacggcgactcgctctcatgtgagacggtgcggaagggcgtgttcgcggctggtgcggccttcaccttcttcacggccatcctgggcgaggtgtactacctcagctactccaagtcccgggacgccgccggtggtgccccctacggcggctccagcattggcatgggcccttacaactaactaaaggccggccccggtcgcttcatgctggaggaatgcagcagtgttctttttgacgttaccttagtagggacacggtgtaattggttattggatccgctgctttttgtttaggttcttgtatgaagttactacttggttgggctgtatactgtttggattgttgggttggaccctggacatggatatacacgtatcgtagtatgct

SEQ ID NO: 2310 - DNA, 1183 bp, Zea mays
  Clone ID: 700209311_FLI
cacgtgcaaggctgtcaaatatcctcaaaaggcatgaagatctgaaagagcgcctttcacgggattctgataagctcatttttgagcgcctacagaaagaatttgaggctgcacgggctgctcaaaccgaagagatatcaataaatgatgatgagtggaatgatggtttactggcaaccatccgtgagaagaccaggttcatatggaggctgataggaaggccatgtccaaccaagtaaatgttccagcagatctttcatttcaatcgaggactacatataggattagaaataaggttatctattgcttggatggagctaggattggcatacagtatgagacattctttgctggagagccttgtgaaatttttcattgtgttttggaaagcaagtcattcctggaaaagatgattatgattgaacacaccttacctttctttctgcctgtacgtgaattagaaagtgatctgttgtcatctaattcaattaaattcattgatcatcttgaagaaattttacaggcttatattgacaggagagagcaggttcgtcttatcaaggagctctacgggaaccaaattggcgagctgttccatagtcttccttataatatgatagagtttgtattggaggattttgagtgcaaggttacaatcagtatccgatattcggatctactgcagaccctgccgagtcaggcaagggtcttggcttggccacttcgctcggccaagaaaatatctacaagaagcagcagtgcatcagctgcgcaaccagtaccctttcacctttcatatgccgaggaagcactcaaaaccttgtgtctaccagaagcatacgcagacattgtgctggagctaccccatgctttgaagaggattttatcctctcgggacagtgactaaatcgtgacctcaagatgtccagttttgttgtgcataagattcacatctcaatcgtggggcatgtttttgaagatattgttcagaatcttgtggtagtatagcctgcagttgtggactgcaattcctgtgaaagcaaggcagacatttgcgtgggccgctcgaaatattccggctacagttcctgttaaaagaatcaaaatcctaggaaggccttatggtcgaggcataatcttgccaactgctgtccttgtccttgatgtgtgctccttttttttc

SEQ ID NO: 2311 - DNA, 2624 bp, Zea mays
  Clone ID: 700209337_FLI
gttgacgcctcgcctcgcctcgccttgctgccccctcctcccgttctcgaacaggtcaagccgcgcctcctctcgcctgcctgcgtccttgctcttcctcctcctccctttgcccgtcgtccgctccgcttcgttgtctcatccgctgccgttctagcaagcggggcagcgtcgcgcctcggcctgatgctccaccacgctccagtccacagcctccccggtccttctcgttcccgttgagagcggcggcttgcccggcccccgggtcctcttcacctcacctaaccttgtttctagtttcggtccgtcggttggtgcctcgtcggctgcctctcgctgcttggcccgtttcttcctggggtcgcgggcctggagtacacaagtatataatcttcccggccgtcgtcttctctttctcgacctgcctctcttcgcattggcccgttcccgttcctcgctccctgctgctccttccgagacagactgcctgggatcgaagcacacgataggagagacctcctctgtcgtctgtgcctgggtgagaggtcgggtggtggtggcagtgcttggatgcttcacgcgaggccttggatggtggatgctgcgtgctgctggtctctgcgctgcgcctgaggtactctagagattagtttggccgcatcctccgtatcttctacttcttgaccagggatggagcttgtatacatggaaaggagaaacggatcgtacgacgatggcgcggttccagagttcagtggaaggggggctggaggggatcaggatcaggacccgcccgctgctgcatccgaggtccagtctgactcgcgtcagacaccggacgagaagaagagcaagggctgccaatcatgccgtgacccattctgttcatgcagcggcggcacgccccactcggaactgttccccccacatcccgccaagatgatgatcctggagttcctcatcgcgagcctcaggcacccgacaagaacccacaacgtcagtgatctcgacgacctgatcgccgacggggtcagccaagggagcgtggtaaacctcggcccttctgagaagaaggtgctggaatctctgcacgccatggtaaacgccaagacgaggccgaagagcccgtcgccgttcatggcgggatctaagctgaggaaaatccggtccaagtcccacgtcataacgcagtcggaaatactgaagctcatctctcctgagacgtgggaagcctcctccttccctggggcgtctccgatgatcggcggaggcacggctgaggacggcgtccatgggaacaagccgccgccgccgtgctgctcgtctgtgagctcaaaccagcatgttctgtcacggtgcccgtcgtccctcagcgcatgccttctacagtgcatatggaaggatggcctgcctcattttgagctgtcactggacgatcatcccattgcggtgtacgctgcaagtccagtcagggtgctggagaaggacagggccttcgactacgtctacatgatccattcgggagagcaaggaagaaaagactggatgggccactcgagcaacgtgtccagacttgtgggcaaggtgaaggtgtcaagttctcttgttcttaacccagacaagtcaggtcttttggaaaccgagtttgttctgtatggttctccggacgactatcttaggcagatgcgcagtccctacagcgtgccgaaagggaagggccttgtcaggagggtgacagagatcatgagagcaggcaatgtttccgctagcccgagacatccctggaagctgggcaaatcttcctctcatcagttcgacgacttggctggagtacttgaaggtgaaatgatcagtgctggaggatcagacctggtgagtctcaaggccgacgatctgccgtccaaccaagaattagcagcgattgtggtgagggaacagcggcgcagacgacggaaagagcctgtttcgggtggctggggcctcaagttccttgagaaagcaggactgaatcgcccataaggcactgaagaaactgatgttcagaacagtgatggtgccacacattgtgtaactgttgttgtccccagaggctaccacggcggcgtggtatcaaagagtagtcgcccgtcaggcctcgtcgagagatggagatctggaggacgctgtgactgcggcggatgggatcttggctgccccatcagagtgctcaacggtgatggatgtggctccttgcctgaaggagagtcacgggacagaaggtcggtagagatatcgatcaagggtgcaaagaatgagacaatgttgaagctcgtgaatatcacggaggacttgtacatcctctacttcgactcgagtatttcaccattgcagtgcttctcaacagggatagcgattgtgcacagccgagcgccagagctttgccccaaactgtgaattgcgcacagccaggcacgcacccgagctttgccccccaaactgtgaattgcaaagcttggtgtagctgaattacaaagattcgtgaagcactatgtacatgtagatagtagaatgggaataattcttgttatttttaacttatataattttgagagagaaaagcaggcagctgttttcagactgctttt

SEQ ID NO: 2312 - DNA, 1141 bp, Zea mays
  Clone ID: 700209344_FLI
ggcgaggggagccgagcgggcaaccggcggcgacagacatggcggagcagcacaaggaggagtcgggcgtgacagtgctggacaagatctccgacaagctccacgggcgcgggggcggctcgtcttcgtcgtcggactcggacgacgagcgctcgtcggcgacggccgccgtgaaggccaagatctaccgcatcttcgggcgcgagaagcccgtgcactccgtcctcggcggcggcaagccggccgatctgtttctatggaggaacaagaggatctctggtggggtgctcgcaggcgcaactgccttctggctgctgtttgaggtcatggattaccacctcctcaccctgctatgccactgcctcatcctcaccctggccatcctgttcctctggtccaatgccacgattttcatcaacaagtctcctcctaacatccccgaggtgaagatcccagatgacctggctgtgaatgttgcacgttccctgagatatgagatcaacaggggttttgctaccttgagggagattggccaaggccatgacctcaagaaatttctgattgtgattgcaggactgtggatcctttctgttcttgggagctgctgcaatttcctcaccttgtcttacatagtttttatggtactgtacactgtaccggtcctgtatgagaaacatgaggataaggttgatgcttttggtgagaaggccatggtcgagctgaagaggtactacgccatcttcgacgagaaatgcctatcaaagattccgaagggcccattaaaagacaagaagcaacattagaagcttagaatcagataagggtctgcggtgatttatcatctcttttgaccattattcgtcggttttggtggatggatgtgattccatgtctaaatacctggacgtgctctagtgttttagtgtggtcagtagcaatgttctaaattatctgagattacgctgaatcatgttctgaagtccacgtttaacgttgctctccctatcctttggaagtggcaatttcctcaatgtctgtaatatatctagtctagtgctatttcttaatctgacctagcgtcatgatgaacccttcttggatatttatttatttgtgccactggacatggtaattagagagc

SEQ ID NO: 2313 - DNA, 661 bp, Zea mays
  Clone ID: 700209373_FLI
ggggccgcgcgatcgtcgacggccgctccgcccggaatgccgcggcggagcagccggcgccggtgcgcgtcgacgaggacaaggaggcggaggtgccggaggccgtatttgacagtggccgcccggctacggaggaggccttgttctcggaggatgaggaggaggaagaagaggacgcaccgccggtggccccacctccccctccaccaccagtcatcgccgtgcctgtatctgagaagcccgaggcatcaaggcaacaacagagtgctgagcaagcaggcacatcgaaagacacacagcctgagcaaagctccgagagggatgcaccggctcagcagggaggtcaaaagagaccgcggaccgtcgaaggcgctggagaaggcacggcagaccttgagagcaagctggtcgagatccttgaccggaacagccggttggtggctgcacagttggaggcgcagaaccagaactgcgagcttgacagagagcagaggaaagaccaagctaacagcctagttgtcgtgctcggcaggctggccgatgcccttggcaggatcgccgataagctatagtcagtcacctaggtgtatatgttgacagaaataattacagcgggaaatgtaagtgaatgtacagattggtatagggctattggcattcg

SEQ ID NO: 2314 - DNA, 633 bp, Zea mays
  Clone ID: 700209388_FLI
gcgacgggcgggcaggccacgggcaccttcgggctgacgggcgtgtcggtgtgggaggcgctggtgctggagatcgtgatgaccttcgggctggtgtacacggtgtacgccacggcggtggacccgaagaagggcagcctgggcaccatcgcccccattgccatcggcttcatcgtgggggccaacatcctggtgggcggcgccttcgacggcgcgtccatgaaccccgccgtgtccttcggccccgccctcgtcagctgggagtggggctaccagtgggtgtactgggtcgggcccctcatcggcggcggcctcgccggcgtcatctacgagctgctcttcatctcccacacccacgagcagctcccctccaccgactactaaaagccgaagccgaccgacctaggggtgcgcagcgcagctagcgcatccagctctctctccccgctcgccgccgtttagtttctctcgtgcacgtgcatgcatcgtcgactgtctcaggccgccgctgcgccggcgccgctcgcatcgtttgcttccttggaccagcagtcgtcgccgtcaggctgaactgcttgtaaccgtaaattccggacccgtttgcttctgtaagatttgtgcatttgcctgagt

SEQ ID NO: 2315 - DNA, 1369 bp, Zea mays
  Clone ID: 700209436_FLI
aaaatgctgcaagaagagcagaacgctctcgaaatcttgtttcagtcccctttttaaatttttttgttctttttttggtatcagagatgagccagcagctccctgcgaacctagtggagatcatggagcagagaatgaagttgatcgagcagaggagcgcgtacctccaagagcaaatcaaccagacagccagccgcctcgccggaagagtactcgagggctaacaaggagttccgcaagctggagagcaccatggagttgatcaaagacctgagatcgaaacaggaggaaatcgagggtctcaaatctttggtagcaaatgatcatgaagagaaagacatgcgtgagatggcagaagaggagcttcttgtggctgtcgaggaggagaaacgattgcagcatgaactgtttagatcgctgcttccaaaggatgaagcagatgaaaaggattgcatattggaggtgcgggcaggaactggaggagaagaggcttctttgtttgcaatggatatatttagaatgtacgagaaatatgcccagaagaatgggtggaaatttgatgtcattgacataatggagtctgctgtgaaaggatacaaggaagctagtggaactatatcaggtcctggggcgttcggcaaactaaagtttgagagtggcatccatagagttcagcgagtgccagcgactgagaaatctggacgaatgcacactagtgctgtatcagttgctgttcttccgcaagctgatgaggttgatgtccagctgcgaaatgaggacctgagaattgatacctacagatcaggtggctctggaggtcagtctgtcaatacaaccgatagtgctgttaggataactcatattccaaccggaacagtggttgcaatccaagatgagagatcacagcacatgaacaaggccaaagctctgaaagttctccgagcgcgactgtatgagttggagaggcgtagactacacatggacaggtcaaagcttcgatcagaacagattggaagcggtgacaggtctgagcgaatcagaacatacaacttcccacagggccgtgtcaccgaccatcgcgttggagtcacacaccactccatagcagatgtcatggagggggagagcctggacatgttcgttgatgcgctcctgcttcaagaagagatggacgccattgcttcatttggcgcatagctagattaaaccttgcaacattgattcacgtcatggacaaaatagagatcagcgaaaaacaataccgagcagtccactagtgaattgcctgtgcattgtgtcctgttttggcgtgtgctagttttacataatgctgaatttttaatgtaggcatgtgttataattgttgccg

SEQ ID NO: 2316 - DNA, 900 bp, Zea mays
  Clone ID: 700209437_FLI
ccggctccccttcttcctccgcatgcgcccacctcctgcgccgccccgggtcactgccaggtaggccacaccatgcagccgccgcagtcgctggtgtcccgcgcgcgcaccgcgatccactccgccgccgcccgcgtgctcaccgacatcaaggccgacctccgagatgccgaaggatccggcgggcgtagccgggcgccgtcgccgaggacgtctctggatcgggaggccgccgaagcgagcgccacggggcgggagccggacgtgaagccgccgtcgccgcgtgatgaggtcctagaaataagccccccagagaacgaggattcctcaagcataccaactgaatcaacctgttcaacaaaactgacctttcctccagcttcaatagttaaacaactggtgtctgccattgaaaatgggaaaagtttcaagtcaatgagtgatatgaggtatactggagaacaattgctgaaagataagggaggtttgagcttgtctgttgttaaatcacttgttcgacgtgacaaggaagaaagatcgagctccgatttttttggtgatgaagaaactcaatctttgatgtactccttgttcaaattagaggaacagttttccttcgaagcaagtcaatgtttccctgaattggttcattcaagatctgtgtccaaggatctacatggtgcaccacctggaagttttattcaccatttagcagtggttattggcagcattagttctgtgcacaagatggcatttttttggcagtcagttgttcttgagttgaggaaactatggtctgattggcaacctgtgcctcgtatgccactggaggttgctccagatttgaattcttgtttactacatcaggaaatccaagttgtaaattgctgcattgccagg

SEQ ID NO: 2317 - DNA, 506 bp, Zea mays
  Clone ID: 700209481_FLI
cgtcaccatgccaagcaacggcgacgtgcctttcacccacgccaacgtcagccacgccgcgcacgacttcggctaccgccccaccacctccctcgaggccggcctccgccacttcgtcgactggttcgtcagctactacaagctcgacgccaagatcgccaagcccgccgccgccgccgacgacgacaagcccgcgaaaaagaagaagaagaacaaagccatgtcggcgtcgtcgtgatcgtacgttcatcgatcaagcacgggcacacagaaacagagcaccgccaccgccaagcacagtcaccaagtgtgtattctctagctagttctcggaggcctttttggttttttgtctgtaaccatgtattgttgaagccgtcgctacatacttgctcctcctccttatgctgatagtgcttagtaggaaggaaggaataatgatgcaaataattgttgcattcatattggtacgtagatatatatatatataaaagattgggagaggt

SEQ ID NO: 2318 - DNA, 1353 bp, Zea mays
  Clone ID: 700209501_FLI
ctctgatctccctctcgcgccgccgcccaccatgttttttttgaaggatccgccgcccaccatgtcgccgccgcagccaccacacccggtgccccgagagacggtggccagcgctgtcgcttccctgacaacgtggatgaagaagcgcgctgcggaggcgcgcccgaacctcctcgccgacgagcgcgacgacatcgtggtcctccagctctcgctacgccgcatccccgcctcgcgcagcaccaagccgcgcctcctcccgatgccacatcccgttgttgggcacgacggcgcctccgtctgcgtcatctcggacgaccgcaccaagtcgcggtccccttccgcctccgacctccacgcgtccatgtcgctccaccgtttccccgtctccgaggtcatcccgctctccacgctccgcacggattaccgcccgtacgagtcgcggcgccgcctcgcagcctcccacgacctcttcgtcgccgaccgcgccatcctccctctgctgccgcgcgtcctcgggaaggcgttctactccaccaagaaggctccgattggagtcgatttcacccgcatcggatggccggagcaggtccgcagggttcttggctctgcttttctgtacctgcggtcagggacctgctcggggattaaggtgggtaggctggacatggaggaggaggatatcgtggacaatgtgatggccgcggtggaggaggctgtcgagaaggtgccaaagaagtggggcaatgttagggcgctgcatctgaaggctgtggattcagttgccctaccaatttaccaggttgtgccggagttgggtatgaaaatcgaggtgcctgagcctgacattgttggatctggggaggtcatcgaaaagaaggcgaatgctggtgccgatggaagagaggtatttgccaatgtgagttccaagaggaagaggaataagaaggagcagattgaggagggtgttgtgatgcaggaagaagttcaggtggatacagagaaaaagaagaagacgaagagcatcatggttgatgatggccacgaggttggcaagaagggtagagtgaagggcaagcgtgctaccgaggagggaaagaagaggaagaagagcataaagggtgatcgtctgtaagaagatcaagggggagaaatcagatgacatgatcaagaagttgaggaccaaggtttatatgatgtaggcttcacttgagatggccaccaatcaattatactgcagaacttggtccctcaggtttttcttaagttttgttagcttagtagctcaaatgtatgggttatagaagtatggcaaaactgtttcttgttagtatggcaaatctgtttcttgtt

SEQ ID NO: 2319 - DNA, 1334 bp, Zea mays
  Clone ID: 700209522_FLI
ctcctccttcccttccttctctctcccaccctcctcactagctctatctagctgagtgaactgaacagctcactggctcgtcttagctaagctcagctgtaaagctaaggttcggattagctagcgtggtggccggagagtgtagcgagcggcgttcagctcaccgggggctgcttggtgagtgagggagctagctagcgtcgtcagagctccacgatgattacggggacggacttctaccacgtcatgacggccgtggtgccgctgtacgtggcgatgatcctggcgtacgggtcggtgcggtggtggcgcatcttctcgccggaccagtgctccgggatcaaccgcttcgtggcgctcttcgcggtgccgctgctgtccttccacttcatctccaccaacaacccctacaccatgaacctgcgcttcatcgccgccgacacgctgcagaagctcatggtgctggccatgctcaccgcgtggagccacctcagccgccggggcagcctggagtggaccatcacgctcttctccctctccacgctgcccaacacgctcgtcatgggcatccccctgctcaagggcatgtacggcgacttctccggcagcctcatggtgcagatcgtcgtgctccagtgcatcatctggtacacgctcatgctcttcatgttcgagtaccgcggcgcgcggatgctcatcaccgagcagttcccggacaacgccggggccatcgcctccatcgtcgtcgacccggacgtggtctccctcgacggccgcagggacgccatcgagacggaggccgaggtcaaggaggacggcaggatacacgtcaccgtgcgccgctccaacgcctcgcgctccgacatctactcgcgccgctccatgggcttctccagcaccacgccgcgccccagcaacctgaccaacgccgagatctactcgctgcagtcgtcgcgcaacccgaccccgcggggctccagcttcaaccacaacgacttctactccatggtcggccgcagctccaacttcggcgcggccgacgcgttcggcatccgcaccggcgccacgccgcgcccgtccaactacgaggacgacgcgtccaagcccaagtaccctctccccgtggtgaatgcgacgtccggggcggggcggcggcggcggcggctcactaccccgcgccgaacccggccgtggccgcggcgcccaagggcgccaggaaggcggcgacgaacgggcaggccaagggcgaggacctccacatgttcgtctggagctccagcgcgtcgcccgtgtcggacgtcttcggcggtggcgccccggactacaacgacgcc

SEQ ID NO: 2320 - DNA, 1917 bp, Zea mays
  Clone ID: 700209531_FLI
ttttgatgtgtctgagcattactggtttcctatgctagctggtttgtctgatttgactttggactctagaccagaagtcagacattgtgcactggaagtgttgtttgatttgttgaatgaaagaggacataagttctcttctcccttctgggagagtatttttcatcgtgtactatttccaatttttgatcatgtaaggcatgctgggagggatggactttcttcttctggggatgattggcttcgtgatactagcattcattcactgcagttaatctgcaaccttttcaatacattctataaggaggtatcctttatgcttccacctcttctcagtttgctgcttgaatgtgcgaaaaaaacagaccaaactgtcgtttcaattgctcttggcgctttagttcatctgattgaagttggtggtcaccagttcagtgatggtgattgggatacattattaaagagtattagggatgcatcatacacaacacagcctcttgaattgctcaattcattaagatttcagaaatcaaaacaccagcagttactttcaagagaagaaagcaatgcacaaggcaatagttaccttgacagccggggggaaccctccatcagtgacagtaataatggtgagcataatcatccagaggcaggtctgcaaactatcctggagaattcagaagatttaccgtcaccatcagggagaacacaacctgccgttttcccacgtggccaaagctttggacaaagaattatgggcaatatgatggataatattttggtcagaagtcttacgtccaaatcaaaaggtcgaacagatgatattgctccaccctcacctgtgaaggcccctgatgatgaggctgacaaggctgaagaggaagaaagccctatgatggaaactgtcaggagcaaatgtattacacagttactgctgcttggggcaattgagagcatacagaagaagtattggagcaggctaaaagctacacagcagatagcaataatggatatcttgctctcactcctagaatttgcttcttcatataactcaccttcaaatcttcggacgaggatgcaccatatacctccagaaagacctccactgaatcttctccggcaagaactagctggaacaacgatttatttagatatcctccataaatcaacagtggagcaggatgaaaaggactccattgaggaaacaaatggtttaaatgtggaatctgatgaccaggaaaagatcaagtacctagcagaagggaagctggtttctttttgcggacaggttttgaaagaggcgtctgatttacagcctagcactggggaggctgccagtgcagacatacatcgtgtattagacttacgggcacctgttattgttaaggttttgaaaggaatgtgcatcatggatgctcagatcttcaaaaggcacctgaaagagttctatccattaattaccaaacttatctgttgtgatcagatggatgttcgtggagcccttggtgatctctttagcaaacagcttactccactcatgtcctgaagtatggcagtatttcctccgttgcatatatcttgttggaatatattcgtcatcagcatttttgtgcaaacatggagcaccggtggtgcttgacatccttaaggcactgtctggtgcaagtgcaacagctattccgtaggaagttaagagcttggtcagcgggaacggcaactccctaggccgcatatttttggatgacgcaaggaagtagcttgattgtttcgcaccgtgttttccctagcgacttggatgacacaagggatgatgcttccattatacagtagagtagtgttggtgacatgtacgcattgttcaggacattgtacttgaggcctgttgttattttatggcaatagtagattatttgcggc

SEQ ID NO: 2321 - DNA, 966 bp, Zea mays
  Clone ID: 700209548_FLI
acccaccagccaccacgcacagcagcagctagctagctagcaaccacctcgatcgcacagaggccggaagctcagccgcgaattcggcaagcaacaaggagaagtcttgggttcctcgccacctctcgatcggccaggcggatccaagaagagatggagaagaaggcaaccaaattaaggactgaggcatggcatccaagggcgtcctcttcttggctctcaacctcctgttcttcacagtggccaacgcctgcggcagctgcccgaccccaacgcccccggtcgagccaccgccgccgcctcctgctaccccacccccttcatcctccagtgggaagtgcccgctgaacgcgctcaagttcggcgtgtgcgtcaatgcgctcggcctcgtcaaaggcgaggctggcaaggtaccagctgagccatgctgcaacctcatcaaaggccttgcagacttcgaggccgccgtctgcctctgcacggccatcaagggcaacgtcctcggcgtcgtcttcgatgtccctatcaagttcaatgccctcgtcaactactgtggcaagtgcgtgcccaagggctacatgtgtgcgtaagctccgcgcggttacacgctcgtagccgttcgcgtgcgtaattaagcatgcacctgcatggcacacatgtattgtgcgcctgctgatctctcctgtctcatttgtgcaccttaggttctacagtcctagaaccatattccaggcaaattcttgtcagttcacatgtattgtctcttgttgaatttctatttttttgttttattttgtatttgaacatttgtttataagagtttgccatcttcttctccaagaaaaagaggagtgctgcttctagtttttatatctacgagtcatgcatgtaatctgttgagagtcatgtgtttgtgtatgtaaaaccaagcacttgaatttaatatatacttattcgatttgtgct

SEQ ID NO: 2322 - DNA, 499 bp, Zea mays
  Clone ID: 700209552_FLI
gcgaccaacgaggcaacgaccaaacgtccaaacccttccccctccctagctccgtgctccagcgggagtccgcggcggcggtgaagatgattatcccagtgcgctgcttcacctgcggcaaggttattgggaacaagtgggatctatacctcgacctcctccaggccgactactcagaaggggatgctctggatgctttggaattgttccgctactgctgcaggcgaatgctcatgacacatgttgacctcattgagaagttgctcaactacaacaccctagagaagaccgagacaagttaagcgagcacatcatgctccaaaaacactactgtttggcagtatcatagagcttaggtagtatgttgtctcttctctatcagtagaaatgggttgtgagtgtgaacatgcttttcaaggacttttcatgcgacagtgcttgttgccacctatgcaacgatgttggatattttaagtgatataattgctaaaagaaagct

SEQ ID NO: 2323 - DNA, 1201 bp, Zea mays
  Clone ID: 700209575_FLI
tcctctcctctgtctctctctctttgagcctcctttttcaacctaacctttgacgctgtagctcgagagcaagcatagtgcctagtgcctaccagattctctccctgagcggctgagctctgccgatccgcgataggctcgcgccatgcagatgctctgcgacgtctgcgccgccgcgccggccgccgtgatctgctgcgccgacgaggccgcgctctgctccgcctgcgaccgccgcgtccaccgcgccaacaagctcgcccacaagcaccgccgcatccccctcgcccagccctctggcgacgaatccgacgccgacgccaagccgctctgcgacgtgtgtaaggagcggaggggcctcgtgttctgcgtggaggaccgcgccatcctgtgccccgactgcgacgaccccatccacagcgccaacgacctcaccgccaagcacacccgcttcctcctcgtcggggccaagctctccgccgcgctcgtcgacgcccaggcgccccactcccctgacgacgacgacaacgactgcggccgcggcaacggcgccgccgccgagcccgacgctgtccccgccgtctgcgcgcagggctcctgcgcggccaaggcctcgtctcttgagtccggtggcggcggcggcggcggcagcggcagcggcagcagcatctccgagtacctcaccaacatctgcccaggctggcgcgtcgacgacctcctctttgacgactcggcgttctcagcggcatcgaaggccgacagctgcgacgacgggcacgagcaggtgccgtccctggacgccgacctcttcgacgtggtggctggcgccggctggccggggaagcgcggcagcgcgtggtcaggagtcggagctctgggcttcgacaaggtgccggcctccgttgttgtcgtcccgacggcggccaagcaacagcaggggtgcgtgagggagaggacctgggactcggacagcgacagcgacgtgttcgcggtgccggagctcccgcaaccaccgcaggccaagaaggcgcggccggcgccggctccggcgccgactttctggtgcttctgagctgcactgtcccagtccggtccggccggcctgtgtgcactgtgtacttgccgtgacttctgtaaccagtgtgtgtgagcgagcttgctcgtgctttttacccatgtactgttgttactgcatacacac

SEQ ID NO: 2324 - DNA, 884 bp, Zea mays
  Clone ID: 700209590_FLI
accgccccgaggaggccaagggcggccgacgcccgttccacggtgccaaggagctcttcctctccgaccacttcgacacgcagagcgcccacaccattgagggcaagtgcatcgttcactccttcaagagctacaccaagctcgacaacgttggtccggaggacttctactgccgatttgactacaaggccgccaccggtgcattcacccccgaccgtgtcgccgtatattgcaagtgtgagatgccgtacaacccggatgacctcatggtgcagtgtgaaggatgcaaggactggttccatccgtcttgtatgggaatgaccattgagcaagcaaaaaagatagatcattacatgtgctcggattgtgctaaagaaaatggtgcaaagagaccctcaaattcatactcagtttcaccaaactcagattctaagattgaatcaaagaggcgcaagagataaatgctgcggcagaagcacccctggcaaaggagatgcggtatttatggtgtcagctcctcattactggtgcatatttgagatgttgatgtgtacactgcgagagaagagccaagccaattgtagggcaaaacctatttgacttatcattcttctgtgtattctgcctagacattagtgtgatgagtaggtgagttccccgttgcggcgtgtgcatgatcagctgctggaggcgggatgtcgggaaatgctagaattatgctgactcttgtcgatgtaagtgtatcgtgtgtgtgtgttaacatatgcactggctggaaacgttcccatgtgtgaatggaggatgctgatgatagcttgactgttgtttcatattcagttagatgtttgcggagagttgaaataatgagtttgatcttgaacttg

SEQ ID NO: 2325 - DNA, 989 bp, Zea mays
  Clone ID: 700209591_FLI
gcgaccctgcgccggagcccatgtccggctaccgcaaccgggagctcgagactctgttcaccatgtaccagatactcgagtcctggctccgcgtcgcgtcgcagctgctcacccgcctcgacgagcggatcgaagacaagtgctgggaggcggcggccggcgactgctggatcctggagcgcgtgtggaagctgctcgcggacgtcgaggacctccacctgctgatggacccggacgagttcctacggctcaagagccagctcgccgtacgagcggcgccggggtctgagtccgcgtccttctgtttccggtccacggcgctcctgcacgtcgctagcgccactagggacctcaagaagcgtgtgccctgggtgctcggtgtcgaggcggaccccagcggcggcccacgggtgcaggaggcggccatgaagctgtaccacagccgtaggcgcggtgagggcgaggaggcaggcaaggtggacctgctccagccttccagcggtggagtggccgtgagagcattcttcttcgggtaccggcagctggtggcggcggtgatgggcacggcggaggcgtcgggcaaccgggcgctgttcgtgccggcggaggagatggatccgctcgcccaaatgttcctggagccgccatactaccctagcctggacgccgccaagacgtttctagcggattactgggttcagcttcagcagatggcggaggcctctgctccgtcaagacaaagctgaaacggcgaaatggcacggctgagccaccgaatcgcgcagttttgcaggactgaagatactatgcatgcatttcgttggggccttttgcccttgtggtgaatggtgatagagtgattcatttctatagcgatcatgtacttgcagtacatgtcgcactagaatactagattctcttactatcgttgtgcactgcgttgtacgtgttgtgttctacgtagatatagattgattcagttagatgtc

SEQ ID NO: 2326 - DNA, 1724 bp, Zea mays
  Clone ID: 700209610_FLI
gtcgtgggcgtggccgtcggcggcctcgtgctgctgctgctcgccagcttcatctgcctctgctgtctccgcaagaagcgccgccgcgcgccgccgccgcctcagcactacggatacccgccgcccccgccgccgtacaaggaggatccatacggtggaacgtaccagagttggcagcaaaatgcgcctcctgctccaccccctgaacatgtggtcaagatgcacccttcgcctccgccagcatatgccaatcgtcctccacagccgccagcgccgccaccaccagcgatgctaaatagtagtggtggatctggttctaattactctggtggcgagatcctacctccaccatcccctggtgctgttcttggcttctcgaagagcacattcacctacgaagagttgttgagggctactgatggattctcggatgctaatctccttggacaaggtggttttggctatgttcacagaggattgctgcctaatggcaaagagattgctgtaaaacaactgaaactgggaagtggccagggcgagcgtgagttccaggctgaggttgagattatcagccgagtacatcacaaacaccttgtgtctttggttggctattgcatttctggaggcaagaggctgcttgtctatgagtttgtccccaataacacattggaattccacttacatgcgaaagatcgaccaacaatggagtggcctgctagattaaagatcagtttgggtgctgccaagggtttagcttatcttcatgaagactgccatccaaagatcatccatcgtgacataaaggcatctaacattcttcttgacttccaatttgaagctaaggttgctgattttggacttgcaaagttcactactgataacaacacccatgtttcgacaagagtaatgggcacctttgggtatttggcacctgagtatgcatcttctggcaagctaacagaaaaatctgatgtattttccttcggagtcatgcttcttgagcttattactgggcggcgaccagttgacacaacccaaacatatatggatgacagcttggttgactgggcaaggccattactgatgcgagcacttgaggatggtgaatatgatgctttagtggatcctcggctgggaaaggacttcaatcctaatgagatggcaagaatgatagcctgtgcagctgcatgtgtacgccattctgcacgtcgtcggccacgtatgagtcaggttgttcgggctttggagggcaatgtgtctttggaggaccttaatgaaggtgttcggcctggccatagccgcttctttgggtcatacagcagctccgattacgattctggccagtacaacgaggacatgaagaagttcaagaagatggcattcaacaacaactataccagcagccaatacagcgcgccaaccagtgaatatggacagataccgtctgcatcaagcagcgagggccaccagacgcaggagatggagtcgggtgcaatgaagaaaggtggctacagtggtggctacagctcaggatacagcggagcctcgtaagggaattccctcttttttgtttttcttttgatgttttcattgctgcatttgtaaagtctggccgaattatatgaccaaagctgctgacttgcgcgtgatgtatctgagtttgaccgagtatagttctatgtagctgcaattgtttattctttcatgaaagttgttcttgcccc

SEQ ID NO: 2327 - DNA, 1030 bp, Zea mays
  Clone ID: 700209678_FLI
gggcgggcgtctccactcgcgctcgcgcaccgcttggcctctcctccgccgcctcctacttccgtgctccccgctccggcgaattggtgcccacctgcgagctcgccccgttatagtgcactgcattaaaggcactgcgatccttccttttgtatctgggttattcttgaagaattaattttcactctggaggaaaaatgagtggtcctccaaagaggttgcatgaggagaatagccactctacacctgcaaagcggcctttggacgacaacagcttgtactcaagcccttccgggaaagctattcagtcaagcagcagtgatttccatggttcttttgaacatgatggtagatttgccaaaattcaacgtgttgaggctcgcgatgataagaggccaccccttttccatcggatgcatggtagctccaactttgttgatcacactgtcttgtctgacagcagattagaaccaaagcacaataaagatacaagggacaataaggcggatgatcgtgacacaaaagctgatgctctggatgtctatagtgatcccagtattgagtttcagtttaataaaattgacagtgatgtaaaaatagacaatagagctgatggaaatgaaataagggctgacaggaggggtcaccacgattacaaaggtgatactaaatttgacaaggataatcatcctattgttgcatcgagcttaggctggaaagacaacaaagaacataggggcaaaaggtactttgagcagccatctgataatgcggattggcgtttcccccgtcccggtttgcaaggtactgatgaaactctcaaaggtctaacttccatggaagaccgtaattcaagagatgcacatgattctgctgttgacaacaaagctgaatcaaaaggtgaagataagtttagagacaaggataggaaaaagaaggatgagaaacatagagactttggttcaagagaaggtgagagaaatgatcgtcggaccggtatccagcttggaggtagtggagttgagcgaag

SEQ ID NO: 2328 - DNA, 739 bp, Zea mays
  Clone ID: 700209683_FLI
atcccccagaaaatcaactcctccccaaatccacgctgccaccaactcgccgtcctccgcgccaagcaccaaagctccgatggcccgcactaaacagacggcgcgcaagtcgacgggcggcaaggcgccccgcaagcagctggcgaccaaggcggcgcgcaagtctgcgccggccaccggcggcgtgaagaagccccaccgcttccgccccggcaccgtcgcgctccgggagatccgcaagtaccagaagagcacggagctgctcatccgcaagttgcccttccagcgcctcgtccgtgagatcgcgcaggacttcaagaccgatctccgcttccagtcctccgccgtcgccgcgctgcaggaggccgccgaggcctaccttgtggggctctttgaggacactaacctctgtgccatccacgccaagcgcgtcaccatcatgcccaaggacatccagctcgcgcgccgtatcaggggcgagagggcctgagcgaggctggctcctctcaccgcaggcggcgtcgttgttgcttcgggcctgcttgtaggacttgtgcttctcttggtttcctttctggtggcagtggcatcttggtaccattgtgcttgttcttagaatcttagggatagagagttgttcagttgctgggtaacctgattgtttatcttgcattcctgcctctgtaatggttgtctgctgtcttaatggaaatgatatttgctttttaattctcagttt

SEQ ID NO: 2329 - DNA, 1232 bp, Zea mays
  Clone ID: 700209724_FLI
ccgacacccgacaatcttaacatcaaactcgtcgtccacgcctcctcggcaaggttgcgtacggcgtggccctaaggttcatctcgccgcctccctcaacctcttgattccgcctccctcaacctcttgattccgcctccctgaaggcataccagcgggatcaagctattttgctggccaaccgaacggtcaagccgacgatgacgctcggatcggcggcacacaagatcccgctggaggttgcgcacaccctcgtcgagatcgccgaggtcgcgcgctacgcctaccaccaccgccccggccgccctgcaacccacgagggggacccgactgcgccgcccgcaggggctgatagcagcgggggcaccaacgaggatgccgcgcggctgctggaggagaacgccatgctccgcgcccgactcgcagatgacctcgcgctcctgcgtgagctccacggcgcgccctgcgtctccaaggagtgccctcctgatctatacaaccgattgatggcggcggtcaacaatgttagcttccttgctcatctcgagaaattacaggatgagtcagcacgtcaacttaatgaactaacttctggcgacatgacagaggtggaagctgcagacattccggacaaagcgggtaacgggaagaaaggattgtgggtcttggtcccttgtgatacagctggagctaatttggaggaaattagtgggattgatgatgaaaattatgtcatagtaaatgaagacgatatagtcgatggtattgccgcctttgttgctaggtgcattcttgaagatccaaaatccaagtcgttatcgccaatgcagctccaaaaggctgttgcaaaggcattagatagcatgaaagctcgatggagatggtcaaccttttgggaggctggacagattatatatatcttggctacttggggcatcacattagcagggttgtacaagagccgccatgtcctgaaggtggcagcaaagggtgctgctgtgtctgccagatttgttatgaaggccatttgagtgtaagaggcactcatgtgggatcagcaatttgcaaaatgtaaatacaaaactcgtcccgtcagttgtgcatatggttgtggcatgtttatcatgatgaagttatgatcatccagacatgaaaaactgtttcatttattttcgttgtatggacggtggtgtgattgcagaaaaaaaaaagatacatatgtgattacttgt

SEQ ID NO: 2330 - DNA, 766 bp, Zea mays
  Clone ID: 700209880_FLI
gggctctagttttccagctctgcagcacacaagctagttaagctcctgcaacctccaagaaactaggcaatcgtttcctcctctgcttcagtatctccccttccagcagtagctaagctgccatatggcgacaagcaggcttgcgctcgtgtccgtgtttgccgcagccgtcctgctgggcatggcgtcggcggcgacctacaacgtcggcgagccggccgggtcctgggacctgcgtaccaactacggcacctgggtctcctccaagaggttccacccgggtgaccagaccgtgttcaagtactcgccccaggcgcacgacgtggtggaggtgaacaaggcggactacgactcctgctcaatcgccagccccgtcgccacccacaactccggcaacgacgccatcgccctggcctcccccggcacccgctacttcatctgcggcttccctggccactgcgacgcgggcatgaagatccagatcaacgtcgtgcccagcgccaactccctcggccccgccagcgctcctgccgccaactctcccgtctctcccccgcccatgtccgcgccctcttccgccgctaccaaggccaccggtttcggcgcccttgccgccgtcatgatcgccgcaggcctcatggcttactagatactctgtcgcttgctgcgtacatttagttttccttagatattatatatacgttgtattgtattcttttgagagatcagagttcagacgaatgacatggcatacatgtatctacgt

SEQ ID NO: 2331 - DNA, 1446 bp, Zea mays
  Clone ID: 700209962_FLI
ttctcgccggaagtcgcggccagcccggggctcgtcggctccggccagttgggtctcggtctctcggcggcgttcgagactctgccgccgattttggtagaagtgaatggctttacaaggacactgattttgaataggccaaagcagttaaatgcactctcctcgaccatgattatgggactcttgaggtgtttcactgcttatgagaaagacgatggagttaaattgttgattatgaagggtaaaggaagagcattttgtgctggaggtgatgttgctgcagttgttcgatctatacataaagacagctggaaatatggtgctgatttcttccgaaatgaatttttgttgaattacataattgcaacttataccaaacctcaggtttctcttcttagtggaatcgtcatgggtggaggtgctggcgtttctttacatggaaggtttagagttgccactgataacacggtttttgcaatgccagaaacagctctgggtctctttccagatataggggcctcatattttctgtctcggcttcctggattctatggagagtatgttggtcttgctggtgccagattggatggtggggaaatgcttgcatgtggtctggcaactcattttgtccagtcaaatagtctgctatcgctggaagaatcacttaaaaaggtggatacttccaatgcttttgcagtgtgtggtatcatcgatcaatttgctcaacaaccatcactgaaagaaagcagctctttgaataggttggaaatcatcaacaaatgcttttccaaaaggacagtcgaagaaattatatccgctcttgaagtagaggcctcaaattcggcagatgaatgggttgctacaacaatccagtccttgaagaaggcttctcctaccagtctgaaaatctctctgagatcgataagagaagggaggacacaaactgttggggagtgcttgcagcgggaatatagaatggtctgccatgtcatgcgtggtgacttcagcagagacttctttgagggatgcagggctatattgctggataaagaccgaaacccaaagtggatgcctccaaggttggaacaagtgcatgacgaggctgttgaacagtatttctccagaattgatgatccacagtgggaagacttgaacctacctgctagacgctcccacggaagaaatatcgagtccaagctttgatcgaaggtcatgggagaaaggtggaactctggaacggagccttggtagtggtcagaataacacattattgcacatcatctcaagtttgaagagtctgcagactattgataaaataaacatgaatgtgccatataggtcaacttatatcacagaaagaaactctttgctgtttatacgtggagactggagtcatatgcatttttaaataattataagtaataaaatcgaaaaagaaatcgttgg

SEQ ID NO: 2332 - DNA, 844 bp, Zea mays
  Clone ID: 700209964_FLI
ccacaagcgagcgagggacccggggcggaagaagagagagaagacgtctctctcctctcggcgtccccgttccccaacctctcgtctgctgcctgcctgcctgcctgcctgcaaaaaggagtttgtcatggcgtctaagcgcatcctcaaggagctgaaggacctgcagaaggacccccccacatcatgcagtgcaggtcctgctggtgaggacatgtttcattggcaagcaacaattatgggaccacctgacagtccctatgctggtggtgtttttttagtgaacattcatttcccgccagattaccccttcaaacctccaaaggtttctttcaagacaaaggtcttccatcctaatatcaacagcaatggaagtatatgccttgacattctcaaagagcagtggagccctgctttgacaatttctaaggtcctgctctccatctgctccctgctgaccgaccccaacccggacgaccctcttgtcccggagattgcccacatgtacaagacggaccggccgaagtacgagtcgacggcccgcagctggacgcagaagtacgcgatgggctgacgaacgctttcctgctcgtccacccgactggcgtctcaagaaagtcgttcctgggcgccattgttcccttggatttgttgttggtcgtcgtgtgtatccctgatccatctaggatcatcgtattgtattgtagtgtatgtatatcgtcggcctaccatcgttgccattcaccatagtgaggtggttggacatgcttcgcctatatgcacctgtgcttgccgtccttcgggtcggtgctctttggttaatgttcatcgaagacgttgattt

SEQ ID NO: 2333 - DNA, 968 bp, Zea mays
  Clone ID: 700209975_FLI
ggaggttctcaatttgggctgacaagcctacccctggcaatgcactgatgaacctgaggtacagagatgagcgggcagcacccatcactggaaaagaagttagaacaggtttggaaggacctgggctttctgtttctcaaaagatattttattgtattagctttgttggtggccaatatgtatggtcacgattacaatctttttctgctttccgtcgatggggcgattctgaacagagaccactagctcgccgtgcttgggcgttgatgcggaatgctgaagtattttatagggctgcttcattctttaacctattattgtttctttatggtggaaggtacaaaactgttgtagaaaggattctgaaggcaagacttgtttatgggagccccaacatgaatagagctgttagttttgagtacatgaatcggcagctggtctggaatgagttttcggaaatgttgcttttgcttcttcccctcctaaactcgtcttcggtaaagaagttccttctccccttctccaaagataagtcaggaggttcttctggtgatgaagcagattgtcctatatgtcggtccagtcctagcattccatttattgctcttccatgtcaacacaggtattgctactattgcctacgcacacgttgttcggctacgacttcttacagatgcacacgttgtgacggggcggtggttgcaattcaaagactaggatcaggttagttttacgacctagttgggttaaagaattctcgcccgtttctacagagaatcagcacttcggtgtttcatacggttacaagtttggatacgcgtcattcactgtatgtacatgtaattgccccaagtgtggacagttcggatgccatgagcccataactgacttgttgtatatcgaatgaatagtccgtcacaaaactaacacggattcactatgcgttttcttttcgattcgtctatttc

SEQ ID NO: 2334 - DNA, 821 bp, Zea mays
  Clone ID: 700209977_FLI
gaaagatttgatgcatcttctattgctgaagctgacggtgctcgttttgattatttctgcaacaaggtatatccaaagatccaggacttggatgagggtgggctgctgctattcgtcagttcgtattttgagtacattcgaataagcaatttcttaaaatccaaggaagcgtccttttgtcgaatcggagaggctacgtctcagcaggatatatcccgtgcaaggctctggtttttcgagggcaagaaaaagatcttgctttacagcgaaagatctcacttctaccaccgatacaagatcaggggaacaaagcatctactagtctattcgttgccagggagaaaagaattttatccggagcttgtaaatatgctgggcgaatcagaaaaccgcaagtgcaacgtcctcttttctcgtctagaccttctcaagttggagcggatcgttgggacgtcttcggcgcgaaggttgatttcctcggagaagggcatgtttgtcttctgctgatgtagcagcctagcccgtactgtagagcaggcgaatggttttatacattgatccctagcaaatgtacccacagcagggggtcacgttgttgtttgcctgtcaggcaagaatctggaccatgttatgtaggcaaaaaaaaaaaaataaataaataaaaaatctgaatcccgtttgtacggctaacattatacttttatgcccctatttgtttccatcaaacttatagattatatagtcacctaatgacttgcttatttgttatcatagtctaggtatgtaaattatatattccatctaataatttgtgttataat

SEQ ID NO: 2335 - DNA, 1310 bp, Zea mays
  Clone ID: 700209987_FLI
tcttttaatgctttatgaattagagtatgtagaatgactttcacaacaaatgtcatcaagaccgcgctcgctcgctcctgtgcctctctacctcgcttgcgtgcgccgggaaggcagtgggtggctggtcggttctcgcaagaggttgctggtgctgttcctcctcccccggttgatgagcatggggcattgctccgagcagcggacggggttcgaggtgactaaggactggaacggcgccgaccagttcgcgatccggtccccgcggggggcgtccgttcgggtctgcctgcacggcgggcaggtcgtctcgtggaggaaccaccgcggcgaggagctcctcttcagcagcagcaaggcaatcttcaagccgccaagagcgacccgtggtggcattccgatatgcttcccacagtttggaaactgtggaacattggagcagcatggatttgcaaggaacaagatatggacaatagacgatgaggctccacctctaaattatggtgataataacagcaacaaagcttctgttgaccttctgctaaagccatctgaagatgacctgaagtgctggccacactgttttgagttacgtctcagagtctctctttcaatggatggagacctttcactgatatcacgggtcagaaatgttaatgggaagccattcagtttcgcatttgcttaccatacatacctttctgtttctgacatcagtgaagtgaggatagaaggtctggagacccttgattatcttgacaaccttagccagcgggaacgttttaccgaacagggagatgccataacatttgaatcagaggttgatcgagtctatgttggctgcccaggcgtaatagctgttcttgaccatggaaagaaacgcacattcatcgtgcggaaagaagggcttcctgatattgttgtgtggaacccctgggagaagaagtccaagacgatggcagacttcggcgacgacgagtacaagcagatgctgtgcgtggatgcagccgcggtcgagagggccatcacgctgaagcccggggaggagtggacggggaagctggagctctccgccgtggcgtcgaccaactgcagcgaccacctggatcgcccgggcaggctgtagagcgctgggtgggtgggttcgttcgcccctgacgaaaggcatgtactagttttttttcatgtacatgggggcgctaggtccggcccttgcaggctgcagtatcatctacctgtcaggtgtgtcatgtgtgagtttaaacttatgtcagatccaagtattgctgtgatcgacatgttcgatgttc

SEQ ID NO: 2336 - DNA, 1351 bp, Zea mays
  Clone ID: 700210017_FLI
ttcttttaatcttttttttctggtgacgcgtgacaagcaagcagctggcatcttgaaatcgttatcgcagctatttcattgcgtttgtaattcctactaagacaatagaaaagaatagaaaaagaaacaagtaaataatgtgccctgccgttccccccacccacctcaaccgcagggctgcgacgccgccgtcctgatcgcgtccaagaacaacgacgccgagaaggacgcgccggacaacgagtcgctcgccggcgacggcttcgacaccatcaaccgggtcaaggcggccgtcgagaagaggtgccccggcgtggtgtcctgcgccgacatcatcgcgctcgccgccagagacgtcgtctacctggtaaccgccgtcaccacccccttcatgtctcgagtcagtcagtcagtcccgtcgtcgtccctcgaccagctggtgacgtatcggtattcggtggtgacgaactggcaatgcaggcggatggcccctactggcgcgtcgagctcggccgtctggacgggctcgattccagggccagcgacgtcaaggggaagctgccggacccggacatgcacgtcaaggacctcacgccggtgttccagcggaacggcttcacggaggtggacatggtcgcgctctccggcgcgcacaccgtcggcttcgcgcactgcagccgcttcaccgacaggctctacagctacggcggcgcgcggacggacccgtcgttcaaccccgcctacgcgtaccagctcaagcaggcgtgccccatagacgtcggccccaccatcgccgtcaacatggaccccgtcagccccatcaggttcgacaacgcctactacgccaacctccaggacgggctggggctcttcacctccgaccaggtgctctacgccgacgaggcgaccaggcccatcgtcgacatgttcgccgccagccagaaggacttcttcgatgctttcgtcgccgccatgctcaagctggggaggctaggggtgaagacggggaaggacggagagatcagaagagtctgcactgccttcaaccattagtagaggcctctcctgcgtgcagcagcgtctgtaatccagattatctcaagctcatgctgtttggagttcgatcgagatgcgtatactgagattgatgattgatcatttttctttttcttcttttttgttgcatacacttgccaaagcttgaaggtgttctttctcctctgtttcttcccttttttttccttttcttctttaataacctttttaccttactttttttgggtgcaatttttgtacagactgaagagtgtaataccatgaacaacttgaagatttttaattgaaaaaggtt

SEQ ID NO: 2337 - DNA, 2542 bp, Zea mays
  Clone ID: 700210018_FLI
gcgcctgattgtttccgagacgaagctcatcacggtgcactcctgcgctgggcgcctaggggacgctcgcaaggtgttcgaaggaatggcgtgcagggacctgctcgcctggtcggccatgatcggtgcctacgccatcaggggcctgtacgaggaggtcgtcacgctcgcggtggccatggtcagggaaggggtcatcccggacaggttcctgatcacccggattctacaggcctgtgcgtacacagaggacctggagctcgggacggcgatgcattccatggcgatccggagaggtttcatggcggagggagcgagggacgtgcccgtggggaactcagtgctggccatgtacgtcaagtgcggagagttgggccgtgcgcgcgcggcgttcgacatgatggggcagcgggacctgtgcacgtggaactcgatgatcttcgggtgctgccgctccaacgagtgggaagaggcacggaggctgctcgacgatatgaggcgccaaggtacagagcctgggcttgtcacatggaacacgctggtttcgagctacgcgaggtctggggaacttgatgtggccatggagatgctggagcagatggaggagtccggtgttgctccggacgtcgtcacctggactagccttgtgtctggttttgtccacggtgataggggtggcgaagcacttcggtgtttcgcgcgcatgcgccttgctggagtcgaaccaaacggcatgacaattgcgagtgccatctcagcttgtgctagtttgcggttgctgagtcagggcatggagctccattgccacgcagttaaggttgggagtgtgaacaatgtgctctcggggaactccttggtcgacatgtatgcgaaatgtggagaaatcattgcagctaagagagtatttgatgagatacccgagaaggatatcttctcctggaactcgatggttgcagggtatgcacacgcgggctattgcggcaaagcatatgagcttttctgtgagatggagagccttggtgttcggcgcaatgtgatcacgtggaatataatgatctcgggatacataagaaatggggatgatgagagagcttttgagctatttcagatgatggaaagctgtggagtaaaaagggacacggcttcatggaatgcactcattgctggttcggtgcataatggtcattctgatagagccctgagaatattctggcagatgcaatcactcttggtgagaccagacttcattacaatattaagtatcattccagcttttgcgaacctagctggattttggaaagtacgggagatccacgcctgcatttatcacaacaatttagaaatggatggcaaaatagcaaatgcactcatcaatgcctattcaaaatctggtgaccttgctggtgcttgtgctgtttttgataggcactcatcaaggaacattatttcttggaattgtataattcttgcacacttgctgcatggttctccaagtgaagcactggatcgcttttgtgagatgaaacaagaaggcgtgctgccagatcatacaactttgactgccgtaatcaaggcctatggcctccagggaaaggtatctgaggcgaaacggatatttcacaatatgacccacgatcacaacattactccagatttagatcattacacagctatagttgatctccttggccgctcagggagtctacaagaagcgtacgagtttattgataatatgccactcatacccaatttagcagtctgggaggcattgcttactgctgcaactattcatggaaatgcaaggctcgcaaacctggcagcaagagagttgtcatcgcttgatccgagtgaccctagaatccaaagactggtttttaattactggggtctaactggaaagtctgttgatgtgccactcatgacggtatacaacggaggaagagagttggaagatgttgatagttgttcggttgaaatcaagaacaatgtctatttgttctcaaccggtgataatttagcattagagagtacagttgctgaattgaagctgattatgattcagatcagaatgtcattgctgaaaatctgtaatgagactaacgctgaagaagagaaagaagaattatcaggaatacattgtgagaagctagcaattgcttttgcaatttcaaattcccctcctttcagaagcatacggataataaagaccttaaggatgtgtagccattgtcacatctttgccaagctagtttcagaaaaatacgagcggcagatactaatcaaggattcaaattgtttgcataagtttaaggatggaaagtgctcttgtgaaggttattggtgaatacaactaatataagtgcaccaatggtttctgttcatttatgcgtcgtccatactggctttttcatgtatgagtgtagtgttatcagttcatagttgtattggaacggaaaattactgtagccagttttgctcataaaaaacctaatgttgtcttattgctatattttagttggaagtagtagatatctttatcttc

SEQ ID NO: 2338 - DNA, 675 bp, Zea mays
  Clone ID: 700210071_FLI
ggaggccgcgcggcgggcgccagctgcagccaagagcccactagtagtagtagtagctagttcaccaccgcctgcttgcctcctttactttgccatatttgctagcgtttcctggattggggacgcttccgtttcgggaagccgtgaagggatcggccacgacgatggtgcgggggaagacggagctgaagcggatagagaacgcgacgagccggcaggtgaccttctcgaagcgccgcaacgggctgctcaagaaggccttcgagctctccgtgctctgcgatgctgaggtcgggctcgtcgtcttctccccgcgcggcaagctctacgagttcgccagcgccgccaggaccaaaagcctgaagaaaccgatgacagcatcgtacatgggggcaacgcggaggtcctgaattaatgcgcggccaatcggaggaagagtgagtggaaagaggcaggcgtgcccagtaactgtgggtggaaggattgctgctcatgggccatggctacaaacggagaagcgtcgtcatgtgacttctggtcgcttggcttgttcctccggcctgccaaagccacttttttcttggtttgtatttcggaaacaatcctttcttgtagtggtggtgccgattgacttttcttgcttgcgttatccaatcacatcatcagttccgggcg

SEQ ID NO: 2339 - DNA, 869 bp, Zea mays
  Clone ID: 700210102_FLI
taaagcattcaatcttcatgctgttttcaaagaagtgatgggtttcattaaaccaattgcatctatcaagaggctatctgtatcggttatgttggcaccagatttgccgttatgtgccattggtgatgaaaagagactcatgcaaactattctgaacatctctggcaacgctgtaaagtttaccaaggagggacacatcacacttgtagcttccattgtgaaggctgactctttgagagagttcagaaccccagaatttcatccaactgcaagtgatgaccatttctatttgaaagttcaggtaaaagatacaggctgtggaattggtccacaggatctacctcatgtatttacaaagtttgctcatcctcaaagcggaggaaaccgagggtttaatggtagtggtcttggccttgccatatgcaagaggtttgttagtctcatgggagggcacatctggattgacagcgaaggaaccggaagaggttgcaccgcaacattcgtcgtcaagctcggcgtgtgtgacaacacaaacacctaccagcagcagctgatccctctagtatggccaagcagcgcagactccgatttgcgtgctccgaaacctcttccggacgggagaggatctactcccttgaaatctcggtaccaaaggagcgtatgagcctagtgtaaatgattgacggcatagtgccaagtaggggaccgattagtgccaccgtctaattttgtttgtaaccctgtcatagcaggcatatgatgtacaaatactgtaaagcaaatggagactgcggccgtgtatctgggtggcaacgctgacttgctgcattgagtggtatatacatatgctaccagcggattgaattgct

SEQ ID NO: 2340 - DNA, 1384 bp, Zea mays
  Clone ID: 700210153_FLI
ttccagtaccgcttctgcccccagcaggtgccagcgccaccgccgttcgcctcctctccacactccgccagatcccatccctctcgcccaccgcgcgggtatcggagtcggagcatggcgtctgcagtggtggtggacgccggcgacgcgccggagcccacggttcgtaacctcctggaccaggagtccctcaagtgggtcttcgtcggcgggaagggcggcgtcggcaagactacctgcagctccatcctctccgtcctcctcgccggggtccgcccgtccgtgctcgtcatctccaccgaccccgcgcacaacctcagcgacgccttccagcagcgcttcaccaagttccccactctcgtccgcggattcaccaacctctacgccatggaaattgacccaaaggtagaaaatgatgatttatccaatgaaggaatggaaggattcctgtcagaactgacaaatgcgattccaggagtagatgaagctatgagttttgctgaaatgctaaaattagtccaaacaatggattactctgttgttgtttttgatactgctcctacagggcatacattacggttgcttcagttcccagcaaccctagagaagggtcttgagaaaatgatggagttgaaaaatagatttggcggtctgttgaatcaggccagtcgcttgtttggtcttggtgatgagctgaacgaggatgcaatgcttgggaaacttgagggtatgaaggatgtgatcgaacaagtgaacaggcaatttaaagatccagacttgacaacttttgtatgtgtttgtatcccggaatttctttcattgtatgaaacagaaagattggtgcaagagttagcgaagtttgagattgattcacacaatattattattaatcaagttatatttgatgaggaagctgtcgagtcaaaactgctaaaagcacggatgaaaatgcaacaaaaatacattgatcagttccatatgttatacgatgacttcaacatcaccaagcttcccttgctttcagaagaggtttgtggtgttcaagctctccaaaacttttcccagcacttccttacaccatacaagtctactcttaaaaggggcaccgtcgaggagctcgaacagagaataactatattaaaatctgcactgcaagaagctgagacagagttagatagggttaggaaagggaagcagtcagtgtgattttttttccacaggtcaagtgtgtaaaaccagagagacgatcaattttttcgtgtcattacactcttgttgatttcactatcatgtttcctcatcgaggagtttagacttgtaatagctatcggtagagaagtgtttgattcacacaagatatatagatccattctttttgccggtt

SEQ ID NO: 2341 - DNA, 1610 bp, Zea mays
  Clone ID: 700210184_FLI
gctcctctgaattctgatccgtgcggtgcggccgtgcgggtgtccgtctcctccattgcgaagccgcgagctcctgcgtcaaccagatcacacgaaccaaaccagcgcctcctcccccgagtctcaccgccagcgcccatggcgacacgctactggatcgtgtctctgcccgtgcagtcacctggcgccatcgcaagctccctgtggtctcgcctccaggactccatctcccgccactccttcgacactccgctctaccgcttcaacgtcccggatctccgcgtcggcaccctcgactcgcttctcgccctcagcgacgacctcgtcaagtccaatgttttcgtggagggcgtgtcacacaagatccggaggcagatcgaggacctcgagcgcgccggaggggtcgagagtgggaccctcaccgtcgatggcgttcctgtcgacacctacctcaccaggttcgtgtgggatgagggcaaataccccacaatgtctccgctcaaggagattgttggcagcatccagtcacaggttgccaagattgaggatgatatgaaggtgcgagcagcggaatataataatgtaaggagccagcttagtgcaatcaacagaaagcaaagtgggagcttagcggttcgtgatctttccaatctggtaaaaccggaggatatgatcacctcggaacatcttgtgacacttcttgcaatcgttcccaagtactcccaaaaagactggctgtcaagctatgagacacttgatacatttgtggtacctaggtcatctaaaaagctctatgaagacaacgaatatgctctctacactgtgacactatttgctaaggttgttgacaactttaaggtccgtgctcgcgagaagggttttcagatccgtgatttcgagtacagtcctgaagcacaggaaagccggatgcaggagatggagaagctactgcgagaccaagaagctatgaggaccactcttcttcagtggtgttatgccagctacagcgaggtattcagttcctggatgcacttttgtgctgtgcgtgtctttgtggagagcattcttagatatggtctgccgccatcattcctgtctgctgttcttgcaccatctacaaagagcgagaagaaagtaaggagcatcttagacgagctctctggcgatgcccatagcctgtattggaaatccgaagacgatgtaggcgttgctggtctgggaggcgaaaccgaggcgcacccttacgtctccttcaccataaattttgtctgagacaaagtatggttcctagaccgtctgtggcctaggcaatataatacttggaagcagctattggaacgcaagcgcggaacgagcatgtatattactctgttgatttatcggttcatgtggtcctgtagttcatatcacagagagatcagccgacggatgctgtaatttctgaggaacctatggaattcctgtagttcatgtggtcctgtaatttctgaggactacctacctatttccctgcagcactgcaccttgtaaaaagacttaacccgtgtctgtagcagctggctactggatttattacatctacaataaaagtcatttttaatggttgtttc

SEQ ID NO: 2342 - DNA, 1838 bp, Zea mays
  Clone ID: 700210189_FLI
agcggcctcgtcacgtcctccgtcgagctctcccagcatgcgcgtcgcggatccatggcacgacagaactcgtcggaaaccagccgtgcccgttcgattgcttgctttgttgaggtcttgaggagtgaggtttgttggctgcttctataggcgcgggaaactgggagaacacacaaacacggctgccacggtaataacgaaaagtaatactacacggcagtgagttgcgttcatcccgtgcatgtacacgtaggcacaatggctatatatacccgagaagtttctaaaaaaaactcagatgcaggtccaaccgtgcaagcgtcccagtggaacgttccaaccctgacgcgtcatcgacgtgccatgtcagatattaagatagtgtttgaatgcaccgtagctaatagctagaccctgtttagattttatagagctaatagttagctagctaataaattattatatggttaagtcagctaatgaactaattttttggtgtgaagtagctaacaattagctgatagtgtttagaatccaataactaatttttaatagctaactattaattttagaggtttcaaactagaccttagttggctaaaaaattgctagtggaattagctagctaactattaactaatttactaaaaaataactaatagctgatctattagctaggatttttagatgtatctatcaaaatttagcagctaattattagctatatttcattcaaacaccctctaagtaatattctctctgctcttttttatttgtgacggtttagttcgaaaatgaactagcggactacaaatatttgagaacggagttagtacccaactgaggtcagactctatttgcaattatgcatgatctgatctctctgttttttctcatcgggcaccaggcaccggataatatgttagcgagagcggcgcggtgccaagttggcgtccagataagcacggtccctggcccagaaaccggataagacatgcggtcggcccgtcgatgccgacgcaatgacgcatatccgctcgcatcgcatggcctccctcgcctggcgcccccgcctgatccagcccttgccggactgaagaggcggcagcggttggtgcacggggcgacctgcccgcgcgcggcctcacagcgacaagccttcacctgcacctgcaggccgccgcgacaggtcggccgacggccggcatttccccgacccggacacgtacttttttccacggacgggacgacgcgcgccatactatccaacgcacgcgacgacgtggcggggcggcgtcgtgctgttcgtggaccgacgggcgcggcggggcggtggaacatgcaaggtttcgttttgatgcggtgcgtcatgcatgtgcggcccggcccggacccggtctggtcgaacaggtgcatgtgcattctctgcctgttccaacgggcttgacacgatggcctggccgatgtcaagacccatgccctggggcgcgacgacgaactcgttgcatggcccgggacatcagtatgtttcttggtcgttgccgctggggggcagtcagtcttgcgttacacctgggttgcttgcgacttgcgatcgagcgtgttttttccagttgcgtggctcaggtattcttgttgcacttgcacatgcatgccgtcaggcgccgcgccaccaagcaagagtcgtgtcgcgtcacggcacacagatactgacatggaaatgtcatcgacgcttcggtgtacgttacaggcaggcctgactttgtccggcaatccgtaattaacttgtggcagcaggcgcatgcacacgcgacacgccgcgagctgcaggttgtttc

SEQ ID NO: 2343 - DNA, 2138 bp, Zea mays
  Clone ID: 700210222_FLI
caaaaccagccgagcgccagaggagaagagctccgtcttgccttctcttccttcctctacctgccgcacccgcacagccacagccaaccacacacaccccatcacaacagctccctctgcatctccgcctcgtcgccgtcgcctgcctgcctgcacaaccttcttcctcatctctctcttcttacgctgccaccctcccagcaccgagggaagggaagcccaggaatctccgtcccgctcccggccgccgtcccttctcacaatctcatcggatctgtattgggttttcagtaaggagcagaaaacgccttagggaatgcagaaagatgtgcttgcacgtcgaagagctactttgtgagggacttggcaggaaagcacgccatactcttcattctctgccggctcttgatgacttcgaagctcaagagtacacgtatctccacctcgtgctttcgcacaatggggttcgacgtggcggctcaaccgtcttcttagatcaccatctcggtggagacggttgaagtcttcacaccctctcgacctctttgctgtctcatttttttttaactgtcaaggataagcaagtgacctctgtgtgcataccaccatacgtagcatacacaggcacagatggcagagcataaagggaacgttctcttgcacaagtatgagatggggaaattgcttggtcaaggcacctttgccaaggtttaccatgctcgtaacacggcgacttcggaaagtgtcgcgatcaaagtgattgataaggagaaggttatgaaggttggtctcattgatcaaatccagcgagaaatttctgtgatgaagcttgttaggcatccaaacatcgtacagctctatgaggtcatggccaccaaaaccaaaatatactttgtgctggaacatgttaaaggtggagagctgttcaacaagattcagcgaggaaggctcaaggaagacgcagcgaggaagtacttccagcagttgatctgtgcggtggacttctgccacagcaggggtgtctatcatcgagatttgaagccagaaaatcttttgctcgatgagaatagcaacctgaaggtatcagattttggtctaagcgcacttgctgaatgccatagacaagacggcctgctccacacgacttgtggcacgcctgcttatgttgccccagaggtgattaacagaaagggttatgatggtgcaaaggctgacatatggtcttgtggggtcatcctgtttgtgctattggctggttatcttccgttccatgataagaacttgatggacatgtataagaagattgagaaagctgacttcaaatgtccaagttggttttctaccgatgttcggaggcttttgcaaaggattcttgatcctaaccctagtagaaggatctcggtgaaaaaaatcatggagaatccatggtttaggaagggtttaggtgcaaagctacttaggtacgatttacagaataagaatgcccctcatgtggacaagaaggcagattttgattcactgagcaccaacgtaacaactgagagcaagcaacatgaagaaaagaagcctaccaacatgaatgcatttgatataatatctctatcaactggtttggacctctctggtttatttgaagaatctaacaagaagagagaatccaaattcacatctaccaacacaagctcgacaatcatatcgaagatcgaagatattgcaaagaatttgcggttgaatttgacaaaaaaggatggtggcttgttaaagatggaagcttcaaagcccggaaggaaaggggtaatgggtatcgatgccgaagtatttgaggttagccccaacttccatcttgtggagataaagaagacgaatggcgacactctagagtatcaaaaggtcctgaaccaagaaatgaggcccgcactcaaggaaatagtgtgggcttggcaaggtgagcaatcaaagcaaaagcaggaacaacagtcgtgttaaaaacttatgagctagtgcaatgtttttagccaatttccaatctttcgtgtatttgtgtagtttttactcttttattatccatttttgttttcccgtgtaataccaacaaaaacttgtgtagttgtgttattttctgaggacaaatttgtttc

SEQ ID NO: 2344 - DNA, 710 bp, Zea mays
  Clone ID: 700210226_FLI
cgtcaacgtcgccaaggacgactccatcttccacaacgaggagggagccgacgaaggcgtcgccggcgccggtggtgtcgacggtgtcgaccttgaagccgggcacgctgcccttgaagtccttggtgaagtacctgcatcccttgtccccgtcggtgacgacgagcagcttgagcccgtcaaaccacagggacagcacgttctcacgcgcgaggtcgtgcccggcatgatcgtcaccgggatggaggtcgcagagatcgacggcgccccgaggatgggcccgacgttcggcgccatgatgatctccggccagaaggcggcgcacctggcgctgaaggcactgggcaggcccaacgccgtggacgggaccatcccagaggtgtcgccggcgctgcgcgaggagttcgtgattgcgtccaaggacgacgaggtcgtggacgcctgagcgagcatccacgcgccagcatgcaagcagcgtcttatctgggccggcgccatcacggggtttcttcttttaatctgggactttgttgctgttggacgaatgaattcccttcgatcggttagctttaatctgtctcgttagtgtgtcgtgttcgtgtagcaccatgccacacaccagccgtgtgctctgtcacgtgggggccactcgtggggtctcctgctgctgtcagaacgaataagagaagatggaattgtgatgaaacaat

SEQ ID NO: 2345 - DNA, 789 bp, Zea mays
  Clone ID: 700210242_FLI
cgactccgccgccgcccgccgctccgcctcagcgcatagcccgccgcgacctcatcgatcaccttcaactttcaatcatggcggacgtcgatgtcgaaccggaggttgccgccggagctcccaagaagaggacgttccgcaagtacagctaccgcggcgtcgacctagatgcgcttctcgacatgtccacggacgacctcgtccagctcttccccgcgcgcgccaggagaaggttccagaggggtctgaagaggaagcccatggcgctcatcaagaagctgcgcaaggcgaaaaaagatgctcctgctggtgagaaaccagagccagtcaagacacatctccgtaacatgatcattgtccctgagatgattggaagcattgttggtgtctacaacggcaagaccttcaaccaggttgagatcaagcctgagatgatcggccactaccttgctgagttctccatctcctataagccggtcaagcatggcaggcccggtatcggtgccacccactcctcgcggtttattcctctgaaatgagctgttacccggctctgcagtctcccaagagtcagttggcaatgttcgttcagcttttctacttgttttgaacaagttaaatgcccaagatattttgttttgttccattccagctcaagaattcaaagctaagcattgcacaattatgctgttttgttggaagtttttgagttaatcatatctaagctgagttgctattttgggttgtttattcctgaaagtttgaagaatatacttacaattttggggt

SEQ ID NO: 2346 - DNA, 942 bp, Zea mays
  Clone ID: 700210403_FLI
aggaagcaatgaagacataattgttgcatctgataaagctcgggcgaaatacaagcaaatccttggaattttgcatccctttgctggctcttttctgattcagagaacccaatgggggatgtgtccttgaatggacccgttaaggccgagccaactgccggtggcattgccaagggaaaccgagttctcgacacgatgtccgccgggtggacggacgagagacacatgctgtatataagctccatggaggcttctttcgtcgaccagctatacaaccatggaaaccatccgcacagagtgacgcggtcgaggcttcggtgggcgaccatgagtcgggtactcaggcaagccgcaagagcccttcagtgtctcatggaagggaacgggaagcttgtaagggaggaccccagattcttcatgaaagcacagaggtctctgatcaaaattttgctgacgatgaggctgaagctgaaacagaatcgatgaaagcatgcaagaaaaggagactaagcagggcttcgcgctactgtgctgaatgataaagtaaaattcgcaggaacaattagcgtagcctgttgcaagaatcgatatgacttatcctaaaagaaggtgctaagatgatgggacatggctctcaaaactttcagctgttgcctgctggtagccaagacacactgaatccgaaggaaggcgttgaagggtagctgttagtgattttgtgatataaagagtactggggcagttagcatcggcatttttagcggatttaagttcttgttatgtgtatctgtcttcatcagtagtgctgcttagtacctcactctctcgtcagcagtatatttctatatattgtctgtacttggtagatatatgtattggttgatcctatgagtgtaatgtttttttttgctgcagcttttgggggcagttggtattaaattc

SEQ ID NO: 2347 - DNA, 1124 bp, Zea mays
  Clone ID: 700210416_FLI
gcagctgcagagcagtgccgggcgtccatcgtgcgcgccgcctccgagtggggcttcttccaggtgaccaaccacggcgtgccgcaggttctgctggacgagctgcaccaggcgcaggccggcgtcttccgccggcccttccaactcaaggcgcaccagccgctgctggacttctcgccggagagctaccgctggggcacgcccaccgccacgtgcctggagcagctctcgtggtccgaggcctaccacatccccacaacgacgaccacgaccggtaacgacgacaagacccggctagtggtcgaggaggtgtcgacggcgatgtcgaagctggcgcagcggctggcggggatcctcgtcgcggagctgggcgaagacagcgcggcggcggtggtgtcgcggtgcacgcggagcacctgcttcctgcggctgaaccggtacccgccgtgcgcggcggcggccagcggcgtcgtctacgggctgtgcccacactcggacagcgacttcctgaccatactccaccaggacggcgtcggcggcctccagctcgtcaaggacgggcagtgggtagccgtgaagcccagccccggcgcgctcatcgtcaatgtgggcgacctcctgcaggcgtggagcaacgaccggtaccggagcgtcgagcaccgggtgatggccagcgccacgagggagcggttctccgccgccttcttcctgtgccccagctacgacacgctcatccggccgcgctgcggcgccggcggacctcctcctcgctatgagagcttcaccttcggggagtaccggaaccagatcagggaggacgtcaggctcacgggccgaaagctcggcctgcaacgcttccgcaaagcagagtagtggactactataatgttgggcttcaatatacttatttgataactacaagtgacatagcatatatataagtaagtattatgagcccagtagtctaaatgggcctctagaaaaaaatatagggtccttattatctggtgtataaacgaaccaaccacctcagctcacactacctcttgtaatcttttaattaagcaattagattattgctctccatgtatatttggaaatggagaggatatatgaaggaatgt

SEQ ID NO: 2348 - DNA, 122 bp, Zea mays
  Clone ID: 700210418_FLI
aataacaagattcctgatctcaacctgcaggatggccctatggtgctctccccgccaagaaagttacgtagggtgacagcgcatgaagggatggaaggatgttcgtccactttatctgtcct

SEQ ID NO: 2349 - DNA, 1336 bp, Zea mays
  Clone ID: 700210427_FLI
ctctgacctgcctcgtcccttctgagttctggcggctctcccgcttggtcactcctgcttccttgccgttcgagagctatctgacacctgaacggagttccagttcctctatcggcctgagggcattgggtttcttgatgggagacagcaggaggcacgaaccgtgggttatcctccaaccggatggctggctgcgcaggcctgcgttgggattgaacagcctgatgcagattcccgataagattcagagctctcttaaggtgcaatttgggcgtttcttgaacaaggatggtgctgtccgccgcatgagtgctgagatatcgtcagagaaagcgaaacagtcgtgttctgctgctgcttccgcggaggttcgcttggataggcatctccaagcttggtgggacaatcctagctggaccgacgagccaccagaaataaaggtgaatgtaccagaaggatccctttgcaacctcaatctgagatttaaggccggattaccaccagatgcagtatacaatatcataattgatccagagaacaaaagggtgttcaagaatattaaggaagtaatatcaaggaaagtcttgctcgacgaaggatcaagacaagtagtcgaagtggagcaggcagcaatctggaagttcctctggtggtctggcaccttttccgttcatgtttttgttgatcagaacagaaaaaaacacactgtaaagtttaggcaagggcgagctggctttatgaggaagtttgagggttgctggacgatagaacccctttttgttgacaaggaattatgccttcctctgaacccacattcattggaggaatatgaatcttgtactggtggcagggggagagttggatctgccattactttggaccagcttattgagcctgctcttttacccccaccacccatttcgtggtacttgagagggattacttcaaggacaactgagatgctggtgaacgatctgatagcggaaactgctcgattgcgcaccatctcaaacaacgcgaatgccaagcaaggtactgaagaaaccggtgatgctaacataggtgatccagttagagagtgtggtgacattaaggaaaggtggcgacagagaagaaaaagtggacgtcatggatcatcccttagattaacaagtcgattcttgtaagataagctatgaagcagtgctcattttaggacccgttttacctgtatcttagtttgtaaggttttggttgtaggtaacattgtgtaagatgtctctttgtgaacatgtagaagctagttgttcaatacttatatatgttttatttatatgaataaaggtttacttgctcc

SEQ ID NO: 2350 - DNA, 185 bp, Zea mays
  Clone ID: 700210455_FLI
ctcatgtacatacaaactatacctcaaactttacaaatgtaattttgtgcgactattgaaaaaatcaatatgtgcttttttgaggaattggttactttataaaataaaaaggtgtctaatgtaatagaagcaacagagaaaaaagtgaagggtgtgaatcaataaaaccatggatgttgaatgtt

SEQ ID NO: 2351 - DNA, 815 bp, Zea mays
  Clone ID: 700210459_FLI
cgtacgccggcagcgcggccatctgccctgagttccagggcactctcgatggcgccgagctcgccgactcggtgagcatgaacccgcacaagtggttcctcaccaacgcggactgctgctgtctgtgggtggcaagcccaggtgccctgacctccgcgctgtccaccgacccggagtacctcaagaacgtcggcacggacggcacggggaagccggccgccatagactacaaggactggcagatctccctgtcacgccggttccgcgccatcaagctctgggtggtgctgcggcgctacggtgccgtcggcctgcgcgcgcacatccgccgacacgtcaccacagcaaagtggttcgagcggacagtggcggcggacgaacgcttcgaggttgtggtgccgaggaagttctcgcttgtatgtttccgcctccgggagaggttcgcaggggacgacgcggcggacgagttgaaccgggagctcctcacggcggtgaacgcgagcgggcgggcgttcgtgacgcacttcgtggtggacggcaagttcgtgatccgcctcgcggtcggcggtgctatgacggagatgcggcatgtcatggacgtgtgggaactgctgcaggccagcgccgaccacgttttacgccgctactcctactagtgtattctgctgcacgtatacgtacacttttacgcgcacatgtaccaaaaaaaataaagtatacacctactctccttgtgcttggtttagcttcaccactctgcacgccatgtactttcgcacgctgaggaccggaaatagcaagtgatttcatatccc

SEQ ID NO: 2352 - DNA, 1079 bp, Zea mays
  Clone ID: 700210471_FLI
acgcgaccgaccaccatggccgccgccgcgctcctcctctcgccgcggctcgtgtctttcccgcctcacccgagcctcgccccactcttcaccaagagaccaccgccctaccccctcggcggcgccggcgcgaggctccgggccgtcggggacgggcccggcgcggggctgccacccgagcaggccacggtctacgacggcgcctacggtccctggaccctggaggactccgacgtgcgcgaggtcctgctgtaccggtcggggctggtgacggctgcggcgtccttcgtggcggcggcctccgcggcgttcctgccggaggggaaccccgccgcctccgccgtcaccggcgccgccgacctcctgtacgccgccggcgccgcggggctgggcctgtcgctggtcctcatccacatctacgtcaccccgataaagcgcttcctccaggcgctgtgggcggccggggcgctcggctccgtcgggacctacctcgtcgccgcccgcccgctggatgagggcctcgtgcagtacgtgctggaccaccccgccgcgctgtggttcgtcggccccacgttcgccgcgctcactggcctcgtcttcaaagaaggtctctgctatgggaaactggaagctggcatcttgacgtttcttatccctgggcttcttcttgggcatttgtctggtttaatggataacagcacaaaggcaggtcttttaggactgtggatgcttcttttcacaatctttgccgctagaaaattccagcagcccatcaaggatgacgtcggagacaaatctgttttcatgttcaacgctctccctgaagaggaaaagaaggcgtggatccagaaactcgagaggcaaaaggggcaagagttgtttgagtagaaaagagtagcttgtcttggtgcagccaatagttcgtccgtgaatgttttagcccatgtatatgattatggctccagaaatttgacaaatacacccaagacatgaagatgagaatacgttccaatagagatgtaattacaaatctgttagatcacaggtaagatgtaactaaataaagcagttttgttgtt

SEQ ID NO: 2353 - DNA, 744 bp, Zea mays
  Clone ID: 700210472_FLI
atttccagctcgacaagttggacttgttagagaccagtcagtagctgccattcatccactcccctttcccatcggaggaggacgagagatccgtcctgcggtgtgcgatggactcccccagctgccggctgttcggtgcccagagatcgccgcacgatctcctcggcggcggcgccgttgcggatgtggtgctgtggaggaagaaggaggtggccaccgggacgctggcggccgtggtggcctcatgggcgctcttctactgcgtgcccggctacactctgctctccttcctggcccaggtgctcatgatcctgctcaccgtcctcttcgtctgggccaaggctgcgcagctgctcaacagggcacctccgcctatcccattgatgaaaatttctgacgagtcaatgagtgaagcagcagaaatggttggtagcttcatcaacaaggtgctcaaggatttcgaaaacattgcacttgggaaggataacagcctcttctacaaggtggcttttgtgctgttgctggcctccatagttggacgactgaccgatcttatcactttagtatatacaagtgctattattgctctcacggtccctgcattgctggagaaatccgaagaacacattgccagattcttcaagaaaacttcgatatatgttcaggcatttggcagagcatgcaaagagtataaatgtaagatgacgaatatgatatcggaaacgaagaaactgcgttgatgtc

SEQ ID NO: 2354 - DNA, 950 bp, Zea mays
  Clone ID: 700210555_FLI
aggggggactgcggggagctgaggcggctggggcccgaggcgctggccgcgcgtgaccgcgaggggaggacggtcctgcacgcggtcgccgcggccggcgaggccgaggcggtggcggtgctggtggacatgggcgccgacacgtcggcggtcgacgcgcgcgggaggactccgctggacgtcgcgcgcgacaagggataccaagaagtggtggacgtcctggaacggtgggagctggtgatgacggcggcgaggcgaggcgacctcgggagcctcgagtccctgctcagcaagcgcgccggcgtccgcgggcgcgaccagtacggcctcacggcgctgcacctggccgcgatcaagggacacggcgacgcgatcgcgctgctcgccgggccgggatgcatggacgtcgagtgcgaggacgtggaagggcacaggccgctccacctcgccgtcgagggaggccacgcggaggccgtggagctgctgctcgacatgggcgccgacgccaacgcccggaccaggcgcggcgccacgccgctccagatggcggaggccatggggtacgaggccatcgctcagctcctgtgcgcgagaggtgcggaggtggccgccgcgtcggcgttgtgcgccgcgtcgtcgtcttcatcgtccatatcgtgcgcctgatttgctgccggttatcggttgggagagactgttggacggacacgaaggcttgtttgtttccgctgctgctcctgctgtgcgtgagccgagagatgcctacagccgccgtggctggctttaaagtaagaagaagcgaacccgtccgaaattgtactgtactgtatagtggtttgttctgctttgttgggagagtagctcattgttgagacggtcgattgctatacgcggcgtgctggtggaaaaaaaacattcgctatgcaattgcagtgctttacatgttcctc

SEQ ID NO: 2355 - DNA, 1030 bp, Zea mays
  Clone ID: 700210561_FLI
atgctcttaactatgtatgttaagtgcatcacattagtcggcctccatatgttgtgttcggtgtgctcatcagccatccgttattggaacttggaaggggtgttctgacatgacgttaacaatgtcctctgtttcgccagaacggaggtgggcttgcggagtatgctgtggcatcagaaaatctgaccgtcaagaggcctcctgaggtatctgctgccgaaggcgcagggctgcccatcgccgccggcactgccctccaggcgctcaggaccatcggcgccaagttcgacggtactggcaaggccatgaacgttctggtcaccgcggcatcaggtggcgtcggcctctacgccgtgcagctcgcgaaacgggctggtctccacgtcactgccacctgcggcgcgcgtaacgtagagctggtgaagagcctgggcgccgacgaggtgcttgactacaggacgccggagggtgccagcctgcagagcccctcgggcaagaagtacgatggcgtcgtccactgcactgtcgggaccagctggtcgacgttcgagcctgtgctggctgccacggggaaggtgatcgacatcaccccgaacttgactgccatcctcaaatcggcgctgcacagtgtgaccttcgccaggaagcggctcgtgccactgctcctgtcgcccaacaaggcggacctagagttcctggtcgggctgctgaaggacggcaaactcaagacgctgatcgactcgaggttcccgctgagcgaggtgagcaaggcgtgggagaagagcatcgagggccatgccactggaaagatcattgtcgagatggcagactgatctgggatgcgtccattgccgatagagacttgcagtagcatccactaggctgttggacactacagggttaaagtcaacagatacgaagtactactagtatctgagtttggtcgtcgtacaaattgttcgtgagtggtgagccagtttattggcttgtttttcttttgttttcagctataaacttgaacttcttgtac

SEQ ID NO: 2356 - DNA, 1951 bp, Zea mays
  Clone ID: 700210566_FLI
cacataactgtgcctcctcgccgctgcgccccacctctgctcaggcccacactgccctgatcccgccggagtgcccgcacgcgcgcccttgcctgggccggccgccggcgaggggtctgggcggtcggtcgacgtgaccccccccgcaggcgcgctgtctcttcgtcgccctgctcttttcgaccggcctcgcctcgctgtccgcgagtggcgccgtgtcggcggcacacgccggcggcggtgcgggaacaaggcgagggcggcgcgccttgtcgccgtgcggactgagcatgacttgagccttgagatttaggatgtgtacagaggggctgtattcttgtgtataggttctctttctatcggtcaactgttgctgattcggacggaatgttggaggatcaatcttgcctgatatcaaggtcgctgccgggttcctgtgagcaggaatccagactagcttacatgacttaccacctacttgagatcacgaggagtaagcgcccgcctgggaccctgtcgattgagcacgacgtcgtggcagcattgactaaaaggacaaagtcctctgagcaccaaaacagcgaggcgctggattgtcaaggaagtaatggtcagggcgactcagattcaagcaccctgataagttccattggccgggacaactcgatcaactgtcttgctcgttgttctcgttctgactatggttctatcgcatcactgaaccggagcttccgatcgcttgtgcgcagtggcgaactgtacaaggagcgtcggcagcaggggatttcagaacactgggtctacttctcttgcaacgtgcaggagtgggaggcgtatgacccctaccgttcacggtggatgacgctcccaaggatgccccgcaacgaatgtttcatgcactctgacaaggagtcgcttgccgtgggcaccgagcttctggtgtttggaaaggagatcctctcgcatattatcctgagctatagcatcctgacacattcatggtcgcggggcgttgaaatgaacgcccctagatgtttgtttggatcagctagttttggagagaaagcaattatagccggaggcatggatgctgatggaagggtgcttcgctccgtcgagctgtataactcggaaaccaagaggtggacaacacttccaagcatgaataaggctaggcggaagtgctctggtgtcttcatggatggcaagttctatgtgatcggtggaatggccagtaacacagaagtgcttacttgtggagaagagtacgacctagatagaggtacctggcgggtgatagagaacatgtccgaggggctcaatggtgcaagcggcgctcctccactcgtcgccgttgtcgaaaacgagctatatgcagcgcagtacgccggaaagctagtgaggaagtacaataaaagggacaactcgtggacgacgctgggggagttaccggagcggccagaagccgtggatggctggggcattgcgttccggggctgcggagagcggctgttggtcatcggtggaccgagagtgctgggcggcgggatgatcgagctccattcctggattccaagcgaggggccactgcagtggaacatgatcggaagcaagccctcgggtaactttgtctataactgtgctgtcatggggtgctgatacgtgcgcccctcaaaacataccgtcgacgacacacgaaagattgtgatattgggtttttttttattatcaaatggcataaagcactgattaattccgcctgacgggtaatctctgcattcttttttttgacatttcagattttactcaaggttcgtccaatagagctagtcggttccgtgtactcgttaatagctagctacccattggttcctgtgctcagcacattctatttgcagtccatctgtacctttggtccatatgatatactctgttgaaatgagtttttttc

SEQ ID NO: 2357 - DNA, 1708 bp, Zea mays
  Clone ID: 700210576_FLI
gtttcgaaagttgccctctcggatcgatgagtgctgctgcatgtggtcatcctttctgcggtacatgttggcgaggttacattagcactgctataagtgatggtccgggatgcttgatgctgaggtgtcctgatccgtcctgtgctgctgctgttggacaagatatgataaattcactggctgatgttgaggatacggaaaagtatgggcgatatcttcgcagatcttacattgaagataatagaaagacaaaatggtgtcctgcgcctggatgtgaatatgcagcggaattcgtcatgggcagtggcagctatgacgttaattgcaactgttcatatgggttttgttggaattgcaccgaggaagctcatcgtccagtagactgtgccactgtttcgaagtggatcctcaagaacagtgcggagtcggagaatatgaactggatactggctaattcaaagccttgtcccaaatgcaagcggcctattgaaaaaaatcagggatgcatgcacatcacatgcactccaccatgcaaatttgagttctgctggctatgtcttggtccatggtcagagcatggagagaggactggtggattttatgcttgtaaccgctatgagtcagcaaggcaagaaggagtgtatgatgaatctgaaaggagaagagaaatggcaaagaactcgcttgagagatatacacattattatgaacgatgggcagccaatcagtcgtcgaggcaaaaggcactgggggaccttcaaagcctacagaacgacaagcttgaaaggttaagtgacatacaaagtcaacctgagtcacagctgaagttcattatagaggcatggttacagattgtcgaatgcagaagggtattgaagtggacttatgcctatggattttacctgccagagcatgagcatgccaaaagacagttctttgaatatctgcaaggtgaggcagaatcaggattggagcggctacatcaatgtgcagagaaagaacttcaaatataccttgatgcagaatctccctcgaaagacttcaatgatttccgtacaaagttggctggattaactagtgtgactcgcaattattttgaaaacctcgtccgggctctggaaactggattaaatgatgtaggtccttccactagccatggtacatgcagcaaaagcgcaacttcgaagagcctcggtggtaaaagtaagagtggcaagaaccgagcatcaagcaccagttccaagtcgggtggctcaagccgaggtgtggatgatagtaacatatggacgtgcgatcagtgcacatatgcaaaccccaaatctgccagagcctgccaggcttgtgatcaccagcatcgatagcgctgtcagtccttgctagagatttgaaccccatttgttgagaatcttctggtgctcccccgtgtaatacacaaacatacatgaaattgaatgctagctgatctctgggggtaattgcactaggaatgctgtaggttttcgtgtatctcggattgtttgtcgactgacatcgcctgagaagcctcaactcatcatccagttcgatttgtgtatacaagtgtatcatctgtaacaatgttctttagatgagctaggaggcgtctgctgccaaaggaactgaactgttgtactgctgttgtaatataataatgcatttgtcaaatttaaagaaagttagccatcctgct

SEQ ID NO: 2358 - DNA, 924 bp, Zea mays
  Clone ID: 700210581_FLI
agcggtcctatgtccgtgtggtcgtgcggactgcggacttctcttcctcattccatccccgctgccccatccggccatcccacagcgaatctcccaaaccccggctccctcgattcccaatcccacccctgccacgaagagatcagatgacggcgagctgctgctgatcgagtgcagtggaatcggaggcgatgcgggctagccggccggcggtgcaccctgtggaagcggcccctccgccgccggccgcggcggcggaggggccggaggcccaggtggagggtgccgcgcacccgcgcggggtgcggatgaaggatccgcctggggcaccagggacacctgcggggcttggtctacgccttgcgcaggccttcttcgcagccgctgcgctcgccgtcatggcgtccaccaacgacttcccgtccgtctctgccttcagctaccttgtcgcagcagccattttgcagtgcttgtggagccttttgctagcctttgtcgacatttatgcacttcttgtcaagcgatcgttgagaaatgcccgagctgtatgtatatttactatcggagatgggatcacaggtacaataaccttgggcgcggcatgtgcttcagcaggaatcactgttctcatcggtaatgatctcaacatatgtgcagagaatcactgtgcaagtttcgagaccgccacagcattggcttttataagctggtttgcgctggcgccatcctgtatcttgaatttctggtcgatggcctccagatgataaatataggatgttataaaacatagtatttttgaatggtttctggacaaggtcgctgcttatggtagcagcaaagcaacgcggtgccgtaaagctaattgtaatacccagaaattgttgaatggctgtggaatgtagcacgtggtcgaattgtctgtac

SEQ ID NO: 2359 - DNA, 955 bp, Zea mays
  Clone ID: 700210635_FLI
tttgctgctctccgaccccgagctccgaaggccgcagcatcaggcgcggcccccctcgcgtgtgaccgagatggcgctgccgaatcaggggaccgttgattaccccagcttcaagctcgtcatcgtcggcgatggtggaactggtaaaactacatttgtgaagaggcatctcactggagagtttgagaagaaatatgaaccaaccattggtgtggaagttcatccgttggatttcaccactaactgtggtaagatcaggttctactgctgggataccgcagggcaagagaagtttggtggcctcagggatggatactatatccatggccagtgtgcgatcatcatgtttgatgtaacttcaaggcttacttacaagaatgttcctacgtggcatagggacctgtgcagggtctgtgaaaacatccccattgtcctctgcggtaataaggttgatgtgaagaacaggcaggtcaaagccaagcaggttactttccacaggaagaagaatctgcagtactatgaaatttctgccaagagcaactacaactttgagaaacctttcctgtaccttgcaaggaagctggctggtgatccgaaccttcactttgttgaagctgttgctcttaagcctccggaagttaccatcgacatggctatgcagcagcagcatgaagctgagcttgctgcagcagctgcacaacctcttcctgatgacgatgatgatctgattgagtagaaaggatcatgagtcttgaacttgagcaggagttgtgccttgcgtgttttaagttgttctagggtgaactcttgagttctcattgtctggatcatctttttctccttggatgtgttgcatcttttgagtgtggaaatggatggtactcctcgccatgaatttgctggctactttatacattgctttgtaactctgtttgatgataaactttgttgtggc

SEQ ID NO: 2360 - DNA, 912 bp, Zea mays
  Clone ID: 700210648_FLI
gtttgtttgttgctcgttcgtcgttttcagaaacccacccaactgatgaatgaattcatcgaaaaaaggaaaagaacagaagaagaaaaaacaaatctcctctcgtctcctgattgattaattgtaattaattaattgattaattaccccaaccgccagtccaccacctgcgagattcttctgagctagacgatgacgacatcatctttgagcatagtgggtctcaatctgacaggaaaacgtcaggttccatggcttcgtcagatgttctaactgtcaaccaactaatagaatctgttcatgagaccgcaaggcaagttgccaacgttccagttcccgccaaccctgtaccgtacgaccagatgaagagtcagtgcgaagccctggtcatggagaagcaacagaagatgtctgtcctcttgagcttgaagcattcgatgactgactcgcatggttcagccggtgtggatgggcttgaaacgaatgagtcttctctgctgtctgagcctgagttacagtcaacaaggaaggggcgcatgcgccgctgcgattcagcgtccagcgaatcagactgttcgttcaggctgccacctgctagcccatatgacaagttcctgaaggcggctggacggtagcctgatgcggttgcggcagcttggcgcttcagttttcaactctctcaagtctgcatgagagttcagtacaagtgattcatcggcaccctctcgttctcggagtccattctttcaagtgtatattatatttacatccctcgacaaggtgtataaagttctgttactgtttccttcagaataaaccgaagtgtataggcactagcggatgatcatgttcaagacggtatttgttcatttgttggtcgtgaaaagaaaacattttacacaaaaaaaaaac

SEQ ID NO: 2361 - DNA, 2395 bp, Zea mays
  Clone ID: 700210668_FLI
gtgactaccacgatcaaggtgggcttgtcagtaactgccttcgcctccttaatggctgcgcggatgtcatcatatccggtgttcccattcttaacccagatcgtgtgccacccaagagcctcgaagcgggtgctcacgtcctctgtgaatgcaatctccgtgtctccgtcgatggaaatgtgttcagttcttccaatctcttgcaagcacaactgcacaagggaacaggaggaaaaaagagcgagaactcgcagctgacgcgcacacggcaagccccaatcggagccgcggaccggatcagaactaggtctcgaggcgatggcaagcggaggcgagggcgcagggagcggcgaatcccctcccgccgcctcagtggaggcggcagcggtcgaggcgacgctgcacatccggtgcgcgaacggctccaagttcacggtgcagacggacctgggcgccacggtgggcgcgttcaaggaggtcttatccggtagctgcggcgtgccagcaccgcagcagcgcctgatctacaagggccgcatcctcaaggacgagcaaaccctagacagctatggcgttgagacggatcacacaattcacttggtgcgaggtgtcgccacaccagctgcatccagtgcacctgctgctgccaacccccttgcttcatttactcctagtagtggccctgcaggtggcctgggaggcctatttccaggtgttgatgctccaggaaatgacaggccatcaggtatatttaggccaggatttccagaattagagcaagttgagcaacatttaagccagaatcccaacttgatgagggagataatgaatatgccggcaatgcaaaatctcatgaataaccctgatttaatacgtaatatgatcatgaacaacccacaaatgcgcgagatcatggatcggaatcctgatcttgcccatgtgctcaatgacccaagcgtcctccgccaaacactcgaagctgctaggaaccctgaaatcatgagagagatgatgcggaacacagacagagctatgagcaacattgagtcttctcctgaaggttttaatatgctccgccgcatgtacgaaactgtccaggagccatttctaaatgcaacaacaatgggtggggaaggaagcacagcctcaaatccattttcagctcttctcgggaatcaggggtctagccaacctggtcaaggtcaacctgcaacaaatgctccaactactggttcagaatcgacaactggaaccccagctccaaatactaatccacttccaaatccctggagcaccaatgctgggagtgcacaaggtgcaacacggactcctagtggcaatgcaagaactggtggtgttgggggcactggtgccaccggtggactgggaggattgggttcaccagaattgagtagtttgcttggtggtcttgctggcagtccaagaactggttctgctggtggtttaggaggttcgggttcaccagatttggggagtatgcttggtggttcacctgatgtttctccgttcagtcagatgttgcaaaaccctgcaatgatacagatgatgcagaacattatgtctgacccacagaccatgaaccagttgcttaacctcaacccaaatgcacgcaacctgatggaatcaaacactcatatgagggaaatgtttcaaaatccagaatttcttcgccagctgacatcgcctgagactttgcagcaattactctcatttcagcagactttattaggacagcttggtcaacatcaacctagccagggcgggaacaatgcaggcagtgccacaggtacacggggaaaccctagccttgacaccttgatgagcatgctcagcgggcttggttcgggaggtggtctaggtgttccaaatacctccagcgtgccaccggaggagctctatgccacacagcttactcaactccaagaaatggggtttattgacaccgcggagaacattcaagcactggtcgctactgctgggaatgtacatgctgcggtggaacgccttcttgggaaccttggacagtagctaacccgagcgagccagacactattcgtaaatcttaaaattgtcgcgcatatgcaggagtgttcggcttaatgttcctcaagccccagaatttgaaggcggcggcgtccatagtcccgaaaacaaaataatgaaagagtcaggcagccgtttacttttgtcatacatggtggtcttgtcttttttttttacagcgatgtattttgcaatgttgattggtgtacatacgtatcggtcggatgttacctccctgtagtctgtcttttccaactatcgattcttgatttccaatatactatcaaatcaaattattatctattctaatccaacgggtggtttcctctgc

SEQ ID NO: 2362 - DNA, 541 bp, Zea mays
  Clone ID: 700210688_FLI
gagatttctctgtgttttcacgcacaaggatcgtgccccggccagccccagctggtagcgttgcttctcgatcttgcgattgttagctagcttgcaaggtcaaggacgggccggcgatggtgaacctggtggaggcgcagaaaccgctgctgcacttcctggtcaggagggccgggctgcggcagcacgttgtcgacgtcgatggcgccggcacggtgatgaccttctgggtgcccaaggacaaggttcccaaggagaagggcaccgtgcaggacatcacgggcgccggtccagctacggccgaggccgccgccagcaaggtaccggccgctccggcggcggcgaaggagggcagcagcagcagcagcaggcccgccgtggtgctcgtgcatggcttcgccgccgagggcatcgtaacctggcagttccaggtcggcgtgctggcgaagcagtacgacgtgtacgtgccggacctgctcttcttcgggggctcgacgacgccgtcgacggaccggtccccggggttccaggcggagtgcct

SEQ ID NO: 2363 - DNA, 953 bp, Zea mays
  Clone ID: 700210711_FLI
tcctgtacgccatcgccgtgctgtccaagatcgacccgtgctggggccgcaagtacatgccgcaggcctactccatggtggccgacttcatgacgctgtcgcgcaacaaggccggcgccagcttcacccgcctgcggatgttcgacctctggaagctgcactcgtgggccggggggctgacggagttcgccgacgggcgcaaccaggagagcaccagcgaggccgtgaacgcctactactcggcggcgcttgtggggctcagctacggggacgcgcacctcgtctccgtgggctcgacgctcaccgcgctggagatgctggcggcgcagacgtggtggcacgtccgggaaggggagggcatctacgaggacgacttcagcgggaacaaccgcgtggtcggggtgctgtgggccaacaagcgcgacagcgggctgtggttcgcgccgcccgagtggaaggagtgccggctggggatccagctgctgcccgtgctgcccatcagcgaggcgctgttcccggacgtggcgttcgtcaaggacctggtggcgtggacgctgccggcgctagcgagggacggcgtgggcgaagggtggaaggggttcgtgtacgcgctggaggggatctacgacagggaggcagcgctgaccaagacccgcgccctcaaggggcatgatgatggcaactcgctgaccaacctgctgtggtggctccacagccgaggcagcgtcgtctgtgacggcgacgctgggttcggccgctgctgctggtaccgccagtactgccactgacgaaagtgtggtgaccagcacgagtgtggttgttcatgtctgcttgcggagcagagcacgtagatcagtgaagggatggagttgatacgttgcaaagtcattgtggttgttattcgttgatactacacacttctatacagttgaataaagtcagtcctttatgtg

SEQ ID NO: 2364 - DNA, 1193 bp, Zea mays
  Clone ID: 700210770_FLI
gctctagccttccacccttcatccaccagccgctcctcgagcacccccgtcccgcgccgcctccggctccggcgagatgtcacgcttcggtcgatccggcccgccgccgccgatccgcgacacgtactcactcctcgtcctcaacatcaccttccgcacaactgctgatgacctcttccctctcttcgacaagtacggcgagattgtcgacatctacatcccaagggaccgccggactggtgactcgcgcggattcgcgttcgtgaggtacaagtacgaggacgaggcacagaaggcagttgaaaggctcgatgggagattggtagacgggagggagatcatggtgcagtttgccaagtacggcccaaatgctgaacggattaataaagggagaatagtggagccagttccaagaccaggggggcgttccaggagtcacagtccaagacggaggtaccgtgatgattatcgagatgaccatgatagagattatagaaggcgaagtcgtagccggagtagagatagatacacccgtgacaggtacagggatagggattaccgccatcgtagcccgagtcgcagctacagtcctgatgattacaagaagcgtgggagagacagtttgtcacctgagcgaagaagccctcgtcgtagccgcagtcctgatgattacaagaggcgtggcagagacagtgcatcaccagcaagtaagagccctagtcgctccccacctcgcaagatgtcaccttctcctgagagatctcccgtcaggcgcaacaatgaccgatctccacgctctcggagcccatcgacataagcgcaattcacttgcaaagcatcttgagtagctcaggatgaatggacttgctctgatcctatgtgtacgcatttgctcgatggtggcctcttctcagctaaagttgtgtagtgccgtctttcagttgctgcttcaaccttggaatactacttctgtttggcacctgaactgcttatcaaaaactttatgtacaccagttccattccacttttaaccttcgttttagcattatcctattatcagttatcaccatcttatcagtatttagtacttactattcatggtgacttgcacctttctagttacatgatgcagtgaagatgtgctggctgatatgcggtcaacatgcacgtagcttactgttgaagttgatatt

SEQ ID NO: 2365 - DNA, 394 bp, Zea mays
  Clone ID: 700210777_FLI
tgatgagagcgtccacgtcagcagcaacgcgaagcatgtagcgcagaggaggccgtgcgtgtggaacggcatgaagcggccctgctacctgttcgcgcgcaagttctaccccgaggcgcttggcaacctgatgaacatattctcgaacttcaccgttatctgagcagctgaaggaggcaactctgtcggatcagagtccagacgtcgctacctacctgctgccgcaactctagtagatagattgctggtgatggctgctgagctaaggttatttgccagctcttgagacggcaagttttgctggtgtggaacgttggctagaatgtgacgtgtggacttctgttgttgatactgctgcagatgaattgtgattaaattttatgatctttcatct

SEQ ID NO: 2366 - DNA, 1599 bp, Zea mays
  Clone ID: 700210827_FLI
cggctcccctacggcccacgccacgtcaccgcggtccgcacgcgccccacggcttccgccgcctcctaaccctagaatcttcgagaagcacccggcgaagagcgcgctgccacggcgctttccggaaacttcttggagagagagagagagagagacggccccgcagcggcggaggcggagatgggggcgtcggatctagaccggcagatcgagcagctgaagcggtgcgagccgctcacggaggcggaggtcaaggcactgtgcctcaaggccatggagatcctcatcgaggagagtaacgtgcagcgcgtcgacgcccccgtcaccatttgtggagacatacatggacagttctatgacatgaaggagctgttcaaagttggaggtgactgcccaaagacaaactatttgttccttggggattttgttgaccgaggattttattctgttgaaacttttttgcttcttttggctttaaaggttaggtatccagaccgtattaccttaatacgaggaaaccatgagagcagacagatcacacaggtttatggattctatgatgagtgccttcgcaaatatggctcagtcaatgtctggagatattgcactgatatattcgactatttaagtttgtctgcacttattgagaacaaaatatttagtgtccatggaggcctttctcctgctatcacgacactggatcagataagagtaatagaccgcaagcaagaagtacctcatgatggggctatgtgtgaccttctatggtctgatccagaggacactgtagatggttggggactaagtcctcggggtgcaggattcctctttggtggaaatgtggtctcatcatttaaccattcaaacaacatagattacatttgtcgtgcacatcaacttgtcatggaagggtataaatggatgttcaatagcaagattgtaactgtatggtctgctcctaattactgctacaggtgtggcaatattgctgcaatcctagagctggatgagaacctgaataagcagttccgcgtatttgaagctgctccacatgaatcaagaggtgttcctgctaagaggccagcaccagattactttctgtgatgctacacagcgaacgcttgagcttactgtgctttcaagcgctggacctcatgttgcaagaagagctcaggccctacagctttccagccaggaggtggttttcaggatgtgtaaattgagtgtcatcttctcccttcaggtccatgatttgtaagagagttggattttggcatccagttttttcacagaacatcacccatttgagctggagaaatacgcccttgcgaaggggtttcatgtgatgtgctaaaagtacacgttgtaagatttttttttgcgattgcataccccctagaaaaaccgttcctggaatatgtggcaatcaggaaatgtgtcgatgctctggaaagtgtaggagatttttgtagtagtcatttgcgcgtgctgttagggactagggagcatgtggtcaggggacactagcactagcttgtcggcatgcaatggtgtattgtaactgtctttatgcagcatctctaattcaaatagctaact

SEQ ID NO: 2367 - DNA, 699 bp, Zea mays
  Clone ID: 700210837_FLI
gggacaggttcgtggccgtggagttcgacacgttcgacgactcctgggatccccacctgacctacgaccacatggggatcaacgtgaactccgtcgtgtccgtggccaacatctcgctgccgagcttcagcctgaacgggcagatgagcgcgcgggtggactacaacagcagcaccagcgtgatgggcgttgacctgagattcgaccgcagccccaagttcggcagcgctacgcctatcttcaacgtgagcgccaaggtggatctcagctccgcgctgccggagcaggtggccatcggtttctcggcggcgaccggcgcgtccatcgagctccaccagttgctctcttggtccttcagctcggtagctcctgggactgggagcccaaccgatccaggtgctttggcttcatcgaatcccagaacaggactgaaagttgctcttggaatcactagctcgatatccatcttgctctgcgcggcagttgttgctctgctccgtgcactacgaaggaaacacctggcgttggctgagatacagctagaatcggatgctcgaggaaggctctgttagcaacaactgggaaggggatccaagaggaagagctcagaggagaataagacttggagaagggaatagttgggaggaagacgagtttgtctgatatttgatagctaaattgttcatgcccctattacac

SEQ ID NO: 2368 - DNA, 979 bp, Zea mays
  Clone ID: 700210842_FLI
gcgcgtgcgaaccaagcagaccccagcagaagaagcgaagtcgtcgccggagcaggaggaagagcgaggagcaacatgtcgtggcaggcgtacgtcgatgaccacctgctgtgcgacatcgaaggccagcacctcagcgccgccgccatcgtcggccacgacggcagcgtctgggcacagtccgagaacttccccgagttaaagcctgaggaggttgctgggatgataaaggacttcgatgaacctggaactcttgcaccaactggtctttttgttggaggtacgaagtacatggtgatccaaggtgaacctggagttgtcatccgaggaaagaagggcactggaggcattactatcaagaaaactggcatgtccttgattatcggtatctatgatgagccaatgactccagggcaatgcaatatggtggtggagaggctcggcgattacctgatcgaacagggcttctaagggggtgtttggtttgaggaatcactccatccaaaatgtggtggtgcatcatggatccattcctcaaatttggtgggatgaccccattcctcatattagtactaactaactaactataaggaatgaggtgatgatggatcaactcattccattccacaaaccaaacaaaaaaagtgaggagtgagaagatgattgactagctcattcctcaaaccaaacagtctataagtttgtcataatgctattttggtcattgggcacttaagtttgcacctcatttggttctgtaatatgtgggcttgtgcatgtgcttggcgtattgcatgcagtgaataatttatcttcgcgttgggttgctgacaatgttgggaacggatttgaattggggtttatgcttgccatctcctcatatctcgaactcagctgctgtttcactgagtaatgtacatttccctggtaatggtacttgtgcactctgctgctttatggaaaagagtgcattttactg

SEQ ID NO: 2369 - DNA, 1651 bp, Zea mays
  Clone ID: 700210852_FLI
cgagcaagggccgcagccggagctccaatggcctccttctcctccctctctgcctcctcctccacctccaccccgtccttcaacctccccgcaaaaacctccgctggcacaggctccctgtcattccacagggcgagggagtcgcagaagtccagggccaggatggtgacggtgcgggcggaggcggttgacacgaccatcagcccgcgggtgaatgcgctcaggccgtccaagaccatggccatcaccgaccaggccacggcgctgcgacaggccggcgtgccagtcatcggactcgccgctggggagcccgacttcgacacgccagccgtgatcgccgaggctgggataaatgccatcagagatggggccacaagatacacgcctaatgctggaactctggagctgaggaaggctatctgcaaaaagcttgaggaggagaatggtctatcatactccgccgatcaggtgctagtaagcaatggagccaagcagtgcattacacaagcagtactcgctgtctgctcacctggcgatgaagttttgatacctgcaccatattgggtcagctaccctgagatggctagactggctggtgcaacgccagttattctccctacaagcatatcagacaattacctgctaaggccagagtcacttgcctcagtgatcaatgaaaattcaaggatcttgattctctgctctccatctaatccaacagggtctgtgtatcctaaggagttgcttgaggagattgctgctatagtcagaaagcaccctagactcctagttttatccgatgagatctatgagcatattatctatcaacctgctaaacacacaagctttgcttcattgcctggaatgtgggaaagaacgttaactgtgaatggattttctaaggcttttgctatgactggttggagacttggatacttagctgcccctaaacattttgtcgcggcctgtggaaagatccaaagccagtatacctctggagccagtagtatatcacagaaggcagggcttgcagctttgaacctaggttatgctggtggtgaagcagtatcaaccatggtgaaagcattccaggagcgtcgtgattaccttgtaagaagctttagggagctgccaggtgtcaagatatcggaacctcagggagccttctatttattcatcgacttcagctcgtactatgggtctgaggtggaaggttttggtaccatcaaggactctgagtccctctgtctgttcctgttggagaaggcacaggttgcgcttgtccctggggatgcatttggcgatgacaagggtgttcgcatttcatatgctgcagctatgtcgacactgcaaactgcaatgggaaagataaaagaagcgatggctctgctcaggccccctgttgccgtttaacaaaaccaacgtatcgctaatcagttgtggaccaaaggcttctgcaatgcactatcatattaaatacattcagttgacatgatctatcttcttccctttatggaaaaaaatgttgctgctgtcatttggctttggtttgtatctgaagatttatatgtacttgctataatatagatgaactgtgcaacgctttttttacctgcaagaatagaaatggtaaacatgactttattttgac

SEQ ID NO: 2370 - DNA, 1036 bp, Zea mays
  Clone ID: 700210855_FLI
attgtggagaagtgcactcttaaactagtcgatgagtacaagcacatgctgtgccaggccactgaaccactatctacgtttttgcagtatataacttatggccacatgattgacaatgttgtccttattgtaactgggacactgcatgagagagatgttaacgaacttttggagaaatgccacccattgggcatgtttgacagcattgcatcacttgctgttgctcaaaacatgcgtgagctttatagattggttctagtcgatacaccactggccccttacttctcagagtgcattacatctgaggatttggatgacatgaatattgagattatgaggaacactctctacaaagcatatcttgaggacttctacaaattttgccagaaactaggtggtgcaacagctgagatcatgtgtgatctcctttcatttgaagctgacagaagagctgttaacattacaataaatagtattggtactgagttgacaagagatgaccgcaggaagctgtactccaactttggtttattgtatccatatggccacgaagaattggccgtttgtgaagatgttgaccaggttcgtggtgcaatggagaagtacccaccataccagtctatattttccaggatttcatatggagaaagtcagatgttggataaggcattttatgaggaggaagtcaagaggctatgcttgtcctttgagcagcagttccactacgctgttttcttcgcttacatcaggctccgcgagcaggagatcaggaacctgatgtggatctctgaatgtgtcgctcagaaccagaagtcccgggtccatgacagtgtcgtcttcatattctgagaacccccgccactatatatgtatgtacaaaatgcctgctttgatgatggcacaatcgctcgacaattataaatctgggacttattattattcccattccctctgttagacgccggcgtaaaaaatgccagacctggagttgatgtattatttgttttgtagtcaaataaaggtgtgattatctggc

SEQ ID NO: 2371 - DNA, 1046 bp, Zea mays
  Clone ID: 700210857_FLI
cttttagatcggttccatttgttctggttagtactgaattaggaaatcctacgggagtggtacatataaatgtggataaggcggatcaaccgttgcctcttactacagtgtttcataaacttatcccacttgagacgactccttacacattgtttcaaactattattggcaacggctatccgattgcgttgttggatgaagaaaaaatactactgattggtaagaaaattacagcaataggactatgtcaagcaaaggatgcagaaagtgttgagataacatcgtgcccagagatcccctttttcttatctgaactaaccaaggatgagatgcaagctcagctggcttcacgtgctaggatactcttttggggtagtattgctttgggaaccttgtcggtttgcctagtgggccatgccatttacaggggctggacgagaatcaaactacgaagagaggctaggcaggcacgacagatgtttgaggaggctgaagatgctattcacagggatgactctagtgatgatgatgaaataggagacgggcaactatgtgttgtgtgcttaaggaagagaaggagggcagcttttattccatgtgggcatcttgtctgctgttccgaatgcgctttaacaatagagcgtacacctcatccattgtgccctatgtgtcgtcaagacatcagatacatgatgagggtttatgactcttgagtgctgtggaagaggttgcaaaaaaaaaatgctgctcgtcgtgatgaacgcagtgctgttcctgctctacggtaacctggcaccagataacagcggtgtccctgcgccggagccttatgcttgccagcggataacatcgccgaagcgttaagtctgttctgatgctggctgcgtggtgtttagtttgccagaacagtggtgtccactctacgccgaatcattgagaaactctagtgttagcaaattgtaattttagaacaggcgtagagtggagtttttaaaactctaaactggctgcctggtgaatgctgttctaacaatactgtggttttc

SEQ ID NO: 2372 - DNA, 3129 bp, Zea mays
  Clone ID: 700210863_FLI
gaggtgaaaggagatccgtgagaggcgcctcccccatggctgagaaggagggcaacctcgaggccgtcctcaaggaggccgtcgacctggagaacatccccctcgaggaagtgttcgagaatctgagatgcagccgcgagggtctctccaccgagcaggcgcagcagcgcctcgaaatctttggcccaaacaagctcgaggagaaggaggagagcaaattcctcaagtttctgggtttcatgtggaacccactgtcctgggtcatggaggctgcagcaatcatggccattgctcttgccaatggaggggggaagccaccagattggcaggactttgtcggtatcataactctgcttgtcatcaactcaacaatcagttttatcgaggaaaacaatgctggtaatgctgcagcagccctcatggctcgcctcgcacctaaagccaaggttcttcgtgatggccgatggaccgaggaagacgcagccattcttgtaccaggagacattgttagtattaaactcggagatattatacctgcagatgcacgcctccttgagggggatcctttgaagatcgatcagtctgctctgaccggagagtcactgccggtcactaaaggtcccggtgatggtgtctattctggttcgacggtcaagcaaggtgaaatcgaagctgttgtgattgccacaggtgtccacactttcttcggaaaggctgctcaccttgttgactccacaaaccaagttggccatttccagaaggtcctgacggctatcgggaacttctgtatttgctcaattgctgtggggatgtttgttgagatcattgtcatgtatcctatccagcacagggcttaccgccctgggatcgacaacctcctcgtccttctcattggaggcatccccatagccatgccgaccgtcttatctgtaactatggctattgggtcccatcgtttgtctcaacagggggctatcacaaaaagaatgactgcaatcgaggagatggctggcatggatgttctttgcagcgataaaacaggaaccttgaccctgaataagcttactgtggataagaaccttgttgaggtttttgaaaggggcactactcaggaccaagtgattctcatggctgccagagcgtctcgcacagaaaaccaagatgctattgatactgctatagttgggatgctagctgatcctaaagaggcacgcgctggaatccaagaagttcacttcctgccattcaatcctactgacaaaagaacagcactgacatacattgatggtgatgggaaaatgtatcgtgttagtaagggtgcacctgagcagattctccacttggctcacaataagtcagatatagagaggagagtacatgctatgattgataaatttgcagagcgtggacttagatcacttgctgtagcatatcaggaagtgcctgaggggaggaaagaaagtcctggtggtccatggcacttcgttggtctcatgccactttttgaccctccaagacatgacagtgctgaaacaattagaagggcactcaaccttggtgttaatgttaagatgatcacaggggatcagttggcaatcggaaaggaaacaggacgtcgtctaggaatgggtacaaatatgtacccctcttctgctttattaggacagaacaaggatgagtctattgctgctttaccagttgatgatctcattgagaaagccgatggttttgctggtgtattccctgaacataagtatgagatcgtgaaacgtctacaagcacggaagcatatctgtggaatgactggggatggagtaaatgatgctccagccctgaagaaagcggatatcggtattgctgttgccgatgcaactgatgcagccaggagtgcttcagatattgtcctcacagaacctggacttagtgtgatcattagtgctgtgcttactagtcgtgcaattttccagcgtatgaagaattacacgatctatgctgtctctatcaccattcgtattgtgcttggatttatgctccttgccctcatttggaaatttgatttccccccattcatggtcctaatcattgcaattctaaatgatggtaccataatgactatatccaaggatcgtgtaaagccatccccattacctgacagctggaagttggctgaaattttcacaactggagttgtccttggtggatatcaggcaatgatgactgtcatcttcttttgggctgcatacaagacaaactttttcccaaaaatatttcatgtggaaagccttgagaagacagctcaagatgatttccaaaagcttgcatctgctgtttacctgcaagttagcaccatcagccaggccctcatcttcgtgacaaggtcccggagctggtcatttgtcgagcgcccagggtttctattggtctttgctttcttggttgcgcagctgattgccacactgattgctgtgtacgccgactgggcgttcacttcgatcaaaggcattgggtggggctgggctggcattgtgtggctgtacaacatcatcttctacttccctctcgatatcatcaagttcctcatcagatatgctcttagtgggaaagcgtgggatcttgtcattgagcagaggattgcgttcacaaggaaaaaggactttggtagggaggagagggagctgaagtgggcacatgcacagaggaccctccatgggctacaggcacctgatgccaagatgttcccagagaaggctgggtacaatgagctgaaccagatggctgaagaggcgaagaggagggccgagattgcaaggctgcgggagcttcacacactcaaggggcatgtggagtctgttgtgaagctgaagggactcgacatcgagaccatccagcagtcctacacagtgtaactttgcctgcccttcccagaggaagtttcttgttctttttacccaccggcgtgtgaatttgatggtggctggcttctctttgttttatttatttatttaaccgagctgcaagcaccgacaagtagctgaaatgagacagacagacccctcgctgtaatccctgatttcttctgtcctctcctcacatggtatgccaaccagtttatgaactttgctcggctat

SEQ ID NO: 2373 - DNA, 1011 bp, Zea mays
  Clone ID: 700210885_FLI
cacagcttgcgcccgcaatggcactcgtctccgcctcctcgtcctccaccaccgccgtcacggcgctccccaggaatgggcagcgggcgtcgtcctccttcctcggcggcaagacgctgctgagacaggccgaggcggcccggccgtcgttcgccgtgcgcgccgcggcggaccccaacaggccgatctggttccccggcagcacccctccgccgtggctcgacggcagccttcccggcgacttcggctttgatccctggggcctcggatctgacccggagagcctgcggtggaacgtgcaggcggagctggtgcactgccggtgggcgatgctcggcgcggcgggcatcttcatcccggagttcctgaccaagatcggcgtcctcaacacgcccttctggtacaccgccggcgagcagcagtacttcaccgacaccaccaccctcttcatcatcgagctcatcctcatcggctgggccgagggccgccgctgggctgacatcatcaagcccggaagcgtcaacaccgaccccatcttccccagcaacaagctcaccggcaccgacgtcgggtaccctggtggcctctggtttgacccgctcggctggggcagcggctcgccggagaagatcaaggagctgcgcaccaaggagatcaagaacggacgcctcgccatgctcgccgtcatgggcgcctggttccaggccgagtacaccggcaccggccccatcgacaacctcttcgcccacctcgccgaccctggccacgccaccatcttccaggccttcacccccaaatgaggagttgaacttattattagcattttgaggagtgctaccacacatgcatcgtcaggttgatggccgatatatatgaaacttcacattttttttggtggggaaggactgctgagtagactgtcaatgatggaatgctcgtggtgcgagtgcgatgcatggtgtacttgtactatgttgtaaccagtgtaaaaaggggatactcgttagatgt

SEQ ID NO: 2374 - DNA, 1806 bp, Zea mays
  Clone ID: 700210903_FLI
caagaaggctggtgccatgaatgcacttgttcgtgtatcagctgtccttactaatgggcaatacatgttgaatcttgattgtgaccactacatcaataatagcaaggctcttcgagaagctatgtgcttccttatggacccaaacctaggaaggaatgtctgttatgtccaatttcctcagaggtttgatggtattgataggaatgaccgatatgcaaacaggaacactgtgtttttcgatattaacttgagaggtcttgacggcattcaagggccagtttatgtgggaactggttgtgtgtttaacagaacggccttatatggttatgagcctccagtcaagaaaaaaaagccaggcttcttctcttcgctttgtgggggaaggaaaaagacgtcaaaatctaagaagagctcggaaaagaagaagtcacatagacacgcagacagttctgtaccagtatttaatctcgaagatatagaggaagggattgaaggttctcagtttgatgatgagaaatcgctgattatgtctcaaatgagcttggagaagagatttggccagtccagtgtttttgtagcctctactctgatggaatatggtggtgttccacaatctgcaactccagagtctcttctgaaagaagctattcatgtcatcagctgtggctatgaggacaaaactgactggggaactgagattgggtggatatatggttctgttacagaagacattctcaccggattcaagatgcatgctcgaggctggcgatcaatctactgcatgcctaagcgaccagctttcaagggatctgctcctatcaacctttcggatcgtttgaatcaagtgcttcggtgggctcttggttccattgaaattcttttcagcaggcattgtcccatatggtatggctatggaggccggcttaaattcctggagagatttgcttatatcaacacaacaatttatccactcacatcaatcccgctcctcctgtactgcatattgccagcagtttgtcttctcactgggaagttcatcatcccaaagattagtaacctagagagtgtttggtttatatcgctctttatctcaatctttgccactggtatccttgagatgaggtggagtggtgttggcattgatgaatggtggaggaacgagcagttctgggtcattggtggtatttctgcgcatttatttgccgtcttccagggtctcctgaaggtgcttgctggtatcgacacgagcttcactgtcacctctaaggccactgacgaagaaggtgattttgccgagctctacatgttcaagtggacaacgcttctgatcccaccaaccactattttgatcatcaacctggtcggcgtggtcgctggcatttcctacgcaatcaatagcggttaccagtcatggggacctcttttcgggaagctcttctttgcgttctgggtgattgtccacctgtaccccttcctcaagggcctcatggggaagcagaaccgcacgccgaccattgtcgttgtctgggctatcctccttgcgtcgatcttttccctgatgtgggttcgtatcgatccattcaccacccgggtcactggccctgatatcgcgaaatgtggcatcaactgctaggatgagctgaatatagttaaagagtggaactagacgcattgtgcatcgtaagttatcaagtgggtggctctttttataatatggtaggaacttggtcgggaaacgttaattacatatgctatatggacctccgctggtctttatccgtaagttaatatataaactgcttttgg

SEQ ID NO: 2375 - DNA, 666 bp, Zea mays
  Clone ID: 700210945_FLI
gtcgtcttgctccagccgccgtcggatcggatccgatccaaagcaagcagcagcagccggctcctcctccgcctcccgcagcagccacaccccgtccgtcaccagaggaagaggaggaggatgtcgggatcgaaggtgtacacccttgaggaggtggccaagcacaacaccaaggacgactgctggctcgtcatcggcggcaaggtgtacaatgtgaccaagtttctggaggaccaccctggaggtgatgatgtcctgctgtcttccactgccaaggatgctaccgatgatttcgaagatgtggggcacagcaccaccgcccgtgcaatgatggacgagtacctcgtcggtgagattgatgcggccacgatacccagtaaggtgaagtacacgccccccaagcagccgcactacaaccaggataagaccccggagttcgtcatcaagatcctccagtttttggtccccctggcaatactgggcctggctgttgctgtaaggatctacaccaagtcggaatctgcctagtcatctgaaccaagttagcgagggttgcatcttgtaccagagtcgcatgtcagaaacttgagtctttgctgtcatacggttatatttatatgagacttctatcggtaaaatgaaatggatgtcagaaacttcattgtt

SEQ ID NO: 2376 - DNA, 1455 bp, Zea mays
  Clone ID: 700210962_FLI
gttcgatctgtgcagcagatctgaggtcccgggcgaccgtgaagcagcttcaatcgtcggcatggcgctcgtattgcatagtggggctggaaacaagaatgccttcaaagcacttattgctgcagaatacagtgggatcaaggttgagttgaccaaggattttgagatgggtgtctccaacaagacccctgagtttcttaagatgaacccccttgggaaggttcctgttctggagactcctgatggccctgtttttgagagtaatgctatcgtacgctatgttgctcgcttgaaggatgacaaccctctttttgggtcttcccgtattgaacaagcccacgttgagcaatggatggattttgccgcaacagaagttgatcctggtgttgcatggtacttgtatccaaggcttgggtacctcccttatgttagcacaactgaggaaacagctatttcttcattgaagaggtcgcttggtgctctgaacacacaccttgcttcaaacacataccttgttgggcatgctgttactctagctgacattgtaatgacatgcaacctctaccatggaattgcacggatcttgaccaagaccttcacgtctgatttccctcatgtcgagaggtatttctggaccatggttaaccagcctaacttcaagaaggtcattggtgaggtcaagcaggcagagtctgcacctcctattccgaaaaaggctgctccttctaaggagccaaaggcaaaggatgtcaagaaggaggctccaaaggaggcccccaagccaaaggtggttgaggcaccagcagaagaggaagcaccaaagccaaagccaaagaatcctcttgacttgctgccaccaagcaagatggtccttgatgactggaagaggctatactcaaacacaaagactaacttccgggaggttgccatcaaaggtttctgggacatgtacgacccagagggctactctttgtggttctgtgactacaagtacaatgatgagaacaccgtctcctttgtgaccctgaacaaggttggtggattcctgcagcggatggacctgtgccgcaagtacgcctttgggaagatgctcgtgataggctctgagccacccttcaagctgaagggcctttggctcttccgtggccaggatgttcccaagtttgtaatggacgaggtctatgacatggagctctacgagtggaccaaggtggacatctctgatgaggcccagaaggagcgtgtcaatgcgatgattgaggaccaggagccctttgagggcgaggccttgcttgacgcgaaatgcttcaagtgagtgtgcttgcctggagacagaactgtttagcccttgaatttgcctatggaagagtttgcccttttactagtgtcgatgttgatctggtataccttgctatgaactggttaaagtttgtgctggtttgggattttttgtgc

SEQ ID NO: 2377 - DNA, 1030 bp, Zea mays
  Clone ID: 700211003_FLI
gcagcgccgcgagccacagctagcaccaccaccttgcaccgcacccgcaccgagacgaacagatcgaccatggctgccggcggcgacgacaccaccatcgcgcaggtccacagcggcatcgacagcagcaacaagacgctgctcaagagcgaggccctctacaagtacgtgctggacacgtcggtgctgccgcacgagccggagagcatgcgtgagctgcggctggtgaccgacaagcacgagtgggggttcatgcagtcgtccccggacgaggcgtcgctgctgcggatgctgatcaagctgagcggcgcgcgccgcaccctggaggtgggcgtgttcacgggctactcgctgctggccacggcgctggcgctgcccgccgacggcaaggtcatcgcattcgacgtgagccgcgagtactacgacatcggcaggcccttcatcgagcgcgccggggtggcgggcaaggtggacttccgggagggccccgcgctggagcagctggacgagctcctcgccgacccggccaaccacggcgccttcgacttcgcgttcgtcgacgccgacaagcctaactacgtccggtaccacgagcagctgctccgcctggtgcgcgtcgggggtaccgtcgtgtatgacaacacgctgtgggcgggtactgtggcgcttccccccgacgcgccgctcagcgacctcgaccgcaggttctccgccgccatcagggaactcaacgtccggctttctcaggatccccgcgtcgaggtctgccagctcgccatcgccgacggcgtcaccatctgccgccgcgtcgtctgatgtgatgatgatccgacgaccaagatcgtatatcattcgctcgtcgtctctgtcatctttcaactgcctgcccgctgccgtcgtcaactaataatgcatggttctgctggttcttttttttttattttcttttgtgcttgcattgtgtgtgttgagttgaacatcccccgcgatgtactgcaacaactggaatgcaatgcaacatcatgcgtgc

SEQ ID NO: 2378 - DNA, 1950 bp, Zea mays
  Clone ID: 700211004_FLI
agacgcgccagggtttcaggcttccacgaatctccccgccgccctcaattcccctcggcgccgccgcctcctcccctcgcttcggtcctcggttagttaaccatccaggttctgtcaagatgtctgatagccatgagactgacaggaacattgagatttggaaaattaagaaactgatcaaggcattggaatcagccagaggcaatggcacaagcatgatctctctaatcatgcctccacgtgatcaggttgctcgagtggctaagatgttaggtgatgaatatggtactgcttcgaacatcaagagtagagttaatcgtcaatctgtgttggctgccatcacctcagctcagcagaggttgaagctctacaacaaagtgcctcctaacggattggttctgtacactggaactattgttactgaagacggaaaggaaaagaaagttactattgattttgagccattcaagcctatcaatgtgtcactctacctttgtgacaacaagttccacactgaggctttaaatgagctcttggaatctgatgacaagtttgggttcattgttatggatggtaatggtactctttttggcacactaagtggcaatacccgtgaagtgcttcacaaattcactgttgacctcccaaagaagcatggtagaggagggcagtctgctctgcgttttgctcggcttcggatggagaaacgccataactatgtccgcaaaacagctgaacttgctacccagtttttcatcaatccagctactagtcagcctaatgttgcaggattgattcttgccggttctgcagattttaagactgagctgagccaatctgacatgtttgatcagcgactccaagccaagatacttaatgtggttgatgtttcgtatggtggcgagaacggtttcaaccaagctattgaattatctgctgagattctagcaaatgtgaaattcattcaagaaaagaagttaattggcaagtattttgaagagatcagtcaggatactgggaaatatgtctttggtgttgatgacactctgaaggctcttgaaatgggtgctgtcgagaccctgattgtgtgggaaaatctggatatcaacagatatgtgatcaagaacagtactactggggaaattattataaaacatctgaacaaagagcaggaagctgaccagagcaatttccgtgacccatctaccaatactgatctcgaagttcaggaaaaaatgtctctcctggaatggtttgccaatgaatacaagaagtttggttgctcgctggagtttgtgaccaacaagtctcaggagggatcccagttctgtagaggatttggtggcattggtggcatgttgcgctaccagctggatatccgttcttttgatgagctttctgatgatgacgatgtgtatgaagactctgactagcaatcagccaatctcatgccagtgctggcccatggaaggacgcaacagctcgacctcgccatacctacgcaggagcacacgaaaagcaactatccaaggattaatgggcatgggccagcgtcatcctcttcaagaggagcttaagactaagatgattttgagtcacaatcatgggagtaacgtgacaagaagataccctactatatcacaattattccagtaatgcgtcgagaagataccgttgtttaagtgcacaaaccaatacagtgacgtgccaagaagttaccgtattttaaggatgtttaattttcagtattcgtcggggtagtactgtgtcagaaacttatttgtacctaaaaaggccaaatattgccgttgccttggtgctttatgctatgttatcgtcttttgtgagtctgtgtgctaaggttgttgcttaatgctttgtgactcgcaagctgctactcttgcagtttttgcaacgacgaagctatgatatggagtacaattctgtgtc

SEQ ID NO: 2379 - DNA, 1093 bp, Zea mays
  Clone ID: 700211006_FLI
gcacgcggtggcggggccggcctcgggcctccctgccagtgctcgccacgtcacttcttctgccgaaggtcaccgtggcagcgtagctcgtgcggcgaagccccgtccagccgcggctcctccccgtggcttgccgtcccggcgctaccgccagtgcagagcgcacccgtgctgccatgacgtggatccgaggccgtgccatcacgggcacggctgctgcggccaccacggcaaaccggagtgcagcagctgccgaggatactgctgcaggcccagagcgctggagccgtccgcgccgcggaagcccacggcagccaaggagcccaagcggcggctgccgccccgcaaccactgccggccagtactgaagggcgcacctttcatcgtctgctccagctgcttcaagctggtgcaggtgcccgccgacttcgccgtctcgaccaagacagtgcgcaagatgcggtgcggctcctgctccaccatcctctcctactcctacagggacccggccaggaagaaagcctaccaggactcggtcaatcggtgcagcacagacggctccgagctgcacggcggcacaggcgaccaacggtcggacccgttcgcgccgttcatcgatggcttcggcctcagcagctactcgacggaggacgagcggcggctgcccgtctcgaggaacacgtcgttcgacaccctcgacgggacgaaaggcgtgggacggctgcaccggctgatggggtacgggtcagctagcgagctgctgcggcactcccctgacctgtacgagagcttcagtgagcgaacgacgcctgacgtgagacagcacgacacgaaagggaaaggcgtttgcatcgacgatgacgactacgactacgacttggatgacactgacgatgaagacattggtgcgctgaagagatcagcgaggaaagggtccggctggacgctcccatggattcccggcaagcggcaaggggactcgggagccatcaggatcaagtaaatagcaggaaaggcctgtgtatattgcaggaataggttcgggttttggaattcgaattggaatttatttcatagttttgctattcctttt

SEQ ID NO: 2380 - DNA, 1014 bp, Zea mays
  Clone ID: 700211032_FLI
ctctttctctctatcttctctccatccatccatcctctcgctcgcccttcgacagctagctaagcagtacgacgtagtatactagcatttagcagttcatcaacgcgctcaacctagcacgacgtacggcgatgaggcgccgcggcagcaactcctcgccgcttgcggctgctgccctgcccctcctactcctcctcgtcgccggctgcttccactgcgcggcaacggcagctcgccacctgccttctcctggcgccccagtccaagcgctggatcaccaaggtacgcagcacgacgatacgacttcgctcgcctcgaccgtaccgtaccgttcgtacgttgcctttgttggacttgcttgctttgctaattgctgctcgacttaattaacgtccctgaatggaactctctctccctccgcagccgagaacggtgccaaggctgcatcagctggtgcagacggcgccggcggccttgtgctccaggaaggtggcacgggcaacaacggcgacgagctctcctccaacaccaccctcctcgagacgacgacgacgatgggagcggaggcgtgcgacgacgggaacggcaaggacgagtgcgtgctgaggcggctgctcgtcgacgcgcacctcgactacatctacacgcagcacaagggcaagccgtgaccgtcagcgacgaggacggtgccgcggctgcagctgcagaaagcgaggagcgagaaattgaccacctcattcctcaaactaaacatcttataaattcataccaagggcgatggtaatctcatctgctgctactagctactagtacatgcatcgatccaccttctgcgtgtgctgtatatttctgccacgctgcctatatattagcatgcatcatcatctaggtctaggactgtctgatggtttcccgtatttgtaaacactgatgaacagtacctctctctctctctgcttcctgtaaccaccaagcttacttggtccaagagaacgtaacaacgcacatttgttt

SEQ ID NO: 2381 - DNA, 924 bp, Zea mays
  Clone ID: 700211127_FLI
gcaaaaccatcagatctagcagaactctctcgacctcatcggcgttggcggagcgcgtgttgaccggagatggcgccgagcgggtggaggaggagcgcggcggcgcgggtcgcctggcgcccggccacggtttgcctgtggctcgcgctcgccgccgccgcactgacgctcgcccaggtgctcgtcaacctcgctaagaaggacctgacggaggttacccacaaggtctacttcgacatcgagatcgacggcaagcccgcaggccggattgtcatggggctttttgggaagactgttcctaagacggcagagaacttccgagctctttgcacaggagagaaaggggtcggcaagagtggcaaagccctccactacaagggaagtaagttccacagaatcatccccagcttcatgctccaaggaggtgacttcactctcggggacgggaggggtggtgaatctatctacggcttgaagtttgcggatgagaacttcaagatcaagcacactggtccaggccttctgtccatggccaatgccgggagagatacaaacggatcccagtttttcatcaccacagtgacaacaagttggttggacgggaagcatgtggtgtttggcaaggtgttgtctggaatggatgttgtgtacaaggtcgaagctgaaggccggcagagtggggagccgaagagcaaggttgtgatagcagatagcggcgagctgccgatgtgacggcgagctgaacttatgttccatcccgaagcatgatgataagaatttgctggtggccgtctgtcgttctagaactgttaggccctgtttggaatcttagggggtgtttgggagtgaagtttttccaaagttttggaagaataatgcagtattctcaaaaactgtagtattatataccaaaagttgtttgac

SEQ ID NO: 2382 - DNA, 962 bp, Zea mays
  Clone ID: 700211130_FLI
ctgttcttcttcgatttattagcccagcgttctccctctctcgtgggcgtggcgacgacttggaggccatcgctgccgccctacgccaggtgcccagatcatctgcggcccattcgccggcgacgaccaccatccatcagaaatagggtcaagcgcttgaacttacagcgagatggaaaatgatagaaggcaacttggtcagatcgatccaagaagagcccgctttccttgctgcgtagtatggactccaataccattcatcacttggttggtgccctttatcggtcacattggcatctgcagagaagacggtgtaattctggacttctctggtccacattttgtatcagttgacaattttgcattcggagctgttgcgcgctacattcaagtaaactgcgatgagtgctataagcttattgaacctgaaggagatgccacgtgggacggcgcgctgaagaaaggcacgcaggagttccaaaacaggaactacaacctgttcacctgcaactgccactcctttgtcgcaaacaatctgaacaggctgttttattccggccacgacgaatggaatgtggtcagcttggctgctgtgatgttcttacgaggccgctgggtgagcacggcatcggtggtgaagaccttattgccatttgcagttgtgctttccatcggtaccttccttggcggcacgaccttcctgaccggccttcttgctttcgccgctgcgatgactgtctggttccttgtgggcacctactgcatcaaaggtctcatagagttgtgattagagtatgttagactcgttgtagggggttcaagggtggcatatttttaagagttcaagcgtggcacatttttatttgtattgcattcctgtataatggattcttgatgttattcatgcacctatatgttccaaattccgaatgaattgatgcacttgtctgttgattcccttc

SEQ ID NO: 2383 - DNA, 1863 bp, Zea mays
  Clone ID: 700211133_FLI
gaaagatagagctatcccctccctccccatcccttggagccagcaactccactcctgagtcctcacctcgtgctgcccgcgccatttccacctcccactgtcctttcgtccagtccccagccctgcagcccaaccgtggaggttctggaaggcggtgtatcccttctagaaccttctcgagatgcagagcgccgcggctttccggccgtgccccactcggctgctggtgagcagcccttgtcgccccctcctctcggcccgcccgcttcgtgtctccgccgctggcgccgtcgctaccagaagcagcgccgtgggccctcgcggtctggggctcgggctgctgccagcctcgcccgatcgggatggcaagtgccgccagcgacaggtgtcatgcagcgcggccggggatgctgtggcggccccgaaggcggaagaaggaggcgggctcatgaagacgctgtggctcggctcgctcttcggcctctggtacctgttcaacatctacttcaacatctataacaagcaggtactcaaggttttcccataccctataaacatcacagaagttcaatttgctgtcggaactgtagcagctctgttcatgtggatcactggtattattaagaggccaaagatttctggagcacagcttgtagccatcctacctctggctattgttcatactatgggcaatctcttcatcaacatgagccttgggaaagttgcagtgtcatttacgcacaccatcaaggctatggagcctttcttttctgttattctttctgcaattttccttggcgagttacctactatttgggtagtatcatctcttcttccaattgttggtggtgttgcattggcatctcttactgaggcatcctttaactgggctggcttttggagtgcaatggcttcaaatgttacctttcaatcccgaaatgtattgagcaagaagctcatggttaagaaagaggaatccttggacaaccttaatctcttctctatcattacagtgatgtcatttttccttttggcccctgttaccttctttacagaaggtgtcaaaattactcctacatttttgcaatctgctggtctgaatgtaaaccaagtccttacaaggtgtcttttcgctggactgtgtttccatgcataccaacaggtgtcttacatgattttggcgatggtgtctcctgtcactcattctgtgggcaactgtgttaaacgtgttgtggtcattgtaacatcagtgctgttcttcaggacacctgtttctcctatcaactctctcggtactgcgattgcacttgccggagttttcctgtactcacagctcaagcgacttaagcccaagccgaagacggcttaaatagggattgtattttccatctctttgtgttaatggagttaaacacttctatgtttcaggtgactgcattttaaaagatttgtgcttataacaacaacaaagtcttttagtctcaagcaagttagataggctagggttaaaaaccgaaacacctccccccaccccccaaattaaagatcagtcacatggataagtgttttccatgtacttctatttaagtctaaatctttagatatatatcatcatttgaaaccttcttttattgtcttttttcttgttaacttcgagctttctcttcttttttctcattgctatcacgccttagaattccattacgcaatggcgcctttggaggtatatgttcaaaccatctcaaccgatagacaagctttttctttaaatggtgttatctctagcctataatgtatatcataattctggactcgattatttcctgtatgaccacaaaattaatgtaacatatatatttccgc

SEQ ID NO: 2384 - DNA, 1372 bp, Zea mays
  Clone ID: 700211142_FLI
tccaaaccagacaagcaaggaatcccccgatggctcatcgcgttctcctcctcctctctctcgcgtcggccgccgcggttgccgccgccgtcgacgcggaggacccgctgatccggcaggtggttcccggtggagatgacaacgatctggagctgaacgcggagtcccacttcctgagcttcgtgcagcggttcggcaagtcctacaaggacgccgacgagcacgcgtaccggctgtccgttttcaaggccaacctgcgccgcgcgcgccggcaccagctgctggacccgtcggcggagcacggcgtcactaagttctccgacctcacgccggcagagttccgccggacctacctcggcctccgcaagtcccggcgcgctctcctcagagaactcggggagtcggcgcacgaggcgcccgtgctccccaccgatggtctccccgacgatttcgactggagggaccacggcgccgtcggccccgtcaagaaccagggttcgtgcgggtcgtgctggtcgttcagcgcgtctggagcgctggagggtgcgcactacctcgcaactggcaagctggaggtgctttcggagcagcagttcgtcgactgtgaccacgagtgtgattcatcggagcctgattcatgtgattcgggttgcaatggtgggctaatgacgacggcattcagttatctccagaaggccggtggccttgagagtgagaaggattacccttacactgggagtgatggcaaatgcaagtttgacaagtccaagattgttgcttcagttcagaacttcagtgttgtgtctgtggacgaggctcaaatttctgctaacctcatcaaacatgggccattggcaatcggcatcaatgctgcctacatgcagacatacatcggaggcgtgtcatgcccatacatctgtggcaggcaccttgaccatggtgttctccttgttggatatggtgcttctggtttcgcccccattcgcctgaaggacaagccttactggatcatcaagaactcgtggggcgagaactggggggagaacggatactacaagatatgcaggggttccaacgttcgcaacaagtgcggcgtcgattccatggtctctaccgtgtccgcagtccacgcctcgaaggagtagactctggtcagcggtgataatcgtgattccatatattgtagaactataatccctgctagtaatccatttgtgctgtttatgtatcgaaggcagcaaagatgtgtgaagcggcaatgggatgcttgctgtaaggtaatatgtttggcttgctaggcatgctacacgctatttggatgtagcaacgttatcaccagctgtatacgctttttaatcgacaacatttgaat

SEQ ID NO: 2385 - DNA, 1907 bp, Zea mays
  Clone ID: 700211163_FLI
cgcatctcttctcctggacgcgacgccgtccccaacctctccgtcccgcgccgccgccgcgcgtcactgtgctcgcgatctcgccggcggccccagaggacttgtcgcgtgctcggccatggcatcgccaccgccggccctcgagatcctagttcgcgagcccgacggagtcacggtgtggtccggacccccctacccgccgggcaccaccagcccgccgcagagactccccaagacggcgtgcagcgccacctctttctccaccgacggtgcccgcctgctcgcgacggtggcatcggcctcggccaccgtctacgactgccgcacactcgctgtagtcaagtgcttcgagctcccgggtctcctcgccgctgcgctatcgcccacgggggcgtatctgcagaccttccagaagtcatcctcgccgcaggagaagaatgtcacggtctggcacgtcgacacagctgccgctctttaccaacactatcagaagagcatgtctaaaaccacctggccaatggttcagttttctgcggatgaatcggtcgcttgccggatgatgcctaatgagatacaattctttgatccaaaagattttgcaaaaggaattttgtataggataagaatgcctggcatagctacgatgaagctagcaactgcaccaggatctcatgttgctggattcgtcccagaggctaagggtgttccagctagcgttcagatattttcttgcaacaaggatgcacaaaatcaagttgttgctcgcaggagcttttttcgctgttccaccgttcaattacagtggaacaaagggtccactggccttctaattcttgctcaagctgacgtggataaaaccaatcagagttactatggtgaaaccaagttgaactacttgacaactgacagggccttcgaaggaattgttccactcaaaaaggacgggccagtccacgatgtgcagtggtcttcctctggctctgaatttgctgtggtttatggtgttatgccgcccaaggcaacaatattcaacaagaagtgcaaccctcttgttgagtttggtgaaggaccctacaatacgataagatggaaccccaaaggacgatttgttgtattagcaggttttggcaatttgcctggtgatatggcattctgggattattcagaaaaaaaattggtagcgaaaacaaaggcagaatgttctgtcacaagtgaatggtcccctgatggtcgtcattttatgactgctacaacagctccgaggcttcaaatagacaattgtataaaaatatttgaccacaacggatctctgcagtttaagaagatgtttgaaaggctgtatcaggctgattggaaacctgaagcagctgaaagattcactgacattgctgacctgacaacatccttgagtaccttaaagattgaagaaacaaaaaaacaagtttcagcacaaggttccaagtcagcacaaacatcaagcaaggcccctgcaattacagcgccaaaacctacagcataccgcccacctcatgctaagggttctgcagaacttcaggacaagctctttggtggactagctcctgctgggggggagatgagcaaaaatgcattgcgaaacaagaagcgcagagagaaacagaaggaaaagaaagctgctgaagcgtcaggctctcctgctgatgaaagttgatctgtgccggattactttcagcattgccaaccaccgagtataacagcgacaaatgatttctttcaatctggtgaaacggccatgcaccgattcacgtttacaatatgaaactttttggtagtttggtgcagacactcggttattttttcagaactatactgagtttgtataaccatagcgaagaaacataaaaagtgagctatttcatattttcatg

SEQ ID NO: 2386 - DNA, 1373 bp, Zea mays
  Clone ID: 700211188_FLI
ggagattgttgaggtagttgctgaccaagttgcagtcgctctgtcacatgctgcactcctagaggagtctcagctgatgcgagagaagcttgccgagcagcatagggacttgctgcaggcaaaggatgaagccatgagggcaggggacgctaggaattccttccagactgcaatgtacgatggaatgcgaaggccaatgcactcaatccttggtctcgtctcaatgatgcaacaggagagcatgaatccagagcaaaggcttgtgatggatgccattgccaagacaagcagtgttgcatccacactgatgaacgatgtgatgcaaacatcgacaatgaactgtgagcacttgtctttggtcaggaggccgttcaaccttcattccttcattaaagaagttgttggagtggtcagatgtctaactggttgcaagggtgtggagtttgagtttcaagtggagaattctttgccagaaaggatcattggtgatgagaagagagtcttccatattgtcctgcacatggtaggcactctaacagaccgatgtaatgctggctgtatctcattatatgtaaatgtccataatgaggttgaagataggcataatcatgactggatgctgcgaagagcaaacttctctgggggctatgtatgtgtgaaatttgagattaggattagaaaatcaaagggctatctgttgagttcatcaagcagtcagataagtcagggatccaaacccaacaattctgagatggggcttagcttcaatatgtgcaagaagattgtgcagatgatgaatggcaatatttggtcagtatcagattctaaaagcatcggagaaactatcatgctagtcctccagttccagttggaacctgtgactccggtctctggagcgtcctcagatttgtacagatcatccgcaattcccaactttaatgggctcagagtcctccttgcggacagcgactgcaccaaccgagctgtaactcacaggctcctagagaagcttggttgccgagtcctttcggtcgcttctggcgtccaatgcatcagctccttcgctgcggagtcgtccttccagctggtggttcttgatcttgacatgcagacgatggatggattcgaagtagcccgcgcgatcaggaagttcagtagcaatagttggctgccgttgattattgccctagcagcaagaatcgacgacaacatccgggatcgttgccagaggtcaggagtaaatggcctgatccagaaaccggtcacattagccgcgctgggagatgaactgtatagagtccttcagaacaattaaaagagcctgacggttctcatttctttcaatctcaatagattgctatagcttgatcggt

SEQ ID NO: 2387 - DNA, 1332 bp, Zea mays
  Clone ID: 700211194_FLI
cagcagaagaagcttaacctccccatccttcccaccactacaatcggttcgttcccacaaaccgttgagctcaggagggtccgccgtgagtacaaggcaaaaaagatctctgaggaggaatacgtcactgccatcaaggaggaaatcaacaaggtcgttaagctccaagaagagcttgacattgatgtgcttgtgcatggcgagcctgagagaaacgatatggttgagtacttcggtgagcagctctccggttttgcgttcactgccaatggctgggtgcagtcttatgggtcaaggtgcgtcaagcctccgatcatctacggtgacgtgagccgccccaaccccatgaccgttttctggtcgaagacggcgcagagcatgacgtctcgcccaatgaaggggatgctgactggcccagtcacaatcctcaactggtccttcgtccggaatgaccagccgaggtttgagacttgctaccagatcgctcttgcgatcaagaaggaagtcgaggatctcgaggctggtggtattcaggttatccaaatcgacgaggctgcactgagagaagggctgccgctccgcaaggctgagcatgcattctacttggactgggctgtccactccttcagaatcaccaactgcgagatccaggacaccacccagatccacacccacatgtgctactccaacttcaacgacatcatccactcgatcatcgacatggacgcggacgtgatcaccatcgagaactcgcggtccgacgagaagctgctctccgtgttccgtgagggtgtcaagtacggcgcgggcatcggccccggtgtctacgacatccactcccccaggatcccgtcggccgaggagatcgccgaccgcatcgacaagatgctggccgtgctggacaccaacatcctctgggtgaaccccgactgcggcctcaagacccgcaagtacacggaggtcaagcccgccctgaccaacatggtctccgctgctaagctcattcgcacccagctcgccagcgccaagtgagcacctttttttgcctttttcgtttccgaggagggcgtcgtcgatgccaatttgtttccaataaacagggctccccccctgtgcccgccgttctgttgtgctccgtctgtggttaggttactagttttcttgatctcgcccccacgcggtacctgttttactatctgtttggtggtttctgaggcaagttgcccgtgtacttgtatcgtaaaaaccgagtgggacatctgcatcgtttcatctgccaccactcccccgaggtgtgttgtttcacggctcaaagaaagatgtcgtatcggc

SEQ ID NO: 2388 - DNA, 1174 bp, Zea mays
  Clone ID: 700211205_FLI
tgactccttcgcttctcctctccctcctgctggtggcggcgaggtgctgccatggctggtcgtcgttccagaagccggcggtgactgcggtgatcgctttcggagactccattgtggacccggggaacaacaacgggctgcatacggtgatcaaggccaaccatccgccctacggcaaggacttgttcaaccacgaggccaccggacgctactccaacggcctcattccaaccgacctaattgcccaggagttgggtgtgaagctgctgcttcctgcctacttgggcgtggatctgagcccggaggacctgctcaccggcgtcagcttcgcgtccggcgccaccgggttcgacccgctgactcccctcgtagtgagcgtcatctcgctggagcagcagctcgcctacttcgacgagtaccgcggcaagctggtggatatcgccggcgaggatgagacggcgaggatcatcgacggcgcgctgttcgtagtgtgcgcgggcaccgacgacgtggccaacacctacttcacgacgccgttccgcagcgcggagtacgacatcccgagctacgtggagctgctggtgggcggcgccgaggagttcctccgcaacgtcagctccaggggcgccaggaagatcggcttcgtggggatgccgcccgtggggtgcgtgccgtcgcagcggacgctgggcggtggcctcgccagggcgtgcgagcccaagcggaacgaggcggcgcagctgtacaacgccaggatccaggagatggtcgccgacgccgaccgagacttggcgacgaccacggtggtgttcctggacatctaccgcgtcctggacgacctgatggagcgcggggacaagtacggcttctctgagaccaccaggggatgctgcggcaccggcaccatcgaggtcacgggactctgcgactcccgcttcgtctccgtctgcgacaacgtctcgcagcacgtgttcttcgacagctaccaccccaccgagagagcctacaggatcatcgtcaaggacatctttgacaactacggacaagtgctcatcggatgatatatatatctaccttgcttgagcgatcgagcatgcatgttcatcttcttcatctttatgtacgttcggctagctggcccaaagcctcaaggaggcccatttatcttcttctt

SEQ ID NO: 2389 - DNA, 897 bp, Zea mays
  Clone ID: 700211211_FLI
gggttcgccgccgccgcctcctctctgctgccgtcgccatggggagaaggcctgcgagatgctatcgccaaatcaagaacaagccataccccaagtccaggtactgccgtggtgtccctgaccccaagattaggatctacgatgttggcatgaagagaaagggtgttgatgagttcccctactgtgtgcaccttgtctcttgggagaaggagaatgtctccagtgaggctcttgaggctgcccgtattgcctgcaacaagtacatgaccaagtctgcaggaaaggatgccttccaccttcgggtccgggttcaccccttccatgtccttcgtatcaacaagatgctttcgtgtgctggggctgataggctccagactggaatgaggggtgcctttggcaagcctcagggcacctgtgctagggtggacattggtcaggtactcctttctgttcgatgcaaggacaacaatgctgcacatgccagtgaagctctgcgacgcgccaagttcaagttccctggccgccaaaagattattgagagcagaaagtggggcttcaccaagttcagccgtgccgactacctgaagtacaagagtgagggtagaattgttcctgatggtgtcaacgcaaagctgctcggtaaccatggaagacttgagaagcgtgctcctgggaaggctttcctcgaggccgttgcttaagtccaatctacagttggaatgcgaatccagacgttttgctttagcctatcttattttgctttgtgcaacatgaattttaagtgtatggggtattacagtgccttgtcttgtgtgaacctgcttatctcgtgctgaacatcgttatgcatggaagtacttatcttttgttctgctaaaaattaagtgttctgcgtct

SEQ ID NO: 2390 - DNA, 625 bp, Zea mays
  Clone ID: 700211235_FLI
gagaaagtagggaaaagaagaggaagaaaccacgaagaaagatgatacaagctcagaagacgttttcttcttcacagcacaccaacatcactgcaaggaagtgtctaagaggtaaacactggacactcagttaccgtcctcttctggccaggaggtgctgttagctgcatgacaaacgcgaggttatcagcaatctggacgcagccaaggtaatggagagatttgatcagttgtgtgttagagagaggtactgacagatgaagagaggtcagatgtcttcagaacgcgcagcctcttcaccgaagaaacaaacatcctgcaggtttgtctgccttcttcccattctgatgttcaagggatgctctgctagaggtggccagatttcttctgaaggcacgaactggaggccacccaataaccggggtatttggagatctgaagttggaccataagatagtgatgaagacatgagaatgaagcatagtagtggatgcatatatagacatgcattataatatgctgataaatgaaatatatatatatatatgctgtttgcttcctggaaatgattcatgttcagaacagatactaacagcttgaaatctaaagttttgtggtattctgt

SEQ ID NO: 2391 - DNA, 1133 bp, Zea mays
  Clone ID: 700211270_FLI
ggccacaactccggccagaagctagctagccaagttattagctagtacatactagtggccggccggacacgatcgatgggcaggccgccgtgctgcgacaaggcgggggtcaagaaggggccatggacgccggaggaggacatcgtcctggtgtcctacgtccaggagcacggccccggcaactggcgcgccgtgcctgtcagcacgggcctcatgcgctgcagcaagagctgccgcctccgctggaccaactacctccgccccggcatccggcgcggcaacttcacaccccacgaggaaggcatcatcgtccacctccaggccttgctaggcaacagatgggcggccattgcttcttacctcccacagagaaccgacaacgacatcaagaactactggaacacccacctcaagaagaagctccggaagcagcaagccatcggcgccatcttcgcgccacctaccccctccgaacccaccgccggccatgccgattgccgtcgtcacgacatgacccgctcctccaaggacagccacgcttgcccggccgacagcacaccagcggctgatgaggtcgtcacccagctcatcgcccagcagttcgccgccaccgacggcgacacctcgtcgtcgtcgtcctactcgtacgcctccagcacggacaacatctccaagctgctcgacggcttcatgaagagcgcctcgccggcgcgggacgacgctaccgataccatcaagccttcctcggccatcgacatcgaccctttcgaccacaagtccggcggggccgcactaccaccacccaagaagcggcagcagcagcagcatctgtcctccatagagaactggttgttcgacgatgccactgagcaggtcgttgtccagctgatggaggagatctccggcggctcatgctcagttcccatgctgctttattagcaccaagaaaaagaagcgaacatgcatgatagccgatcgatagatgtgacttggataggagaatgaatttgtgcatgggtgcaagttaccctgataggagaattttatatacacccatgcatgtttagttttatttacacaaccatgagccatgagataagaacaatatatatgcatagtcaatcaaaactccc

SEQ ID NO: 2392 - DNA, 1549 bp, Zea mays
  Clone ID: 700211285_FLI
caataaccggggtggcagaaaagaggccgcaactgcaaggcaccgcaggagagaagaagatcaccagcaacaccaagcaactactcgtacgcggaaagagaaacccagaagccggtcttgttggattattccgttcgtcagttccgtccggagcggcggaggctctgttggtggtgcaaaaatgagtgacaacctgatggacaaggttagcgcctttggtgagcgcttgaagatcaccgggacagaagtcagcaaaaagatgactgccggaatgagctccatgagtttcaagatgaaggagttgttccaggggcagactccagctgacaagattgttgagggtgccacctcagaggatctggacgggcctgactggaactcaaacttggagatttgcgacatgatcaacacagagaaggttgacagtgtggaactcatccgtgggatcaagaagaggatcatgctgaaggatgcgagggtccagtacctctccttggtcctgcttgagaccattgtcaagaactgtgacaaggccttctcggaagttgcggccgagcgggttcttgatgagatggtcaggttgattgatgatcctcaaaccgtggttaataacaggaacaaggcccttatgctcattgaagcatggggggagtctggtgatgaactccgttatctgccagtctatgaggaaacatacaagagcttgaaatcaagaggagtgcggtttcctggacgtgacaatgagagcttggctcctatatttactcccgcgcgatcagttgctgaagctgatgttgatgcaagcttgccccagcaggtgttcgaggacgtccatgttcatacatatactgctgaagaaacaaaagaagcatttgatgtagctcgtaacagcgtagaacttctttcaactgttctttcctcttctcctgagcaggatgctttgcaggatgacttgacaaccactcttgtgcaacaatgctaccaatctcagcacactatccagatgattattgagaccgttggagacaatgaagctgtgctctttgaggccttgagcgtgaacgatgagatccagaaagtattatcgaagtacgaggagatgaagcagcccagggcctccgagcatgcagaacatgtaccagttgtcataccgattgctgcggagcatgaagatttgaatgctgttggcaatgaagacgcccttgtcagaaaaccagctgccgcgagagcaacgtcaggtggagatgatgacatccttgatgatctcgacgagatgatatttggcaagaagggaggtagcagctcccaggaaggtccgaaaaagccagatccgaagaaggatgacctgatcagcttttaattacctttccataatcgcagccagtacttgctattgtctggtgctgtacccactcggtagattgaagatttttattcgcatacgattcataccggtttgttcagttaagtcgctacactttgtcaatcttgtttcatggctgggtcccatgaccatgaatgtattgtattggatggtggattatgcgag

SEQ ID NO: 2393 - DNA, 1201 bp, Zea mays
  Clone ID: 700211306_FLI
gcggactacctgtggtacaccacctacgtgaacatcaactcgaacgagcagttcttgaagtccggacagtggccgcagctgaccgtctactctgccggccactccctgcaggtgttcgtcaacggccagtcctacggcgccgtgtatggcggctacgacagccccaagctgacatacagcggctacgtgaagatgtggcaggggagcaacaagatctccatcctcagcgcagcagtcggcctccctaaccagggcacccactacgagacgtggaacgtcggagtgctcggtccggtcacgctgtccggcctcaacgaggggaagcgggacctcagcaaccagaagtggacctaccagatcggcctccacggcgagtcgctgggcgtgcagtccgtcgccgggagctcgtccgtcgagtggggcagcgcggcagggaagcaacccttgacatggcacaaggcctacttcagcgcgccgtccggcgacgcgccggtggccctggacatgggcagcatgggcaagggccaggcgtgggtgaacggccgccacatcgggcggtactggtcgtacaaggcatcctcctccggcggctgcggcggctgcagctacgcggggacgtacagcgagaccaagtgccagaccggctgcggcgacgtctcccagaggtactaccacgtcccgcgctcctggctcaaccccagcggcaacctgctggtgctgctcgaggagttcggcggcgacctgcccggcgtgaagctggtgaccaggacggcgtgatcaggaatggagaggggagggcatgccgcacgcacacaggatgtgaataatttgctgggaagagaagcgagctgagggcagggcgcgcgcgcgcagacacgacaccgattctttcttcctcgtgaagtatctatagatacggcgtacatacggtcacaattcgtgcccactatacgtacgtacaaaaaagattagtacactagcgtttactgtaggtctgttcttggagttggccgtcgccggcacggctgcaggaactgcggctcacggccggctggtaatggtactagtagcatggtttttgctctgcagtccgcatgaatctcaaggcgcacgcaggcttaattttcttagcacaaatttgcgaaactgagttgtaaatgaggttatttattcctacgattaagtaggatacaagacgaat

SEQ ID NO: 2394 - DNA, 968 bp, Zea mays
  Clone ID: 700211310_FLI
ctttcgtcatctcttctccggcgaagaacccccagtcgcccaccagatcacttgttaaactttgttgaggggtgatggcggtttctttcgcaaacctcaactccgaggcagggcttaaaaagcttgatgagtaccttctcactcgcagctacatcactggctaccaagcttccaaggatgacttggctgtctacacttcgttttcggctgctccctcgtccaagtatatcaacgtagcaaggtggtttaaccacattgatgcgctcgtgaggctgagcggaattactgcagagggccaaggtgtgaaggttgaatcctcagcagttccttcagccccaactccagatgttgctgaagcacaggccccagttgctgaggaggacgacgacgatgatgttgacctttttggtgaggagaccgaagatgagaagaaggctgctgaagagcgtgctgcagctgccaaggcttctggcaagaagaaagaatctgggaagtcatcagttttacttgatgtgaagccatgggacgatgagactgacatggccaagctcgaggaagctgttaggagtgtccagatggaagggctgctctggggcgcatccaagcttgtcccagttggatatggtatcaagaagctgcaaatcatgatgaccatcgtcgacgaccttgtctctgtcgacactctcattgaggactatctgtgcgctgagccagtgaacgagtacgtgcagagctgcgacatagttgccttcaacaagatctaggcgtgacttccgatcagtccttctcctggggtgctggcgatggtggtggctgggcaatgcaccagcctaatttatccatagctatatgtctgctttgtgtggccagtgatattgccgtgagtatttttggatcctattcgagtcgaatgtaccagtaccagagttaatttgctttaattcgaaacaccgttccagttggaattc

SEQ ID NO: 2395 - DNA, 1496 bp, Zea mays
  Clone ID: 700211352_FLI
ttcgatccggttcttccaacccaggggcagtgatggcgacgaagaggagcgtgggcaccctcggcgaggcggatctgaaggggaagaaggtgttcgtgcgcgccgacctcaacgtcccgctcgacgatgcccagaagatcaccgacgacacccgcatccgcgcctccgtccccaccatcaagttcctcctcgagaagggcgccaaggtcatcctcgccagccacctgggtcgtccaaaaggtgtcaccccaaagtacagcttgaagcctcttgttccacgcttgtctgagctccttggagttgaagtcgtgatggccaatgattgcattggtgaagaagttgagaagttggctgccgctttgccagaaggtggagttctgctcctagagaatgttagattctacaaggaggaagagaagaacgaacctgagtttgctaagaagctagcatctgttgctgacctttatgtcaatgatgcttttggcacggcacacagagctcatgcttcaaccgaaggagttaccaagtatttgaagcctgctgttgccggcttcctcatgcagaaggaacttgactaccttgttggagctgttgccaacccaaagaagccatttgccgctattgttggtggatccaaggtctcaagtaagattggtgtcattgagtccttgctggcgaaggtcgatatcctcatccttggtggtggtatgatctacacattttacaaggcacaaggatattctgttggaaaatctctcgtggaagaggataaacttgagctcgcaacttctcttattgagaaggcgaaggcaaagggggtttctcttttgcttcccactgatattgtagtagcggacaagtttgcagctgatgctgagagcaagattgtccctgccactgctatccctgatgactggatgggtcttgatgttggccctgatgccaccaaaacattcaacgaagcattggacaccaccaagactgttatttggaacggccccatgggagtgtttgagttcgagaagtttgcagctggcactgaggcgattgccaagaagctagctgagcttacaaccacgaagggtgtcactaccatcatcggcggcggcgactctgttgctgctgtcgagaaggctgggctggccgacaagatgagccacatttcgaccggcggcggtgcgagcttggaactcttggaaggcaagactctacctggtgtccttgccctcgatgacgcctagatccgctgctgctgctgctactcaggttctgccagctttgcgtgtcatcttgtttcggaccttggtgtagcactgcaaggctaaggtttactcctccgcacatggacttttggggataggcttgccaccgtgttttgctagatgagtcgtggaataagcttttacttcctcgctgctgtgggtgaagtgactggaattcggaaatttggaactaacaaaaccccccgtggatttgtatgatatgttttgttcgac

SEQ ID NO: 2396 - DNA, 845 bp, Zea mays
  Clone ID: 700211353_FLI
cacaggctgcacaagatgaaccagctctctcttctccaccgcgccttccacctgcatctcctctctcccgaacgcggtcatggcctcacagccgccgtcatccgagttcgactgtcctcctctcaacacaccccacgacagcacgcaaagcgcctcctcgcagtagcacctcacgaaagcatcgcggcagccacggaggagagcagccgtccgcgtcaagagctcgcggcggcgggcaataagaacgacggcggcggcggcggcggcaggacctgcgcgctgccgacgtgggcgctcatcggcggcatcacggcgggggtggccgtggcgctggccctgtccgcgggggccggccccgccctggcgctggggccggagggccccctggtggaggagttctgggacaacatgcggcgttacgcgctgtacgtggtgacggtgagcacaggggtggcgtatacggtgctgcagcccatagtggagctgctcaagaaccccatcacggcgctgctcatcgtggccgtcctcgccggcagcggcttcctcgtctcgcaggtgctcaatgccatggtcggcaactccgacttcatctacatgtacgagtaggtagagcaggccggccaggggatggcgagcttgtggcgctgaggcagccacggcccaccgtgcgcccgcgaattaatggagatggatgcaagtgtgacgtgtcagcgaatcattggcacttatatcattttttcgaaacattagcgatggttctgatgatggagctatatacatgtatagatggtattcgatcgtgtactcaagtttgcttaccttgaacacggcttcgttttccagtt

SEQ ID NO: 2397 - DNA, 265 bp, Zea mays
  Clone ID: 700211358_FLI
cagttagccacgaaccaaacaggtctttagtcaccgaaccaaacaagcccttagttaaacaggtttttagtcaccgaaccaaacaagcccttagtttcacacttgttattgttgttttgtggatgtatgatctgtgtatttgtataatattttggtcattggggaataagttcggcatcttatgtatagcgtgctatctgatacagtactgcatatcagttgtctactttcaaatttgtgcactgcccgtttgatttgtttggtc

SEQ ID NO: 2398 - DNA, 1186 bp, Zea mays
  Clone ID: 700211381_FLI
gctgtgctgggactctctatgttgcaaacctgggcgactcgcgtgcagttcttggaaggcttgtgaaagcaactggagaggttctggccactcagttgtcagcggagcacaatgcatgctatgaagaagttagacaagagctgcagtcatcacatcctgatgatccacgtattgtggttctcaaacataacgtttggcgagtgaagggtctcatccagatctcaagatctatcggagatgtatatctaaagaaaccggagtataacagagaacctcttcacagcaagtttcggcttcgagaaaccttccagaagccgattcttagttctgaacctcaaattactgaacaccgaatacagccaaacgatcagtttgttatatttgcttccgatggtctatgggagcacctcagcaatcaggaagctgttgaccttgtccaaagtagtccccgtaatggaatcgctcggagactagtgaaagccgcgatgcaagaagctgccaagaagagggagatgagatactcagacctcaagaagatcgaccgtggcgtgaggaggcatttccacgacgatataaccgtcgtcgtggtgttcctcgactcggatgccatgagcaaagctagctggagcaagagcccctcggtttctctccgagggggcggcgtcacccttcccgccaagtccctcgcacccttctcggctccggcacagttgaacggcacccactgaagctgctactgctcttgaaaagaagggcacagtgcagatctgctagagatgatgagagaagcagcaatcaagtgtagctgttgctcgtacacctgctgtgctgttgctgtttgcaaagctgccgtcttgactccgcctggtaattagtgtactgatagcgaggtatagaaattaggttatttgttagcgacgcaaatcctttctttttttttcttctccctctgttcttatctcttttctcttcatcatggaggaaacaggtggctgtaaatttgtccagaacatgttttccctaatagcccatcatatcccgctctttttcttgttgatatgaccaaggctggcagcatcgctgctcaagataatgtttggggcgcatgatttgaccagtccgaatcattacttttgatgatgtgttgtagcatcacgttactctcaacaaggttggtttctttttt

SEQ ID NO: 2399 - DNA, 1091 bp, Zea mays
  Clone ID: 700211459_FLI
gaatccgcatatgaagctgcagggcctggaatatgaagtactgcagtggtgcatatgtaggctggaggcatggttcgctactgacatggacaatatatctctgaaaacttgggatcaggaacatgtgcttaccggcggacatggtcttatggtgaatggctacgaccctgtcatcagagctctcgctcaaggtctagatattcacctgaaccacagggtcacaaagatcatacaacgctataacaaggttattgtctgtgtggaagatggggcgagttttgtcgcagacgctgctatagtaaccgtccctctcggggtactcaaggcaaacatcatcaagtttgagcctcagctaccgaaagagaagctctcggcgatcgccgaccttggcgtcggtatcgagaacaagatagctctcaagttcgacactgtgttttggcccgacgttgaagtgataggtagggtggccccgacgtcaaacgcctgtggctactttctcaaccttaacaaagccacaggaaacccggtcctggtgtgcatggtggccggaaggttcgcgtacgagatcgagaagctgtcggacgaagagtccgtgaacttcgtgatgtcccagctcaggaacatgctgccgcaggcaactgacccggttcagtatctggtctcgcgctggggtagtgaccccaactcacttggctcctactcgtgcgatctggtggggaaaccagctgacctgtatgaaaggttctgcgctccggtgggcagcctgttcttcgccggggaggctgcctgcattgaccactccggatcggtgcacggagcttactcgtcaggcatcgctgccgcagaggactgccgaaggcgtctgtcggcgcagctaggcatctcggccggcctgttccaggtcgggaaggctgccatgagggaggagatgacggctgaagccatggtccccttccagatatccaggctgtaagagagaatctattcgacaccgtctttgtgtcaccggtttgttgcttgctgtaattgtaaaatggtgtaagaccttgtttgttggaatattcgatggtggatgctgtttttcgtcaggt

SEQ ID NO: 2400 - DNA, 1240 bp, Zea mays
  Clone ID: 700211476_FLI
agcaactgcaaagcagcaagctctactcttcttctgtactgaacgtgtgactagataacaataagcgtgaaccatggcggacgagtacggccgcagcggctacggcaggtccggcgccggcgacgactacgacagcggctacaacagcaagtccggcactgatgactacggccgtggcgaaggtggctacaacaagtcgggcggcgatgacgactacggccgcagcggcggcgatgggtacggcaggtccggcggcgacgactacggccgtggcaccggcggtggtggctacaacaagtccggcggcggcgacgactacggccgcagcggcggcgatgggtatggaaggtccggcggcgacgactacggccgtggcaccggcggcggcgggtacaacaagtccggcaacgacggctacgacagcgggtacaacagatcgggcaccaccaacgacgacgaatacggccgtggcaccggcggcgggtacggcagcaagccctctggcgacgacgcgtacgccggcggcggcggtggcgggtacggcaagcagtccggtggcggcgcggacgagggcggagagtacggctcttcccgggacgactcggagaagtacaggaaggaggagaaggagcacaagcacaaggagcacctcggcgagatgggcgccctcgccgccggcgccttcgccctgtacgagaggcacgaggcgaagaaggacccggagcacgcgcagcggcacaagatcgaggagggcgtggcggcggtggcggccctgggcagcggcggcttcgcgttccacgagcaccacgacaagaaggaggccaaagacgcggcggaggacgccggggaggaggaggagtccggccgccgcggcgaggggaagaagaagcaccacttcttcggctgatcgggctgctgctcgatcgatctacttgcgtacgtaggctgctccccaggaccagaaggagcatgcatggagggcgaacgaagtcacgggggtttgattgcccgtctatgtatatcatgtgtagttactgatgatgtgtgtgcatggtacttcgtacgcgtgtttggtgatcgatgtgtggtgtgtgtgtctctgcatggacattttcctactctgcgttttttctctctctactgatatagtatatatgtggtgtgtctatatatgtgtgcacgtggttttcgctcggctttttatcaacgctttgagaataaaagctttctcttcatctgt

SEQ ID NO: 2401 - DNA, 279 bp, Zea mays
  Clone ID: 700211478_FLI
taaaaatcgaggaactcgagaatcacattgctggcaaggacggtgagaaagggaaactgaaggcggcgttggaggaaaagatgactgagatcaatgctctcagcaaagacaacgcgatgctacatcgcacaattctcgaggcgcaagagaagaataaatgtagcattttatcgttcttgtcaccgtgcggctccaagtaacttggttgtaatgtgttgcattactaatgcaatggtgaaggtaccatgcaatgaaataaaaatttcagtttgctctgtg

SEQ ID NO: 2402 - DNA, 882 bp, Zea mays
  Clone ID: 700211552_FLI
gggcggagcctctccttcccggtctcctccgcccgttgccttcgtcccctccatctccggctgcgtcgccggcgagcccgacaccgcgaatcggatccgccgacaaggcgagagggaaaagatggggcttacgttcaccaagctgttcagccggctgttcgccaagaaggagatgcggatcctgatggtgggactcgacgccgccggaaagaccaccatcctctacaagctgaagctaggcgagatcgtcaccaccatccccaccatcggattcaatgttgaaactgtggagtacaagaacatcagcttcactgtctgggatgtcgggggccaggacaagatcaggccactgtggaggcattacttccagaacacccagggtctcatctttgttgtggacagcaatgatagggaccgtgttgttgaagcaagggatgagcttcaccgaatgctgaatgaggatgagttacgtgatgctgtgttgcttgtgtttgctaacaagcaagatcttccaaatgctatgaatgccgctgagatcactgataagcttggactgcattcacttcgccagcgtcattggtacattcaaagcacttgtgctacaacgggtgagggattgtatgaaggcctggactggctgtccagcaacattgcaaccaagttctaaattgtcaagcgaggtttggatcatctaggagcttttggatgatgatgatggtgctggatatttagggttgggttggtatttccgtatgtaagatgtatgcccctgagctcggcagtttttgagctctgcttaagattctcacagttaaattgttttatgtaatttgggccttgagatgtttctgaaccaaacagctaaaagagttcagttgagtt

SEQ ID NO: 2403 - DNA, 663 bp, Zea mays
  Clone ID: 700211560_FLI
agcatactttggtatctggtggtgttagaggaaccttaccgtggatggcaccagagcttctgagtgggaaaaacaatatggtgtcagagaagattgacgtctattcgtttggaattgtcatgtgggaactgcttactggggaagagccatactctgatatgcgtgctgctgaaattattggggccattgtaaacgattccctacgccctcaaatcccttcatggtgtgatcctgagtggaagggattgatggaaagctgttggtccagtgatccagccgagagaccgtccttcactgatatatctcaaaggttgaggaaaatggccgctgcaatgaatgtgaagtgaaggttcggaagccatatttgtcttgattttccttagtcctggagtaacccggctgtcatttgaaaataagtatgctataaagcgttctgtcttgatgggaactgttgggctgtaattgtaaataagttttgacttgcttcatcttgctgtgcaaagtagtaattaataggcacgatcaaagctgtgcacagttatcttttccccccatacaaaagtgtgtcctaggactaggaggagagatggatcgaacacgactagagctgtacatagtatactgtttgccctgtatataatcatcacttcctatttgaatgct

SEQ ID NO: 2404 - DNA, 663 bp, Zea mays
  Clone ID: 700211587_FLI
gaaaacgacgagaacttattcaggagtctgtgcattctactgaacccaccccctgctgttgcacagatggcgaaccgagctcgatggtctgtcatgcagtcttacaacctcctgaagtggcacaagaaagctcatagagccgcggtcaaggcgctggaagacgggcacagtctcagcgttgtgatcagaaggatagaagaagccatcgcttctgacagcaaataaatatgaccgttgatcctttacatgtgttcctgtcaaccgatctttgttggcagcttccacaggacgcggaaggagagctttcataattcgcgcgaagagttagtgtgtgttggaacatgagtggcgcttttcaaagaaagaaaggcagaagatccttggagctggagggaatagcggagaccacgaccagggcgtctgacggacggactagatcgaatgatacatccgttggagattttaaggaagtcaaaaggctgttgtgaacttgtgattagtgtcgatgccagatatggcagatgtgcatagggagatatgaatatatgatgtcttgatgagtatgcagacatgagctattttgtaatggatggaaaagtaccgttggtacttgaggcacttctattgtttattatttatttatttgcaatcagtttggtaatt

SEQ ID NO: 2405 - DNA, 767 bp, Zea mays
  Clone ID: 700211611_FLI
ggcgcaccgtggagtccctctctgatttttggcgagcagaacatacctgagacgacaggtagaagacgactgactgcctcgagcagcagagatcagggaggccgagggcgggatgacgatccggttcgtgctgttcgtcaacaagcagggccagacgcggctggcgcagtactacgagcacctctccctcgacgagcgacgggccctcgagggcgagatcgtccgcaagtgcctcgcccgcactgaccagcagtgttcgtttgtggagcaccggaactacaaggtcgtttacaggcgctacgcctcccttttcttcctcgtcggcgtcgacagcgatgagaatgagttagctatccttgaattcatacatcttctggtggaaactatggatcgccacttcggcaatgtgtgcgagctcgatatcatgttccatctggagaaagtgcacttcatgttggaagagatggtgatgaatggttgcattgtggagacaagtaaacagaacatcttggcaccaatacaacttatggagaaaacttcctaaaatagtgatatccatttgtgtagttttacatccacttcttagcacatttgcctgtctgcccctttccataaaatttccctctgtatgtgagagtgcaaaacaatctctgtaaccatggagtattgaattgacctgattgtgtgctttcagatattcctgtgatcctcttttcatgtatgcattcgatttgctcacatatgtataaaaggtgtattatcttaag

SEQ ID NO: 2406 - DNA, 945 bp, Zea mays
  Clone ID: 700211635_FLI
tcaaggaggagttccccaccctctcctatgccgatttctaccagcttgccggagttgtggccgtcgaggtcaccggtgggcctgagatccccttccaccccggcagggaggacaagcctcagccgccacctgagggccgtcttcctgatgccaccaagggttctgaccacctgaggcaagtctttggcaagcagatgggtttgagtgatcaggacattgttgccctctctggtggccacaccttgggaaggtgccacaaagagcggtctggttttgagggggcctggactacgaaccctttggtctttgacaactcttacttcaaggaacttctgagtggcgacaaggagggtcttcttcagctcccaagtgacaaagccctgctgagcgaccctgtcttccgccctcttgtggagaaatatgctgcagatgagaaggcattctttgatgactacaaagaggcccacctcaagctctccgaactggggtatgctgatgcttaaatgtccatatcctggagcgggacacaaactgctgcctgtatggactcgtgcgattcagggtgaaccatcagattgtctagtgtcttctttgtaataaatttatctgttcttggtactttgtctatggttgaatcggaacccattttccgtttgcctagattcttaatttctggtgctgtatccagctgaaactagtagatctatgatcttgtggctgcagcatgttcttgtcacttttatctggtctccgttggttcggttcacaggttgtgtgctttaaaaggctgtgcttaagtcctgcaattcgagtccaccaaactgtagggtgcaagtcgagattttattagtgatgcaagttgctggtattggtgcattatcgggctaatacgcttgcgttgccttctgattttataagtgatgtaaattgctggttttaacgtgc

SEQ ID NO: 2407 - DNA, 1068 bp, Zea mays
  Clone ID: 700211645_FLI
gtgggctgcgaccgaatccaacataagaggaaaggggcgcttgctttatattctttctaacctgcgatctccgtccatccagccgagaggtcgtgtgcgcgtggatctctgcgtggaagggatgaagattacggcgctcctggtgctgaagccgtcgacctccggagccgggagctcctcgtccggcggcgagtcgggcccggaggcggtggtgctcgcgaacgcgatagacgtcagccacttcggctatttccagcgcagcgccgcccgcgagttcatcgtctttgttgcccgcaccgtcgctcagcgcacccagccaggccagcggcagtccgtccagcacgaagaatacaaggtccactcccacaatagaaatgggctttgtgctgttgcattcatggatgatcattatcctgtacggagtgcattttctcttctgaatcaggttcttgatgagtaccagaaggcttatggggactcctggaaatctgtgactgcagatgaaactcaacagtgggctttcctgacagacgccttgacaaaatttcaggatcctgcggaagctgacaaattaatgaaaattcagagggacttggatgaaacaaaaattatcctacataaaactattgagagtgtccttgccagaggagagagattggatagcttggttgagaaaagctctgatctgagtgctgcttctcagatgttctacaagcaggcaaagaagacaaaccaatgctgcacaatactgtaaattttggctcttcactcatggttgcaagaaacaaaaacggtcgatatcgtgctaatttatttactgtaagttaagtcgccagtgaagcgtggacacgtgattgcaaggcccgagctcagtgaaggctatacttttgttcaagacctgccagaattggactgttttcttttgagaattccagctctccaaacaggccggattaccatcattctttagtgactatgaaacctcgtagtaccagctaacaacatttactctactactactatataaggcttgcgtcaaactgcagaaatcaccaatatggttaaatt

SEQ ID NO: 2408 - DNA, 1370 bp, Zea mays
  Clone ID: 700211662_FLI
ccaagatggtaggatggggccgtcttgcgagagagctaacaactctcgaggccgcctcatggcggaagttcacggtcggagggcgtgtcgagccttcccggtgcaacttcagtgcctgcgctgttggcaaccggcttgtccttttcggaggggaaggcgtgaacatgcagcctatggacgacacgttcgtgctcaacctggaggccgcaacgccggagtggcggcgcgtcaaggtttctgcctccccgcccggccggtgggggcacactctgtcgtggctgaacgggtcgtggctggtagtgttcggaggctgcgggcagcaaggtctgctcaacgacgtcttcgtcctcgacctcgacgcccagcagccgacgtggagggaggtcgcgagcgagggccctccgctgccgcggtcctggcacagctcatgcaccctggacggctcgaagctcgtggtctcaggtggctgcgccgagtccggcgtcctcctcagcgacaccttcctcctcgacctcaccaaggagaagcctgcgtggagggagatccctacgtcctggtcgcccccgtcccgcctcggccacaccacgtccgtctacggcgcgaccaagctgttcatgttcggtgggctggcgaagagcggctcgctccggctgcgctccagcgacgcctacacggtggacgtcagcgaggacagcccgcagtggaggcagttggccacgacgaccgggttcccgaacatcagtccgccgccgaggctcgaccacgtcgcggtgagcctgccctgtggacggatcatcatattcgggggctccatcgcggggctccactcccccgcgcagctgttcctgatcgatcccgcggaggagaagccgatctggaggatcctgaacgtgcctgggcagccccccaagttcgcatgggggcacagcacctgcgtggtcggcggtaccagggtcctggttctcggaggccacactggcgaggaatggatactgaacgagctgcatgagctctgcctggcaagcaggcccgacgaggacggctgatgacttcttttcgttgcacttgcacacatatggttcgttcgtctctctctgttttacgtcctatatatgcgcgctatgtcttgtttgtgtatcatctactttcagtctgttgctgcgttgtgtgtcggtccgtcggtatgagaaaaaaatagcggaaattgatttttaaaaaattagtctggatgagtttagtctattttattgtcattggagaagttctctttcatcggtctaggataagattctatggtctatatgtatgtatattttcatgtctcagaaaacacaaaaaaaattattgaaggtccaatgtcttgtactcgt

SEQ ID NO: 2409 - DNA, 1055 bp, Zea mays
  Clone ID: 700211751_FLI
ccccaaggaagccccgacgccacggcatggggatcgtggaggaggcgcacaacctgcgcgtggtgggcaaggggaagcgcggggtcatcgtgttggcgcacggtttcggcaccgaccagtccgtctggaagcatctggtgccgcacctcgtcgccgactaccgcgtcgtgctcttcgacaccatgggcgccggccccaccaacccggactacttcgacttctcccgctacgccacgctcgagggctacgcgctcgacctcctcgccatcctccaggagctcggcgtccagtcctgcatctacgtcggccactccgtctccgcgatcatcggcgcgctcgcgtccatctccaggcccgacctcttcaccaagctcgtgctcctctccgcgtccccaaggtacctcaacgatgtggactactatggcgggttcgagcaagatgagctggatgagctgtttgaggcgatgcaatcaaactacaaggcctggtgcttaggttttgcacccctgtgtgttggaggagatatggaatcagtggcagttcaggagtttagcaggacactcttcaatatacgtccggacattgcacttaatgttgcccagacgatcttccagagcgatgtgcgcagcctcctcccgcacgttagtgtcccatgccacattgttcagagcaccaaggatctcgcggtgccagttgtggtgtctgagtacctgcacaggcaccttggtggcgactccatcgtggaggtgatgccctctgaaggccatcttccccagcttagctctccagacattgtaacccctgtcttactccggcacattcagcatgacatcgcagtctaggttggccagtcattccaacaagacaatgagcactcgaagctgtctactgtctgtttgtatggtatcccgcttaattgttcaacgtaggattgcatctatttgatgctctaagaagatttcaaaggtgttacgtagtgttggctgtggaagttgtagcatatatgaccatgtaatctattgtgcgtctaatgtaggctaccgcgttggttgctc

SEQ ID NO: 2410 - DNA, 1385 bp, Zea mays
  Clone ID: 700211776_FLI
aggagcccgaggcgggcgagccgaaggaggagctgatctggggcgtgccgctggcgggcgacgacgagcgcacggacacggtgctgctcaagttcctccgcgcgcgcgagttcaaggtgaaggaggcgatggcgatgctcaagtcggcggtgctgtggcgcaagcggttcggcatcgacgagctcctcctggacgccgacctcggcctgcgggagctggagggcgtggtgttctaccgcggcgccgaccgcgagggccacccggtctgctacaacgtgtacggcgagttccaggacaaggagctgtacgagagggccttcggcgacgaggagaagcgggagcgcttcctcaagtggcgcatccagctcctggagcgcggcatccgggagcagctcgacttctcgcccagcggcatctgctccatggtgcaggtcaccgacctcaagaactcgccgcccatgctcggcaagcaccgcgccgtcacgcgccaggctctcgccctgctacaggacaactacccggagttcgtggccaagaaggtgttcatcaacgtgccgtggtggtacctggcggcaaacaaggtgatgagcccattcctgactcagcgcaccaagagcaagatcgtcttctgcagccccggcaagtcggcggagaccctcttcaggtacatcgccccggagcaagtccccgtccagttcggcggcctgtacaaggaggacgacaccgagttctccacctccgacgccgtcaccgagctcaccgtgaaaccgtcctccaaggagaccgtcgagatcccagccaccgagaactccaccgtggtgtgggagctccgcgtgctggggtgggaggtgagctacggcgccgagttcacccccgacgcggagggcggctacaccgtcatcgtgcagaagacgcggaaggtccccgcccacgaggagcccatcatgaagggcagcttcaaggccaccgagcccggcaagctggtgctgggcgtgaacaacccggcgtcgaggaagaagaagctgctgtgccggttcaaggtgaggagcgccgccgcctgatgagagggtcgttggtctgggtcccagcaggtacagcctgccagctgcttgcccaccagcccgacatatataattcgatcgatcgccaaccaggtccataccgccaccatttgaatgaacatgctgcattgcattgcattacatgataggagagagagagagagagaggacaataaagagtttctgcttcctagctaggcccgttccgtgtcccggtcgttctttgattatttgttggcttgctgttctttttttttctggggaggggggagggtcgcgtttgtatgtgtttattacttgaatgaaaacaaaagtgagcttgtt

SEQ ID NO: 2411 - DNA, 1458 bp, Zea mays
  Clone ID: 700211779_FLI
gcagcagcaggcagccccagaaatcgagcaaacaagctgctccatggcctcaccaacccgaacaccatcgcctccgccggcggtcgagcccatcgcgccttctctctcttcagaacatccgcctgtcaacccctcctgtgacggatccttctcgccggagaacccagcgccagctccacctcctccccctgctactccgcatcctcatactcccagcgatagctctccttcctcaactccgcatccctcggcgccacagcctcttccatctccgcctcctcatactcccgacgatagctctccttcctcaactccgcatccctcggcgccacagcccccaccatctccgcctccgccgagcgctgatgcttctcctccactttcgcgacaggcgaaacgtcaccgccgcgcccatcgccccctccctcacccgctccagtatccccgcctactccagcgccggcgtcctcggaagccaagtcggagcaggaggaggcggaatcggctagcgaatcggggagcatgacgctagccatcgttctagccaaaactgaagatgcaacgccgccgaaggcctcctcggccgaggcgtccccaaccagatcgccgcagaaggaatcggccgtcaccatcgcgaagctcctctccgccgaagacctcgcggcgatggaggctaaggccacgccggacaaggttacacctccgagcgacgctgggtccctcgccgctgccgccgccgttactaccgttgggggagtcagtggcggcgtggggtccaagaggtggctcctaggcggcgtcccggagaaggtgcggcgcgctgagctgaggagggccgagctagggtttagggtttcggccgccgtgttctgcctggtcgcgctctccgtcatggcggccgataccacgacgggctggtccggcgactccttccgccgctacaacgagtacaggtacgtacttgctgcgagcgtcgtgacttttacctactgtggattccagttggtagccgaggtgcattacgttgtcacagggagacacatgattcgagccccattccgcagctacttcaatcttgccatggatcagatgttagcttacctcctgttgtcagcatcttcagcagcgctttctcgtaatggtgtttggatgtcgcggtttggaggggatcagtttaccaaactgatcaatgtctcggcttccatggcattcctagctttcattgctctgggtcttaactcggtgatctctgcttactgcttcttcagcttggtttcatagagctaccgttgtgcattgcatgatgtgaataatactacctgtatgcttcttggagcactgaaccttgatttatgtgaaatttctacatgatttctgtgaaatccctaacagggtgtttggatcccttcattttagaggaattggaagtcactcaataaattaaattatttagtttgg

SEQ ID NO: 2412 - DNA, 1267 bp, Zea mays
  Clone ID: 700211781_FLI
gaaaaaagtaaactcatcagaagatgggggatttcaaagccaacatatctggttttgatctttcttgatgtttacataagctccaatgcatttgaatgtaatcaaagaaagtttgaaggaagtgccatcctgattaaaggtttggcattctttaaataccttggtataaaaccttggttctcgatagtgtgttggctatggaaaaaagtaaactcatcagaagatgggggatttcaaagttttttggacaatgtgcagtacaaagccactggaatactacgctatgaacgtatctttggagatggctacgtgagtactggtggagctgagactacaaaagaatttgtggagaaactgaatcttaagcctgggcagaaggtgcttgatgttggatgtggaattgggggaggtgacttttatatggctgagaagtatggtacacatgttgttggtattgacctttccattaacatgataatgtttgcccttgagcgttccattgggtgtaagtgcttagttgagtttgaagttgctgattgcaccacaaagacatacccagaccacatgtttgatgtcatctacagtcgtgacactatccttcatatacaagataaaccctccttgtttaaaagtttcttcaaatggctgaaacctgggggaaaggttctaatcagtgattactgcaagagtcctggaaaaccatcagaagagtttgcaacatacattaagcagaggggttatgatctccatgatgtggaggcttatggacagatgctcaagaatgctggtttcagtcatgtcattgctgaagaccgaactgaccagttcctcagtgttttacagaaggagctagacaaatttgagaagaacaaagatgatttcctgtctgagtttgcccaggaggattatgacgatatcgtgaatggatggaaggcaaaactgcagaggagctctgctggtgagcagaggtgggggctgttcgtcgccaccaagtgatgcgcgtgcgtatggctttattacaaataaatttggagctctgctggtgagcagaggtgggctgttcgtcgccaccaagtgatgcgcgtgcgtgtggctttattacaaataaatttgcttctgcaattcaccgatgggattcgcttcataacgtgattttacataactgaactctgagagtctatcctattgctttgtgctttgggacaatgagactgatataacttttacggtcctgttaaatatagagtgtgctgcactgatgctcctc

SEQ ID NO: 2413 - DNA, 472 bp, Zea mays
  Clone ID: 700211805_FLI
gcgtccgcccacgcggccgaaagggaacacatactgctccctcgattgcaataccagcgaaacaaattattatctgccttgtggcttcgcacctactgaacttcctctgattctgcaggaccaaaatacgtgtaaattattctttgagaccttgttgtgggagtcgagatgatactttttcacttctcccccatacctggagatgatgattttagagtagcatctccaacacatgtgaaactcttcggaggaaaggcctgctcatagtggcagaataatccgacacggataacactgaacaaacagtgaccgcctggacagaagtgtctgggccacggttggtgtatgcacctgtacctgtataaagagtatctgtaacttgctgcttctatttcacggccacatgctgcgctggtgctgtccaccatgcttctgtaccatactgaaatttcaaaaccattctttgttgctc

SEQ ID NO: 2414 - DNA, 2260 bp, Zea mays
  Clone ID: 700211822_FLI
gccacggacaatcgaaaccaacagtgagagctagcctcgccaaaccgccggcgccgcagcatgcctgtacctctcggctctcgctcttatccccacccacctcgctttctcccctctacaagaaagcgaccaccgctgtgaatcagcagagctgcagtgagagcaagtgagaggatcagaggaggcatccgtgaccaaagatcgagtagccaagaagaagagagatgaacgccgacttcggcgcgcccaaggagctcgcgggaggcctgcagcagcggcgggccctctaccagccccgcctcccgccatgcctccagggaccgacggtaagggcggagtacggtgacgcgaccacaaccatagatcccacctgtgcccaagccgtcgcgcaggccttcccgcacacctttggccagccgctcgtcagcttcgtcgcgccggccgccggcgccggcgccgttgaggagcgccacccgatcagggtgggcgtggtgttctctgggaggcagtcgccgggagggcacaacgtcgtctggggcctccatgacgcacttaaagcctacaatcctcagagcttgctctacggattcgtcggtggcacggagggactgtttgcaaacaagacgttggagatcacagacgatgttcttgcttcctataagaaccaaggtggtttcgatttgctcggtaggagtatcgatcagatccgcactactaagcaagtgaatgctgcaatgacaacatgccacagtctgaacttggatgggttggtcatcattggaggtgtgacctccaattcagatgctgcacagcttgcggagacccttattcagaataactgtaagaccaaggttgttggtgtgccagtttcattgaatggtgacctcaagaaccagtttgttgaaacaacagttggatttgatacagtatgtaaggttaattcacagcttgtaagcaatgtttgtcttgatgcgatctcagctggaaagtactattattttgttcgtctgatgggacgaaaagcatctcatgttgcctttgaatgtgcacttcaatcacacccaaacatgctcatcttaggcgaggaggtagcattgtcaaaactcacactgatggaaattataagcaagatttgtgatggagtacaagcaagggcaaaattagggaaatatcatggtgtgcttgttattcccgaaggacttatagaaagcattccagaaatgtatgctcttattcaggaaatcaatatccttcacaacagtaatgttcctgtggctgagatgtcatcacaactgtctccgtgggcagctgctctgttccagttcttgccacccttcatcaggagagagctgctgctccaccaagaatcagataactctgcgcagctgtcccaaattgacacggagcaactgctggcccatctagtagaaacagaaatgataaagagaacgaaagaaggaaggtacaagggaaggaagttcagttcagtatgtcatttctttggatatcaggctcgaggatctacaccatcaaatttcgactgtgactatgcttatgctcttggacgtatctccctgcatatgattacagttggattgactggctacatggcaactgtggctaatctgaaagaccctgttgagaaatggagatgtgctgctgctcctttaactgcgatgatgagtgtgaagaggcatttacgtggccctggagcaatccctatagggaggccttccattcacccttctccaattgacctgaaagggaaggcttatgagttgctgcgagagaaggcttcaagcttcctccttgacgacttctacaggactccaggaggcattcagttcgaagggcctggttcagatgcaaagcccatcacgctgaccattgagaaccaggactacatgggtgacattgagatactgaaagagtaccttggcaaggttaggaccatggtgaagccagggtgctcccgggagatcctgaaggcggcgatcagttccatggtgtcggtgacggatgtgctgactgtgatgtcccaccccctcaacgccgagctgcccctctaccatttcaagtgagcgagggcatcagtctggttgttatcctagagtgtttttgaaacagcagaagattctgcttcatggctgccggtcttttttttaatgtgggtgagaattaagcactgtgttgtaccaataaacactgaaacagtacttgatactgaactgaatcgcgtgctagttgtattattggtggc

(The sequence listing continues in the following parts.)
